United States Patent Application Publication US 2013/0096032 A1 - sequence listing, part 27

SEQ ID NO: 936 - DNA, 77999 bp, Arabidopsis thaliana
gatccaaggaatgcttaaagattgttccttttgtttgttttacatacacatttgtattgttgtaagtttgtaactttgatttgctcaatctctgcaaatgaaatgtttgtagcagtattggtttctctgtataataaaaagatttaaaattgaacaagtgggtcacgaggtaatcacgtgccaagttcctgaaaactcttcttctctgtttctgacttattaggcttaagtctttgttcttccttctcgacgacggtgtcacttgcgatgaatctctccacgaggctcgctgaaaaacttcccggaatcttaccggcgccgtcttctcctctcctgcgtaaaggttggttctttttaatcttactgtctttttggaaattgcttgtttggtttggattcaattcaaagggaaatcttttctgggtttctcttcgtctgtttgatttgtctctgattgatgaaggatactttcgtgctcatatctctctacctcttatctttactaggttttaagtcgttaggttcaatctcgaattcacaagctaatgagggtttttgttaattatttctactcatgtgtgtattaggagtctccgagttaagatgcttttcaattgctaaccaaagtagaagattgagatggggattacaaaagaagatggtttggagtttggagagagctgagacctgtgtagtgagcaaatcatgtttagttcatcctgcaactgaagcctatgcacaagaagctattgaagctatcaaatccgaaaaagttattgctgtgcctaccgatacgctttatggcttcgcttgtgatgcttggtaatctaaaaatcttcactttatcagctgatataaccttttacattgcctggactaagttgtgatttatgtaacatgacagttctttagaagcggttagccggatttatgagatcaaagggcgtaaacttacaagccctttagctatctgcgttggtgatgtattagatatcaagagagtggctaccacaagtcacttacctcacggtttacttgattcgctcttgcccggtccagtcactcttgtacttcaacgaggtttgcatcttcttcttaatgtggttgcatttgatatgatctctttatgtgagagtgttcttgtagtgttttaaacaggtgaatcaagcattcttgaaaagtccttgaacccagggattggtactattggagtacgggttccagattgtgaattcattagagaagtatcgagaggttcgggcagtgtgttggctcttacaagtgctaatttaagcggtgatagaagcagcgtttgtgttaaagattttgagaatctttggcagcattgtgcttatgtctatgatggtggtttacttccatcgggccgcgcaggatctacaatagtcgatctgactaaagttggaaagtacaagatcattaggcccggaaggtatgtttagatcagtaaatgcgaattaatggatttagagtttgaatctttgtggagttgttgagctaaaatgacttataataatgttgcttgtgttgttaattcagcgcgaaacaagcaacagtggcaattcttgagaagtatttgctggaagaagaagaagaagaagaccataaagagaagagagctagttaaactctgaatcatctgatctgacttgcaaaaatttgaggttttgctttggttcttactaaatttttgatattgggttaagatatgtttgtttttagtgcaatacgagaagattgttagtgttgagggggtatgctaatgctacctcccattcccatggtacgcatgtgtaatttgaagaaacttggtggaccatttcgtaatttttacttaagtttcttattattgctccatttggaaattaaactttgttgtaatcttattaaaaaattatcaaatattagtggaaatttttcctatttttaagaacaatatttgttgtatccatattcttttcttataaaggtgtcaatttttcaatagaggaaaatctcattaatttttgtatataggggtcaaagttgaagaaaaggataaatagaggacctcaaaatttcattttccacgtatccgtgctctaattttattccacttctgctaaaacatttggactataaatgtctggttggtcttggctgtttgtttgcaacacttgtgctaaaacgttttatcctgagtttctttcaccatccagcttcatttgtgaaaaatcgtcaatccctctcaaactcttctcaccactaatttcttcctctggaacattctcttctctattattttgattcccttggcctcaacactggtttctcaattgcatgatcttggctcgtcttcaggtactgttgtttcataccttagagaatctcaaattggttcttgggtctggtttgattagtttctgtgttatttcaagggggaacgaagacaatttagctgggtaattctgggttttgcggaattttggttgatttttgcgtcagaatcagaatttgaagctaaaaagagttctgctttgattatccaattgccatgatctttcacagtaaccaaaatggatttatgaagaatatcaaattcagctaattttgctctgtgcctatgcagttactttgattcactgagaaaaatggcgactggagtattgccagctccggtttctgggatcaagataccggattcgaaagtcgggtttggtaaaagcatgaatcttgtgagaatttgtgatgttaggagtctaagatctgctaggagaagagtttcggttatccggaattcaaaccaaggctctgatttagctgagcttcaacctgcatccgaaggaagccctctcttaggtatattacataagagattcattcaaatttatcattttatagctttttccgagcttttgattggatgttatattgatttttgtagtgccaagacagaaatattgtgaatcattgcataagacggtgagaaggaagactcgtactgttatggttggaaatgtcgcccttggaagcgaacatccgataaggattcaaacgatgactacttcggatacaaaagatattactggaactgttgatgaggtttttgcatctgtcctttcaaacctgtttgcagcttgtaaatattgcttcgatttgggatatatgatccaagtttttgactgttacgttgaaaattatagagacacatgttgtttgttatgtgatataggttatgagaatagcggataaaggagctgatattgtaaggataactgttcaagggaagaaagaggcggatgcgtgctttgaaataaaagataaactcgttcagcttaagtaaataaaagatggccatacttagttttctctatgtttgtttgttgagtttgagtagtatgaaactgaattggtgtttttgcttgttggttacagttacaatataccgctggttgcagatattcattttgcccctactgtagccttacgagtcgctgaatgctttgacaagatccgtgtcaacccaggaaattttggtatgttttatacttttatttttgtctttcacttgtttctttaatcgagaatgaatgatttttttcctttgcagcggacaggcgggcccagtttgagacgatagattatacagaagatgaatatcagaaagaactccagcatatcgagcaggtggaacgaagcctttgtttcacttgtcttgtgaaactagtaaagttttaatcagtcctaactaaccgtgctactctttttctttaggtcttcactcctttggttgagaaatgcaaaaagtacgggagagcaatgcgtattgggacaaatcatggaagtctttctgaccgtatcatgagctattacggggattctccccgaggaatggtgaaatatcttaaagcctttaaaaaagtttctcttcttacacatgagcttgttgtcttacctgagttctgtcacacaggttgaatctgcgtttgagtttgcaagaatatgtcggaaattagactatcacaactttgttttctcaatgaaagcgagcaacccagtgatcatggtccaggcgtaccgtttacttgtggctgagatgtatgttcatggatgggattatcctttgcatttgggagttactgaggcaggagaaggcgaagatggacggatgaaatctgcgattggaattgggacgcttcttcaggtacctcattacatggcaaaaggtaaagatctttcctttacagttcatgtgtgataatgattgtttgtaattacaggacgggctcggtgacacaataagagtttcactgacggagccaccagaagaggagatagatccctgcaggcgattggctaacctcgggacaaaagctgccaaacttcaacaaggcgttgtatgaataattcttgttctgatccttctctggtttccaatttatgggactaatgcaacccttttttatgtattaggcaccgtttgaagaaaagcataggcattactttgattttcagcgtcggacgggtgatctacctgtacaaaaagaggtaagactgtacatttttttttaaagtttcatgatgtcgtttccaagtattaaggaaaatgaagtctttcgtcctgaaaactatagggagaagaggttgattacagaaatgtccttcaccgtgatggttctgttctgatgtcgatttctctggatcaactaaaggtgagtcttgataaatattcttcagtcttctctccttcttcttctatttctttaacccaaaatgtaaagggatcattgtctttctgctcactactttggtttcctgtctaggcacctgaactcctctacagatcactcgctacaaagcttgtcgtgggtatgccattcaaggtgagatatggttcaatatattttcatgagagacgcagtctcactgtaataaattgatattggttctcaatctgactttcctgagtgatgcttgtataggatctggcaactgttgattcaatcttattaagagagctaccgcctgtagatgatcaagtggctgtaagaatcaccctttcttctccatatcatttacatttaagatttgacatggctgagtataaatattgagttctgtttacagcgtttggctctaaaacggttgattgatgtcagtatgggagttatagcacctttatcagagcaactaacaaagccattgcccaatgccatggttcttgtcaacctcaaggaactatctggtggcgcttacaagcttctccctgaaggtgtcccaattgtttacctgaaagaattcataatatagagaacagttttctttcgttatttcttagcttcggttatttcaggtacacgcttggttgtctctctacgaggcgatgagccttacgaggagcttgaaatactcaaaaacattgatgctactatgattctccatgatgtacctttcactgaagacaaagttagcagagtacatgcagctcggaggtaataattgaatattctcaatagctaatcttttactgagttcaaaattgtcacttttaagcgctaagtggtttttttttcctggacttgtaggctattcgagttcttatccgagaattcagttaactttcctgttattcatcacataaacttcccaaccggaatccacaggtagataacgacttcaagctttatgcagtgaatggaaaatccagttttgaccatgtgatgttttctttcttcttgcgcacaatgcagagacgaattggtgattcatgcagggacatatgctggaggccttcttgtggatggactaggtgatggcgtaatgctcgaagcacctgaccaagattttgattttcttaggaatacttccttcaacttattacaaggatgcagaatgcgtaacactaagacggtaaaagcacaaagaatcagtatttctgcattttctttctaaaaagagagaagcaataacttgcaaaatcatcgcaggaatatgtatcgtgcccgtcttgtggaagaacgcttttcgacttgcaagaaatcagcgccgagatccgagaaaagacttcccatttacctggcgtttcggttaaaactcaagactttcatacatgtttttcaagaaaaagttttcttctgtttttgaatgtaaacaaattgaataatggcgcagatcgcaatcatgggatgcattgtgaatggaccaggagaaatggcagatgctgatttcggatatgtaggtggttctcccggaaaaatcgacctttatgtcggaaaggtaacacctttattcttgagcttcgttgtgaatgtgtttatatacaactcggagcttccgggtgacaaaagaatctgattttgatatgttgtggacagacggtggtgaagcgtgggatagctatgacggaggcaacagatgctctgatcggtctgatcaaagaacatggtcgttgggtcgacccgcccgtggctgatgagtagatttcaaaacggagaaagatgggtgggccattctttgaaaactgtgagagaagatatatatatttgtgtgtgtatatcatctgtttgttgtgtattgcatcatcattttgaacaaatgtccaaatctcttaagttgataaaagttcttaggccaaataaaatttaatatgaaacttgaacaagaaatttgacattaattaatcaacttatgaactcctcctaatataaaatagaatattattacaaatacgtaaaacgtcgtcgttcatttatctgaatattatatatatatatatatatatatatatatatatatatatatatatttaccctttaagaaagaaaaaaaatcgaacttcagagaaaacctaatgtccaaaacaatccagcgattcattgtcttcacttttacgtttctgtaagcaaattcgtcctgtgtttcttggtttcttacacttttttgttgttgatttcttttgtaatggatcttgtttaggtttcatttcgtgttccatcatcgtcactctcctagggtttcggttttgcttactgttttttttaaaaaaattcttagcctttcctggaaattattcttattattctaggttattaatagttgggttgtgatttgtattctgatttggttctctgaaattgatggaattctgttgagtttatgatcttgtttgattggcttcagacaaattctgagagtcttgacgagttttcttgtttctttttcaggcaatagaatcttgggtttggttaagagagatggacagaatcagtgggttgcctgatgaattgttggtcaagattatatcgtttgttccgacaaaagtagctgtatccactagcattttgtccaaacgatgggagtctctttggaagtgggtgcctaaacttgagtgcgattgtactgagcctgcacttcgggattttattctcaagaatctgccgttacaagctcggatcatagaaagcttgtacctcagatttcgtcgtgagtcatttctgtttcaggatatcaaactctggggtggaattgcaatttctcactgcttgcgtgagctacgtatcgactttttttctcactatgccaatccatatgttatattgcccagaagcttgtatacctgcaaatctctggtgaccttgaaactcctaggcttgggtattcgtgtggatgttcctcgagatgtttgtctcccttctttaaaaactttgctacttcaatgtgtggcatactcagaagaagatcctcttcgactgcttctttcctgttgccctgttcttgaagatctggttattgaactagatgatgcaaaccaaaatgtgaaagcgctagttgttattgtcccaactttgcagtgtctatccttgaagatacctgcttcatgttctgatgaacggtatttgattgttaccccttctttgaagtatttcaaagttgaggatgacagagaaattttcaatgctttgattgagaatatgccagagctggaagaagcggatatctatgttacgcaacatattgagacgcttctcgaatcagttacatctgtcaaacgacttacactacgccaattgtacaacagcatagatgaggtaatttgtttctgtctatcaactttaagctctcaatcgtctgttacaacttatgacactgttacatgtgatttgtgcagtataagtgtcgtgctggtattgtcttcaaacagcttgaacaactggagctatccatatgcagtgataattggacaaagttagttatatggttgctccaaaattctcccaatctgcgagttctcaatcttgacgctgatgtaagtctcttcattgactatttttgctaaaagctttctatggtgtaatcttgagtctgagtctctctgtctctctctcacccccacgcagagtgattatgaacgttatgaggagtatgaacaggataactggaagaatatacaaagatctgttcctaaatgtttgaagagcagtctcaaaactttggagtttgcagggtacacggcaaggccagaagagagggatttcttgagttttatcttcaaaaaagctcgttgcttgaagacttcatcaatctcgcattgaccacaacataagaaacttgagagctatcgcattttattctgaatcttgttttccaaagacaatttggttttaaactgaatatggaacttgcttaagaacgaaactagtgtagattattaatcttatcatgtggttagtgacttagttctatgatctggttatatgtgtgtgtgtgtgtgtcgcagtcttatgtttgtttaaaatatttcaaataaatccgaaatacaatttagttgaaacagaagcatacaagaaacatgaaattttgtaaattcgtgatgttttcttgtagtcaacttacatcctcaaaaagtcaacattttcaaagttataaatacattatacatttgtttacaaatagccattctcttacaattataacactctcatgacatacaagtgtatcaatatggcaaacaagaaaaaaaaatcataagaaacacaaaatcacttcttgttttctccttcaaataattgggacgtaccatttttattttatttttacttcatgtagtttagatatatacggtgcagatttgaaggataaaaaaatataaatatatgatttaatcaaataagcagcaacaaacaggaccggtgggtttgtcgaagaggcagtggccgtccatggctgcagcgtcggtgctcctgtgacaatgcttgtcgcagtcgccgtcgttgttgcacgttcctcttaagcggcatggtccgtccattacgtctttctctgtttttatgtaaatttaacacacatgcatgtatattattaggtcaaaaaaatatgacatatgccacaaaacacaagttttggatttaaaagtatttgttattttgaaggggtggaagataagtacctacggaatttgcagtaatactaataacgagagagaagacgacgagaagagcaacaagttgaaatcttgatgaagccatttttcagattatttttatcttttgtattgcaagatattcaactttaaatttgtgtttgaaaaattatgatctatgttggggggttttatacgtgaattttagttttaaagatagtaattttgttttgttttaaatagtagaccagttttagtcaaggtaatttatggttaatatagcaatacaagtaaataaatctcctcaaattagaattagccatcgtttcttacttctaaatttggtgaggatatgaaagaatgaacggtagaggagtggctttgattacttgaaaattacttaaaaagtcaatgcaaacacaaagtcttaggtttaattataaatattaaacattgatattttttaccaaattttaagcatcttaaatattaaacataaaacataatatgtccaagatcatttaagtctcaaaaaattatgcacacattatcaaacaaacaccaaagaaaacaaaaatcttattaactttctttggagagtcgctgtcaaaattaaatcttatacatattcgaaattttataaatattgaaagtaaaaaatggtctggtagttttgtttttgttttttgttttttgtcaattaattttgcgtaaaaaatctatacaattttaatgtggtataagtataatagaatctaataaacttttcaaaagaaatataaccaatccaaataaagtgcaatgcgatccgaaataaatgaattaagaattttactatttgaaagaaagttgttaagaatctagatattgaaagaaatattcaatagttaccatgattgaacaacttgggcttattataataatgggcctgatacattatcaatccgagagagtcaagcctcgtgagtggttaaagctctcttcatcggaaaattccagattgggaaacaccaaaacaaatcaccggcgatcggaaaccggcgacgtaagctatgagcagtacggcagggaggctcgtgacttcaaaatccgagcttgacctcgatcaccctaacatcgaagattaccttccttctggttcttccatcaatgaacctcgcggcaagctcagcctgtatgtaaaactctctccgaaatttccgttgaatttgaattcgatttgatccgctgattaagtattcacctttctttatgattcgcaggcgtgatttgctagacatctctccaacgctcactgaagctgctggtgccattgttgatgtaagatatttcagactaaaacccaaatctgtctcaccattactctatcaaaagacttcaaatttatcacataaaggatagatttttgagtataagatgttttgttttgtgggtttgattgttgcaggactcgttcacaagatgtttcaaatcaaatcctccagaaccttggaactggaatatttacttattcccactatactgctttggggttgttgttagatactgtatcctctttcccttgaggttggttcctcttatttattcaattatatatggctcttatcctctccagagctcaaagtttagatctgcatgtttgtactgagcagtttcattgttttaaaacttgcaggtgcttcactttagcttttgggtggattattttcctttcattgtttatccctgtaaatgcgttgctgaaaggtcaagataggttgaggaaaaagatagaggtaggttggattctctcgtttgtcttgtataatttcgttttcactatgttattccgttattcttccatctagaattcaggaagattttcctttcttttgctgtgttaccagagggtcttggtggaaatgatttgcagcttttttgtcgcctcatggaccggagttgtcaaatatcacgggccacgtcctagcatccgtcctaagcaggtcatgcttcattttaaaaaacgttattttgtgtctccatgatacacatgcttactttatgagtggggtttacaggtctatgttgccaaccatacttcaatgattgatttcatcgtattggagcagatgaccgcatttgctgttataatgcagaagcatcctggttgggttggtaagtcctcaggcttttagagagcgaaaagtgtgcttataaccttttatgattgctcagtttttaataggcttgtgactgatttagtgattggtttgccctttgtgcattattgtgaaagccatgattgacttttgttgctttatatatgaaggtcttctgcaaagcacaatattagagagtgtgggatgtatctggttcaatcgttcagaggcaaaggatcgtgaaattgtagcaaaaaagtatgcatgattcttatcctctttaagtgtcattacgtgatctactcacactaatcatgggaacatgaatcacgtgattcaggttaagggaccatgtccaaggagctgacagtaatcctcttctcatatttcccgaagggacatgtgtaaataataattacacagtgatgtttaagaaggtatttggacttaactttgatgtgatttgcactactactacactatagtttctgattcgcttcatgacaatgtcagggtgcttttgaattggactgcactgtttgtccaattgcaattaaatacaacaagatttttgttgacgccttctggaatagcagaaagtaagcgtattttatttaagtctttcatattagacgggacagatacgactttttgtttcacttatattgaatagttgcgatttaggttcatttctttgtcttggtaactaaatatgttgcatgctttttgcagacaatcatttactatgcacttgctgcaactcatgacatcatgggctgttgtatgtgaagtgtggtacttggaaccacaaaccataaggcccggtgaaacaggaattgaatttgcagagaggtaaaacactcttcttttggatctacatcagagaagtcatatatactaagaagtttgcatccactttatataattgtgacagggtcagagacatgatatctcttcgggcgggtctcaaaaaggtcccttgggatggatacttgaagtattcgagaccaagccccaagcatagtgaacgcaagtatgtcgttctttctagagattctactgtcattattctttctatttgaaactcttaaaagaattttgagtagcatggttatctattagctgattagatcaaagtcatacttggaacttgcagaaattgttctgatccttgaatctatacgaagtatttacagttcacattcttgtgcctgttgatggtaattggctttctttaaactaaacaggcaacagagtttcgcagagtcgatcctggctagattggaagagaagtgaatgtaaagatgaagttatatttatgtgttttcatttttccattagagatactcatgagtcatgacttatgttctctatgtttctcaatacaattgtattgttgtgatttgtgaatctctcaataaacataactcacttttgcatcttgttcgtacactatatcacaaatatacattctctggaaactagagatagaaatctttagaagattatcagaacgaaccaacaaatatgtaccaaaccttttgagaaatgaatggcaatttcgagtatcttcagaagaattcagtggaagcgtaaccataccgggatcgacgaatgttctctcgccgtttcttcaacacataaccaccgaatccaaccatactcgcggctgcaatcgatccaacaacagcgattccggttttctttcctcctcctccgccattttcaccacctacggatgcttcttcgcctcccggtctggtactatcagtgtagttgagatcattggattccgtaagttgagacgatgacggataatcgtaatcattagacatcgtcggagatggagacatttcggtttctgattgcggcagagacgacgaatgctcaatcgccggtgaaatttcttcagttgaaatctcaccggacaccattaaaagagctacaccagataccattacaagagctacaatgatgaagtcgaacttcatctccaaaattcaaacctctctctctctctctctctttttcttctctctttttgatggttgatgacactcaagtagagagatggtgattttatagggtacctatgacgaatggggattcgccacgtcagaagtgttagaagctagagcatgaactgaatttattgattttcccacttaaagatcctatgagtaaacaattgctttggcacctagtcacctactaaagttatgcctaacggtcaatgctttggggatctcaaaattaatttttggtctataaatggagcatatgaaatgtcaattatcagaatcgtaaggcaagtaaccactttataatgttgacgcttattttatttgtattgtgagttacttgtttcaattaacagaaaagtcctataaggccatatccatttgtgagatattttaaaaatttctcaaaaaaaaaatatatatatatattttattatgatttaatttctgtccaattataaacacacatatacacatagtttctcagagaaactattctcaatctctctcttatctctctcctactttattattattttatattttttagttaatgagaaattatgttaaagactactgatggagatgctctaactttggctttctacatttagaaaagttgagaccaaatcaaaagaaattgtctttctcaaaactaaaattactttaattcccatctttatctagtccaaactcatgatgtgacaattctgatcatacatataacaacttaaggagacatgtaatatatattatacccttttctgatcacaattcgtccttcgagtcactttggctactctttgtcgtgctatcgggtgattctttggtctcggtagtttctacttttggtgtggactctgcagttttaggtgattcggttgatgcaggtttctccagtttgaatgggatcgttgcgtgtttccttaagaacttgtaaaatgcaaccacagtgcggtctgtatctacagtaatctgctccacacacaacaaaagaagacaaatttttcggttttatagaaatctacaaagaaaaaaccatttcagcaagaagaagcagaacttaccggctctgaagtcttgttgcccgcagggaagaagagaatggtagggaacccctcagcctgtaaagaattaactcttgaggtttttcaagtagaagttatcgatgtctagagatgtatatttgataagtttattacctttgccttgggatgttcattggttgttccatccatcttggttatgacgagagaatcaatacttcgtaaatgcttggcaagtttgttatacattggctcaagggcttggcaatggccacaccatggtgcgtagacctgagttttgttttaagaacaaagtattgctgaggtgagaagacgtgagtaaatccatatcagtttattgacggatttttatacaatattacctcgagaagcacatctttagaatcgtccagaacaatttcatcaaagttatctccaaccactattttcacatcttcatcgttctgtagccaccaaaattaagtttcggtgttacatgagccaacaagacggttggaaattaataataaaacggctttaccttttcaggaatggggtctgacttatagaaaggctttaacttgtcgttcaggaaatcctccccaaatatctgcaggagattaaaaatttaaaggtataaatttaaccaacaatctttacatgtcaccgcgaaataataatttttacgaatgaaagaaactttaaagacataccttaattttatctgactggatctcgccatcgaaaaagtattttttagggtcttcattccctgtgtagccaataagctatacacagaccaacgtttgagatgtatcagtatgtcttatcgaaaagatctaggactcaaattcttttaaatgtgcaactcttaaacacataacaaaataaaaacaatagacttactttaggaccatttccagacacaccaaagtattcagcgactggcttcccataatcctcattatccagatccacagatacaaagatgagctttagcaagaaacaaaggcttcttagaagtaactctttcattgttgcccccaaatatcctctttcctttgaatgatttgtctttgatacaaaacaaaatatcaattaaatcggtctaaattagactagaactatgttcatacctttcctttgaatgatttcgctgcttcttgaaattccgtaagaaccttttcagattcatttttggttacaaacaacaacaactgcaaaatgagaacatatactttcatgttagtaaacggacctacaccatcttcgaatttaaaacaaaaaatcctactaaaaccattgacagacctgtttcttgattgcactctcaaaaatttccggagcagtctctctggtgaaaacagagaccaaagcaagcttgttggcagacacaaaactaactagagcagacttaacaaattctccatctgcatattaaacacaaacatagtaagcaaaagcccaaagaacaagatcactaaatcaatgcataacaaagatttacagagaaccaaccaaaatggctaattttctcctcttccttcttaactaggacaagagcaggccttttagactccggatcaaggtgaaacatctttgcaacatcaggattcactgtttgataaaagttcacatcgtcttcagctttggaagcagcattaagctgatcgtgctcaacaccctgtagaatttcaccaaaaatgtaataaattgtgttactttaaaaacgactcatagactatatactaaagtgaatagaggaaacataccaccaaggagttcaagtatcccaaaacaactttgttcccagaagtcaacactttctcagcatcatctaatgtagttagattatacacaccaggaccaatcttcttcttcacccatgtcacaattgtttctctaaaccacaaaaccaataaaactattcaaactccaaatcagattcaacgatgcctcacttagtaccaaaattcaatttcacttacttagtccttcctccagtgtaaggcttgtgctcaccatcaacgaagaaaagaagcgtcggaaagccctgaacacgatactcctgagctaactcattctcctccgtcgcatcaatcttagccaaaacaacaccatcttccttaagctccgtggcagcagcagcatactcaggagcaagagactgacaatgaccacaccacggagcataaaactcaaccaaaacgtattgattattctcaatcacatcagtgaagttacgctccttgataaccacaacgtctttctcatcaatctccggcgtcggtaacggatcggaatccggattacctagatcggaaaaatctccttcttcatcgtcatcgtcgttgtacatatcgggatcttcttcttctcctccttcgaattcgtcaaatccagttgaggaagagagtgagtcagcgccgggaacgtcgtcttctttgagatcttcgaggaagctgagatcctcatcgtcaacgtcgtcggaggaagaagcggcgaaagaaggagaaacggcggagaagatgagaagtgcggtgagtgagaagaggagcaaaacgcggaacgccattttagtgtgtgcgacctggttgttgagatctaacaagtaacaactacgagtacaatacaagcttgtttcttttctagtacattgttcgttgttaccaaatcaaacgtcgtcgttttaggatcaaattaaattattagggactataaatctataattaagtcttaaccagaaaaatatataaaccgaacaaattaaactaaaccgaaccgaaatgttttctttgacacattgtaacgttctacataatcaaaacaatagaaatttgacaaaatcttgaaaagagtaatgaaagaagtatgtttttggtatatttaagcgtcagagtgagtgacaatagtgcggatgatattagcacgttgtttcttgatcacaaagtagattcctaatgagagaaatgcgatgaaagaaagtcctaacactactccgatggtttctccacgtccttcttcttctcgtcgactctcacttgttgtgtgttcgtctgatgaaactttacttccttgtgaatctggttctacaatagatgtttttgaaggtgaaggtgaaagtgaaagcggagaaggcgaggattttggtggattattgtgatcagagagtgatgattttgggtgaaagaaatcgtaagcttgtggagagaaagcagatgggtttgtataagctggaccgtgaacaggtctgcttcctgcaatggagacgcaaagaagcatagataagcaagagaagaagaagagcaaagagtgagttaggtatgtcatgatgttgttgtttttttcgctaaccagttttgtaaatgttttcttattttgtttagtgtgagtgtgtgtttttgggttttatatgggatattggctatagaggagatagttgttgcttaaagttcaaaattgtatgattgcataatatcaagaaaaataataaagtgtgtttttgaatgagtgaagactgaagagaagtcatgcattttttgttgttttcaatcatctatatagaatttaccttttctagaacaagtgttaatgaatgatacactttatccttaacagaacaaatagttcgtaatatatatagtggttttaccctctctcttttttcaaaaatcttatgaccctttgtaatttactcgtttattatatatttgatataggtatgtggaacaaatgattttaaattaaggtcatacgatttgttctcttctttcgtatttttggtaagattggtgacaaagaatgcatgaagagtttgttagcttgaaggaaccgcaatggaaaaagaaaacaaggatacggaaattttattaatcgggtccacaatttgggttatattggaatccctaattaatccacataaacctaaaaaaatgcttggaaggaaatacaaagttgagatttaaaacatgcgtgacatatgttgattcccgagagaaatacaatcaaaagacaaaattaacgtcaactctacgaaaagataaagcgaacttgagattttatcttaaagcaacattaattaaaaccacatttacaattacacgaatgggaaattccatgaaatgaaagagagaacaaaaaaacagaaacatataaagaagatcacatgtaacttccacttaattcatttgtaatcatccttttaattttgatcaaagatttataacttgtggtttaatttaaaataaatgtatattaagcaaagctcctaaaggagccaaaggagccaaatgagccaagagctttaatcgcagccgctcttaaaataaactgatggtaaaacgctgctgctgctgctccgatcatcggtccaacccaaaaaatccactgtttcaattataaaaacaaaatgttataattaaacactaatcaattcatataacttttgaaaaaatatgtttatataaaggttaatgacgtacttggtcgtcccaggccttttcgttgttgtaaataacggcagctccaaagctacgagccgggttgataccggttccggtgatgggaatggtggctaaatgaaccatgaagacggcaaagccaatgggaagtggagccaaaactggcacgtgagagtcacgagcatttcgcttgggatcggttgccgagaagacggtgtatacaaggacaaaagttccaatgatctcggcaccgagtccggtacctttgttgtagccatcggctagctcgttggctccacctccatatctaaatatcattaccaatattagtaaaacagtgtaatatgatcatatatatatatctatgaaaccaaaaaaataggagttttgagacgtgatgaaacctggtgtagtaagaactttggaatgctttgacgaaaccgcaaccgcagatggcaccaaggcactgagccacaatgtataacactgtccgcaccaatgacactttacgagccaggaatagtcccaccgtcacagccggatttatatgaccaccttcataaacaaaaataaattgtaaagaagtatttaaattttgataaaacggaccaaactaattcaaactgaaccgtaaagaaacaacaatagtatggtatcaccatctcaaattaaaattcgtaaataatatttgtttgtttttatttgtggaaatctatgtaacgtgactcgaacgtttgtatataaacatacttaccggagataccggcggtacagtaaacgagaacaaagatcattccaccgaaagcccacgcaatacccaatattcctacgccgccacaatccactcctccggcggttgcatcggtttgagctttgtagccgattacagtcaggattgagacgtagaggaacagaagtgttgctacaaactcagctatgaccgctctataaagcggccatttcctaagctcctccatgtcgaaaaatggtgcgggaggcggatccttgtagtctctcgccgccggtggtccactctcgttcacatccaagtcttttgccatggccaaagatgatgagagagatgagttttaatgtttgttcagatttgtatatttttggtttgtttgtgtgtgcatatatatagatagaggtttggtataagtacattataagacaatgtaatatacatggttgataactatgtggacagttaattgaatttattttttattttggaaataattatgaaggaatcagatctattctggacctgaaaatcaaatgagctggtgcctggtgggtattatgagaaacaatctcaatttcgctattatatatgttggtttgcatataatgttttgatttcttagagttttgtttttggttatctatattcgtttacttttacccaaaatatgaatatgttgggtttagttttcattccgctcgagtgtagggatgagtcattttatgcatgacaatttgaataccttaatagtaaatttaagtatattctttttgataaaagattaaatattagaatccaagtccattatgacttagagtgcgatatatacactagtcgtaaattcatttttaacccgagattcaatttaaaacaaaaatatgacgatcatcctttaacgtactatagtagattaagtgtaaaattttcgcaaaacaacaaatctttaaagccaatcctttgtctacaccaagatatgtcaagtaagaattataagatgcttcttcaattcaacattttgtatattatgcgtacatcttccgaataacatgaccgaggatcagagctgtcttaaattgtatgattagaggaggataaacttgtttaaatccgtccaaccaaccccttgatttagacattcttgtgtttgtaataattgttttggtcgacccttgatttaattattttcatcaattgtcgttgcaacgtcgaatttcatctccttatcatttatgtttattcattattttcaatttttagatttgtattcaatgttttttgttataacgagtccaacatgttagattaaatgaagattatctggatactaaatgaatatacggtttaattaacaagttggtacttttatattctggctgaaccagtccatgactttccaaattataatatgaaatcacctatatattgtatagttgtatcagaagacagtttttaatataaacaaaaagagttttatttatcagttaagtaacccaactatgatgatttagatataatgaattgttgtccaaaaaaaagatataatgaattaatgatatatggataacaaactcaaacataaataatgatatatttttgtctattaacgtttttattacatgcatgtaaattattccaggacaagtttatatcacatttcaatatcaacgtcgtcacaatttcaagttaaataatgatatatatgcgatattaacggggatagacctagtttaaaatatatttaattaccatgttatatacatatataacataaagtatttttggtttttagttctaaggatttttcatttttttttaaacacataattccgatgcttaaaaatcattttctttatcttgggtttgttaaatttaaagagaactgattcagtaacaatcatatgtagttagaaattgatatatctataaaatggtttggcaaataaagtttggtctctaactatatatatatgaaaaatacagtatacaagtgacttttttcttaaatgagcaaagtaacaaaatctcaaaataacccaccaattatagaaagtcaaaactaagaagttggatttaataataataataataaggaaaagaaaaataatgaggaggagatgataagaatgagattcttgacatgcgaacaacgttggagctcttattatatgttgtctttgccaggcgaacctttctgtccacgtaattgctcctaagtcctaaaagcatgttcataggtgatatttacaaagtatcattaaaaaaattttagtattatttataatatttgtttaataactatatatattatttttttattttgataaatgtgaccaataaggagaagccacgtcagatgatattggtatcacaaatatcactggattgatactaatcaatctcattctaattattttggtaatataaaaataatttttggacttgtgatattctagaaatatcaccccatgtacatagtctaacccttccaattattcaattagccttggacttacatgcttgatgcattgcatataatatgttatcaatctgtaattacatgaatattaatatagtgtaggtgagagatcgcatatcaagatatgcatccatgtgactatgtttatgcattttggtttagagtttaataacatgataagtgaaagtttcagagtttatactttataagcgtgtttttgacaatcataccaaatacttatttatagtttatttccagtttccttgtattagattaggaaaaattatttttgcagcaatttttttttgtagcaaaagaaacatgtagactagagactagagtaccctgtacccctatcattagtaagtaatcaattgatgtcaacatcaagaaattatttagtaacaatgaagtatcagcacatgtttttgtacactctgatcaccataaattttagtacttggaatttgataatggactctataatctttgatgtttaaataatagaatttaacttataatatatttgaaaaatactagagatgcacatgactaaaaatctttattcactttctttccaacatctctactctctagtactagtaagtagtaacactgaagaatttaaagttaggggcagaagacttatgcaaacacctaacggcactcagtctcacgattgctcccaacaagccttcatggactactggttcttcttcatcaaacaacttctcatagaagactataccggactcagaccacggacctcccgtcaataggtacatcatctggcacaagttcaacaccacacagtacatgttttcaatttggtttattcatgttggatcgaaacattaatttgaaatttggatagagtcaaaagttggggactcaacattgatgatacatgtctcctatgctgctaagctacataatcacgagataattcttgcctacttctctggcctgcacttggggtctacaccactcgattggttctctgatactcacgtactttcatattctgcaagagccagatgcaaggaagcgcactcttcgattctcatcgtgtaacaagcctccatttatgagaactgggacgagaaaaatcgtttgtagccaccattccaccagcatgccaccaacacacgaacgtattgaagtttgttgacataaaggtcagaaacagagcacagtcaccactgtggtcctttaaatcccattggagtcataactcttaaactaagaagatttcaacaataattgacaagaaagcagttgagtgcttttgtttgtatatgaatcccacttgttatgtttctatccagtttaatactaagttcagaagagaatggtgagcacgtaattcttcattatttcattagtacaccatgtctttgccagaaggaccgagcttaacatatgtttttgcggtcaatctaataacatctcatatcaatcaaaactaaagatctaacacaatgaagtagacaaagaatggtttatcccaaaccagatggtaaccaaacacaaaggacattgctaatacaataaacagaaactatcacatttccatctaatctaaacatagccttagaagaccaacaaccaaagaaacactcaactaattacctcattatacaaagtcataaaccttttgatgtattcaacaagtcataatctaaatgatgcagggaaacgagacagactaaatcttaagcactctcgacaactactaatcaatcaagtgaagcattcaaaaataaaatcttgaatctttagagactcaaaaccaacttgacagattgtagaaaattgaacattttgattaatcccaagaaaggattcaaatgggcaaaagccaacaattctcaacttccgaaatatagtattactaataccaaatcctcaaaatcaaatacaaaaaataaaacgatagagaactcaaaagtaaaaacctttatcactcgttaggaatatcaatgtcaccactgttaatttcttcctgaagatccttagggtctttaccatcaacagtgcaaccaacagagacacaagttcctaaaatctccttcactgttccactcaattccttagcgatagatctaggacgcattatcttagcaatctcaatcacatcatcaaacgaaatgttgccattatgtttgatgttcttcactttcttcctatctctctctggctccttgagggctttgatgactagagccgctgcggatggaaccactgtgaccttagcttgacgattctgtaccgtaagcttcacggtgactcgaagacctttccattctttcgctgtctctttggcgatgtcttctccgatcttctttggtgccagaccgagtggaccgatctttggagcgagtgaagacgctgctccgacctcacctccggtgactcggacgtagacgtcgacgatttgagatggatccaatttcggcggcattttctctgattcttctctcactcactcactctcagcttctagggtttcgtctttttataatgcgtttaactagggtttaaatgcaaattacgaatttaccctggaccgaaatcaaaaccatatttaaaagaaaataatttttagcaaataagacaaacacacaattggttgatttcgccattccggatgttttgtttcggttcgcttcaatgaccgaggtgtctgtgctggtttttcaagggtaatttgggaaaattttatttgaaagcaaatgggtttggatttaaagttaatggactcttgtgttatatgttttgataaatagggcctcataagatctgaaagcccaagttttcggcctatgcgttgaaaatttcactctttagtattttgttgtttctcgaggcttttttcttaggtaagatatggattgatttaatattccattaatgagaaatgccacagtctcgaaaagccacaagttagaaaacgtttagaagttcaaagacaaacattttggtgttgccaaaccctaatttgaaataaatggttgttgaaaccctaaacacaacaaagtattaaacggtttaaccgagtgaatcccatgccgaatcccacactaatcctcatgacccatagaaatccgggttttcttgcgctgaaggtgtttagtttcaggtaagaaatttgagaaactaagtaagtaaagtctactagtatcatcatgttcgttgaggttggagttgattgttatcatgttagactaatcacttattaagactcatatacacactcatcccacaaaggttataagcctagctaattcaacaaatcaatcaccctctctctttctcttggtagtacagcgagaatgaaatatcacataaagctttaatctaaaatttcattcaacaaaaacttataaacatcttcttgtctattttcttctccatctaactttaaaaagcaatccaatccttatgtaattggtcaattatggtatgtcccgtattttatgcaagtgattggaccggatacttctatcatctttgagataaggtatatacgccatatgcttccggattagtacaatactggcttgtgcttgaaattttcaaagaggaatgggtaaatctacatacacacataaatatgtatggagagcagagaaaattgatcgaagttcaaaggatgtgagaaagataatgccaaatatatatgtatatattaattagtatacgaattttaccggatacgttaatgaggtttgctgatgtacatgcgtacgcatttgtaaattcatttcaatgatatctacaaagtggtctcattaatcttcaaacccaataattaatatgtcccctcagaaacctgcaggacactcttatgacaatgaagacggaaaacaacaaattgcatcgtcaagaaattcgatgcataactaatactccctctgtttccgaatatttgtagtttaaggtttttgcacacaaattaagaaaacatataaatctcattgaatttatcttttttctataaaaacatcattaattataaccaatccaaccaataaaaaaatatgatatcaaatataattggttaaaaacgattaaatacatttaatgtttacataaaaaaaagtgaaaacaacacttatattgaaaaaaataaaaatcctttaaaatacacttaaactacacttaattagaaacagagggagtagtacattctaacaagtaacaaatgtggtacaaaattctttttctctgtaaaagatggaagttggagcagatctgttacaaatctctctatgaaacgaaaagagaaatgctgatctatggtgatctttgatggaccaactgaatcatataaaatgaagtagcatctaatcgattaatcacttaaacagaaagcttctcgtaattcaaatataaaaatagcccaataattcaccactaattttttttaaaaatcagtaaatcatattcccactttttccctgagccttgtgactggatagctgtatctatataaagtaatttgagttattgttcatttattgtgttttggtttcacctcgtaactttctggactggataacatgattggacaattcatttattttattgtttttccgcaataaagtcactttattatcatcatcatcatcactattacagcgcagtattttaacttttcctttctctaatcattattttatttggctacttaattaaataatatctatgtgcccactatgtcgacatctgaaaatcacgataaataatgcttttatccgttttcttaagcaaataacatttcgatttgactgaaaatggctccaatcttaagcaaataaaatgactatccatcatcaaatgaacaaaacagacctaataatctgtggacacatcaaatatgaactaattgtataaccttaatgatgagttttcacctttgttctaaacgttttggattgattatttcatacaatatggaaaatgacgcttagactaatattgaccctataatgtttttcaatatacaacaaaattgcttcgacgtaataaaaaaaaaatcataaaatgaaagcgtagatgtggatagacacaaaaacctcaaaaaaaaaaaaaaaaaaaaaatgaagttttattcgagcaaaacacttaacaagcaaagtaggaccaaccagactttcaagtttcaacgttcaacgaatctcgtgacatcaaaaataaacccactcgcatgtgataactcacgcgctgagaccaaactcagatattatcgagatgatgagaaaatatcgagatggtacgagtctgtcgcgcgtgagagtgacactgagcgagaagaaaacgaaaggacttaaaaacctgaaattccagctggcgagagattaacgcgtttagatcatcagaatagtgggtcctgccttcacgtggcacccatctaaggtgattgattccacgtgtgatgagatcgagctcttaagacacgtgtcaagatcgtagagactattacttttgtctttctcttggaactggggaagggagaaagtgaaaccgaccccacccgagtcacgacaaatacttgaatcaagttatgttttttttatatgaaaattgatattttaagatgtacagtacgaagaagaatctatattatccaataaaaaatttaaaaatatttattatttttttgtttcattaggagattactgcgaactaaaaaaaaaaaaatcttggttgacaaatttcttttttagattttatacttacattgttgtccaattcaattttccttcattaataagaagtcggtatgcttttgtttttgttgaaactacctaagattctcctatttttttattttttgttccagaagaaagtggagacttgcatcagcatgatccggtagttttgaaataattattagaaaatcataatgcaaattagcttagacagcaaaaacaagaaaaagaaaaagatacaaaatagcaatagtaaacaacatttgctcgtgataaccactaaagtaacaggttcaactctatcataatgaattgtagtaattagtcacaacattaagtaatgcatggttagtcatttaattagtttaatattttctaagtgtgaaatgtggaagaatctgtatgcaaaatgaggaaaaccagagatgaaagtctgaaagactgactatagagcgagaggagaccctaatcctaaacaaaatagtccacataattagtagtttaataatgcggaatatgttatagggaaataaatacattaaataagtaataataccacgagagaaagtaaagcacgagtggtaagctttgtgcagagtgttttcattgggcaaggaaagataaataaagatataaaaaaatagagtgtggaacggctaaaaataacgaggcaacgagccatgatgtaatcttcgacggttctggttccccgcgccgatcacaccgaccaacctcgtaagtttccaaacggtcgagagccttacagtattatactattatattccatgatattctccgtccatgcactctgattttttttatcaatttcttctagtatttcttgtataatcttaatatttaaaattgtaactatataataactccaaaacaacagtctttcattccgataataaatcattcaaccattgtgccacatgtagaatgatattattgaccgatatactaaatgaaaaaagtgtggattacaatttcttgagtgaaactttttgattttccttcatacaaacacaattactttcggtagtagaaaatccatttagatataatagtggcaaaaatttaaagtctagatacttactttttcgagagacagatgaattaaaagttttgaagtggtaaagaatatgccaaacacgacacatgtaatattctccaactccgaaaaaaaatccatcgcaattcgtggcatttttcgacacttcattaaaatctcatttaaaacccaaggggtatttacgtactttcacaactgacggaaactagaagttaagggtcccttatccagtttatccaaaaaacctgtataaaaccaaagactccctcacgactaattcttcttcttcattagcagattaaacaaatctcaacattcgaatttttaaaaattcttcaaaatctcttcttcaatggcgacgggaaagagttactacgctaggcctagctatcgatttctcggcaccgatcagccgtcttacttcaccgcttccgattcaggtctcgaattcgacgaatccgatctcttcaatccaatccactccgattcaccagatttttgccgtaaaatctcttcatcagtcagatccggtaaaaaatcgtcgaatcgtccctccgccgcttcctccgccgcagcagcgtcgtcgcttcctgttaacgtgccggactggtccaagattctccgcggagaataccgcgataaccgacggagaagcatcgaggataacgacgacgatgacgatgataacgaagacggtggcgattggttaccgccgcatgagtttctggcgaagacgagaatggcttcgttctcggttcatgaaggagtagggaggacattgaaaggaagagatctgagtagggttcgaaatgcaatttttgaaaaatttgggttccaagattaaatatttggaaacttttggagttttcctttaatttttggcttacttcaatcattttctcaagtaactgtcagagaagagagagagcatgtaatatttctagaaatgccctccatttatcgttatattccgaaaatcttaccctatgtaattgtttttttaacttttgagatttttatcacattttgcgtaatgagtaatagataatgttttctttttttggaagagtgtttgttttgtttattaagcagttgattttatgggaattaaaatctgaacattctgatttttgggaatttaattgatgtaagtaaaatttaggggttgaaaatggataaaatagaaaaagtggggcaaaaagtttcaattatttggttgttgatatttgagtgtttgatgaggtgggtgagaaaagcagaggctacaaacacttgaaagtgacattagttgcttgagaattattctcttaatttctttatttatttggaacactactataattttatgaatcacttttgtataaattatattatatgaatttcagataagtttctcatctaaactaaaacggtttatttattaaaattagcaagggattacgtgaatcagaatggttttcgtgtaagggataataagggacatgtaattcatgtgatctttcaggattatgcgttccctaatgtagaattttgtcattatccaaacatatttccccataaaattaaaactaaaactggattttattttcatgttcattgtctcaagagtttctagaatttccggtaataaggttttgtaattgcattctacatatagaactaggaaaaactgcatttctacaaatacattatcttatccgagtaaaaataatgatcttatcctgtctaagaattatagttatcttcaacttaaatctgaaatagatatttcccttttgaaaacaagataaatggaaataagtaccatccttgaataattacaagatattaatgttgaaaaaggactgtaatttcaaaggacccgcaaaaggtcaatgtaatgagtaaatgagtaaggaggttttcaagttgggtgtcgttttctgatcaaacgcccaccgttttggccaaactgtggacctcgtggaatatgaggacctaggacacatacctgtaatatataaagtgactaggaaaaaactaaaacgattttgaatgccaaaatgttctttcgaagactccctttaactacataactaatcaaaacttgtttttaggaggtgatcctagacccaatcggtttggaagtgagctcataaaaaaaggtttcaagcagaaatcctccttcttgatcagatgggacataaagtttcagtatctttagtaaagagtgtgtgtgcttgtgtagaaaagtcggaagtagatttttctgtttgctatttatgaaatttgagtgcaaatattgatgaatgaaatcattttcttacgtttggatttgatattctgtgtttgaatataagaaacagtatatgacaatgatcacacatacaacataagatataattaattgtctgttgttttcttacaacatgacaatatcttgttgagaaaatctttcggatacaagttataataataaaggattgatattataaactgtaaaccgtcttgattggtaaatgacatctcctatatttatttaaaattttaaaatccaccaagttagatgaacagtccacatctgttatatagtcatcaatcatcaagttatctttttagttcaagttgtattatgacacactctcatgaattaaaatgatattaatctgaaagtctttagagactgcagttgtaatggaagaaacggagatctgagtaacagccaaaattgggggtttaaagttcaaagccttatcatttaattaatcttttattagttgcagatatacaacatgtgattccacaataaggtcaccagcccataaacataagcccaagtccactataacttctaagcgatataaaatcatagattgttggttatataatacatctttgtgggcttattcactgatacggtacttccacattttcttttgtcgagactctcaataacattttaccataaaacaaaaaaaaaaagaacacagagaacattcctcattcctgacctattttttttctttcttgatcgtctatagtacactagcatggaatctagagaaaaccgaacactatcttcgaatgtaaactttgatatatattgaattgatatgttattaacaaatgcatgtactgatgtacgtttacctcaagctcaagggcatgaaggaaccgtaaaatccatgttcaatagtggagtaatgcttacgtcagcaatttgtcatacagattaattttggaaagaatactgattagtgctctgattacgcgaaagactaaagtaggtgataaatcaaatcctccattaacaagtggaagtttcaatgccctttttaagcatataatatacacatgacatattatgaaagagaaagtttccacgtttaaagcctttaagctctagtatatttttgggatgtgatttcattgctagctacttgtctatgttttcctcctcttttgtcaaatgtgggcttactttcatatttttccatttggctgaaacagattggattacattggtctattatattaacccatacaactttatataaatattttccagtattttcaacaattatcaaataattgaggaaaaaatgatctgaatgtgaacatcccatgatcaaagaagacgatatagttttgtgcgtatttgttctgtgggcgtaccattgtctctgtttcgtgtcgccattcaagcacaaatatccaaaatcgtctatcacgtttgatattatgctatgagagcaattgactctcttttgtctttttaggcctattcatgttttagttttacaatattcaagtaaaggaaaaatatttcatcttagataaaaattagggtattagggttcatttttaaaaaattgcgatttcaactctgtaggaggaacctatgtgcgaatcaaagtttcatgttcggatctcgatgttggaaagatgattagtactggtttcaagcctaaaggaattacgtgcctttttttttggtcaaacaaaggaattacatgtctaaggacgaaaatctcttggcaaacaaagaagacaacaaaaaattactatagttgcatcattgtaatttaaatgtcataaaatattcaaaaaatttcacatgtaacaaaaactagttttgactttggtacttatgtcctggtcactaggaaaaaaaggttgaggagaaaacagaaagaagaaccatgatcaaatgtgtaggaacgtttatataaaagggtaaaatggtaccacatcaacctccggtcaactacattaattaggttagccttaagaaatactcttcgagttgtcgttatcaataccaatagaggaggaccaatcctctgtctctcctatacatgggttttgattctttgaacagttaaaatcaaattgtgtggtgaggtaaaaactatttcaatctatctaaaatagtaaaatacagtctcactaagataaaatttcattaaaaaagatctaagagttgtaccatgaggaaacaaaaggagaagagagggcagagacatcatcaagattttaaagatgtgatgtgaatagaattggtaataatcattcaattttgttaggaaaggaattcagttgaatgacaaaaggaataatgagggatcacgaagggtcccggttaggtcaggtctccacattcgataacaccagacagctacctctaaaagtactcatggggcctatcacagagacaaagtggacccaaacgattggaccttttatgggcccaaaatatttgggttattgtaacatgtcccattttccacattattctcttgcttccataagctatgggctcatcaactctgtaaagaagccaacattctcataacattactcaccttatacttacctaatagttttgtttaacttagcaccaaaataaccgagttttgatgtaatgctcgattaaattccgagatatacagtaaatgcttcttggtatatagtttcagacacctactacggataaaacacccgatctaaaacccaaatgaacgatgcgcgcaaaccaacttacccaaaatgttatcttgtaatctcgtacaacagttttaacgcaaaccggtcgttcgaatgctggttagtgtctacatctaaacgtcctagacacctagcaaaacaatacaaaatggtcgaatgatatggtcaaagttggagcgttggaaatgtttgaccgccgatattagaaccttgtcgttttttatttggccaacagaacctgaaattgtttttctatttattttgtttaccatgagtttttgggtttgacattgttttttcaaatttgtgatagtgtttgttgtgatttaaacagctaaccgcaataaatgtatgcagatgatcagcattaataattttgtatctgttgcagtacaagtatggtaaaaattttacacgcatgcgtttagttcagtttatttttcagaataaacatcaaaaatagaagggttagtttttttattaaaagaagggttagtttagtctgactaaatcatagaaagatattacaaattttattctatcaccggaaatagtagaaaagcttgtttcgagtttcatagttaccatatttctcaacttatactgcacgttttacctattttacactatttatttgaacaccactatttgaagcaattttctactatagttttactttttttattaaatgttttttttttaccttcctcaaaactatactcttttagtttacaagaaagtgttttttccctataatttttctttgattgacattgagatattaaacctgctatgattagtggtaaaattcgcattgaaacatttctagcttacttaaccatgaaaatgcaatttttttcttctaaaaatgtcggaaaataaattcaaattaatttacatttttgaatttttagatgatctctgcctgttaaatcattggattttttctattctatttattagtgagaagaaaatcggcaactgaaaataaaaacgaccacaatctatagttttgcttagcttaattattttcaagtgtagacactttaggtgtatatatagacttttgtgaaacaaatgattaacaagtaggctttttccccttaatgtaagcaagactttcagcaaactaggaaataaaagatttagatcgggagatattgagatagatgcctgatgagtcatgttatatgtgatatgtatatttagttttggtagaaatatgtgatatgtatatgggttcttcatttctacatatcattatcagtcatggtacataaaaactatacgttatattgggaggtaagtaaagtggacaataaatatgagaggaaaatgttaaattttggtggggatgttaggaggggacaaagtggaggaatattaatatcccatcaagctcaacaacatcaacaaaagtatatatatatttgacaattaaaaagcaaaagataatatatttaagaaaaaaaagcaagaacgaatgtgacattttgactttttctaatatttaaatttggggttatgcttggttccgaatggtttatctcaagatgaaaaatgtgaataattgagtttgtactataacgcgaacttaatagagacacttcatctttttttatctccgtgcatagtcaaattaagacttgtcgcaactcgcaaccaatttgatatggaaacatccctcttcgtctctctatctccctgttgtttactctctttttttacgcactatatatgaatatcctattttaaagtgaaaacacttttacttcaatgatacctaaaattataacttcaaaacttgtgtttggttttatgttaaaacgttctgtttctttatcatatttggtgatataattacgggaaaaaaaatttttggtgttataatcagtatatatacaattttaggtagatttctctatgtagtttaaactttttggataattcaacagttgatagttaaactgtttctctttctcatgggcttttacgttacagtattgggttgtgtatcagtgtatttgtaatatattgtgttgtatttatgaatacgatgatgtaataaagtcggatttgtgcttaggatatgcttagtgctgaatcttaaaggaatattttaactctattttcataaagacattaaagtatataatttgcatatagccgaatgtggaatggtgagataagcagtcaataatgatccattggatatgttaacaaattgtttggatttatttaacagtttcttaaggtttctagtttatttttcttgagttttttttgtcgtgttgttacacatacacatgcatagatatagcgcatgatctttttatagaatttgaaagaatagaacatacatagaataatggtttcatcagtagacgctatgaaataaaataaggtaatcattgtgagcaaaaagactaatttcaaccggaagttaaaaggaagaagtcgatctttaattaactatttttccaactgtttaatttgtcgcttgtgaaagaatcaagcacatgggtcgctatactacaatgtgaaattgtgaattagtatcattatcagtattcagtcataactaacgacaagtgtctcaaagtttgaatcaacctagaaaatcatgacaaatgaaaaccccataaaagcagcagatttatgaatgatagtaacaatcagattcatatacataaaacaaatcttggaaaaaagatatagctagttagttcaactaattaatagaaacataccacttcacagatcatcagatcatacaattattttgaccataggtgaatcatattatgatcaagtgaactctactgacaatcaaaacaatattttggaaacagttgtttagattgtgtaactacaatcagtaagtttgatatatttactaatattgtttcagctctgtttacctattgtgcactatttgaatgaatcttactgattatatacagactgattatataatatgaataattatgacaaaatacataagttaattctataataaagttattataatctgatacaaaatcagttgaatactactactaaaattatactataataaagagataaatgggtgtaaatgtgtggtcagcacgtgagagttacttttggcgcatgcgaaaagctgatggaaataccacatcgtcaaaacttttcattttatattattatactgaaatagtgaaatggtctcaaatgaaaaagtaaaataaaattgtgttcaaatgatcttaaaatgtattttctttcggcaagttgaaattcttattaccaaatcaacttgcttaaatagaaattgagtatggttgattaaataaaaaaatgtgtgagccaaaaacgagagagaatgaaattgtgtatttttatggttgaacaataaaaatgcgttaaatacatttaattttgttacaaattacatttttcttattaattttgggcttaaacatagtaattcttaataagtgacatttgatagatatcacatacatgatctttcaaatttgtttttgctgtatcagttttatttgatttactgtagtagttttgtttgttcttcttttttcacacagtttattttactgttattattcagagttttaagtatttaaatgcacaacatatgtatcaaatgaaatgaaagataaataaatatattcttagattaacatgtactgtagaaaagaatttggacataaataatagatatgtggtacaacaaaaaataataaataaataaaaagagaagagaaaatagtgcggcgatgggtgacggataattgaagactgaagggaaaggtgggccctacctgagcgcgccataaaagagacgcagattgtctggatttaaggaaccatttttttatttatttcttttccattctctcattttaaaaaaaacaaaaatcttttgggcaatttttcgtaaatttgttttcgttgcgaattggtgatccaacaaaaggaaaccaaatttctgaaaattcaaatgggaacacttaaagtatagtgcaattgtattcaaactgacaaattaatcattaattgtattagaaaatgatatattgtcatcgtgactaatttgtcttttgaattcaattgtaactactaactactggttttcatttttcagattatttctcggttcttaaaaagaagaaaacacatacctaatatcgtgtgtatcaaaaagccatgtgcgagcaaccatcttcctttgtaaatttgacccttttgtgtatcatttatatcgagtgtttgtaattgttggttgattttgtgttatttgagaggctagtcatttacgcaatttctaaatttatcttttagtacgtatcaagatgttggagcaactgtgtccaacatacatgacatgtgaaattataattgttaaaacaaaaggacatgtgaaattactatctacttaaagaaaaaaaccagaaagaaaaaaaggtattaaatttggaactaaaagaaggttaaaaagttttttacagaaagtaattacacttgcagatgaaagaaaaaaggcagcatcatgatatgtaaaaaattgtcgaagaggtttagtcgtatcactttgtttgactgatcactgtcttctgattcatttttcagtttttctttttcaaattgtagctcacaacattaaagttattcactgctttaatcagatagtttaatactagtaactagctcatttaggctttaaacacctctttctgattactagcccactctttggtggttcttacatatcacacctaactatactgtgtatccttgaagtgaaaatcaaatttaccattcgtatcttacttacatacactattatttttccttttttttttcactcaaggtcctactctttgataccatagctataatttggaaataactatttacagtgtattaattatacctaaacagtttaatctggactaaatatttagatagatgttacaaatttggttcgtctaataaatgaagacaagacatgctaacaaataaaacactaccacaaagggatagtgagagaatgtgttttgcaacaagacataactttgattgcttgatgtgttaaaatgattatgtcagagacagagagcgatcataggctttctttatttctaataacgtcgattttcttcttcttttctggcgttcaataatgtcgaattttaattcttgatttttgcaactctaaatatccttaacgacattgaagcatggtgcatgtcgatcgttaataataaagttgaacaaaaatcttgttgaattaattacaagcacagcttcaatagcataactttacgagacgaccagatcttatagacgagtttcgcttttacttttttaatgattaaaactttcatcggagaacataagtcttcctcttaattaaaattactacccgtgcataacttcattttttaaaacatcaataattaatatacgattacaaccctaaaaattagtcaccctatagtacataacaatgatgatagttttttctttttggtgtaatgttaaaataaaatgttagccatattaaacgatagttcttttaacttagccattgtaagatatttcttactttagtttttccgtagaagatattcattatggtatggatagtatataccttaactgagtttaaatattggatcaataccatctaataacacatatctgatgttcaatacttaataattttgcataaatgttaagcgtgacaacttaaaaaaaaacacatcaacagagtaaaaacatatctgttaaataagaaaaatgtcatttttataacacttaaaaaaaaatgcatgaagcgtttcatagtttttttttttttcaaagtaatgtaggcgttagatatttcttacaattttttgaaaaatattttttatgttgtgattggctgatatcaggtaactaaaacttctttaaagaattgaagaaaatttgaaaagtaaatagatggattcctatattgtcatttcagaaaaacagtagggacaacttcgtaaatgatagccgtattattaaacaaataaatttaaattagaaaaaaggaaaaaaacgcaccacttttctttttcgctgatgcacagcttgtcggtttgcgtgcaaatcctctgtttcacaattttttcttcttctctttctctctcttcctcttttattcctctgttccaaagttcagcagaagcaaacacacacatcacttactatctctctctccttcttcactttctcacataaccaaactctctctttctctcttttttttgaagtctcctttgaaactataattgccctttagtgttgttcgttcagagtcttcaaaacttttgcagcttcaattgtacctgggtttcttcttcattgttcctaaggtttctgtgtccttcaattcttctgatataatgcttctttaagagagttgacatcatcactttcttggggtactcttctctgtttctccccagaaaatccaactctgtaattttgggtctttattctgtttttctctttgaagaatctttaaaattctcagatcttctgaatctctcttctttaaaactttttttaactttattttttgtactcgcttctttgccttcatttttctcgtatccacatgtcgttggtctttcgctacaagccacgaccgtagaatcttcttttgtctgaaaagaattacaatttacgtttctcttacgatacgacggactttccgaagaaattaatttaaagagaaaagaagaagaagccaaagaagaagaagaagctagaagaaacagtaaagtttgagactttttttgagggtcgagctaaaatggagatggcggtggctaaccaccgtgagagaagcagtgacagtatgaatagacatttagatagtagcggtaagtacgttaggtacacagctgagcaagtcgaggctcttgagcgtgtctacgctgagtgtcctaagcctagctctctccgtcgacaacaattgatccgtgaatgttccattttggccaatattgagcctaagcagatcaaagtctggtttcagaaccgcaggtattgcttctctttaatatggccaggattaatttttaattaaggattttgaatttgattctattggatttagtgtgttatattcaatggatatgaaggaccacttttgttgttatttcaagatttgatgcttcaattcaattctccgacacaatttcctgtttttacaaaagggttcctttgaatctgtctggtagatttggttattcaatagcttggtgtaactgttcttgtgacgatatggttactgtctgatctggtgtctaatcttaggagttttgttgattcgttttgttgtgtggtttcaggtgtcgagataagcagaggaaagaggcgtcgaggctccagagcgtaaaccggaagctctctgcgatgaataaactgttgatggaggagaatgataggttgcagaagcaggtttctcagcttgtctgcgaaaatggatatatgaaacagcagctaactactgttgtatgtaacttaacatttccttttgtcaaatgtgttcttaaagaatcatttgttactcctatcagttcaacatgtagcttgagttataaagttactgacttgttgttttaacttcaggttaacgatccaagctgtgaatctgtggtcacaactcctcagcattcgcttagagatgcgaatagtcctgctgggtaaagtttcatttttggttttgaagtaacctttttctaatcttttttctttgcctaattgcttggttttggtcttagattgctctcaatcgcagaggagactttggcagagttcctatccaaggctacaggaactgctgttgattgggttcagatgcctgggatgaaggttatacgcatctcgtatcattacttaagtgttattttatctgttgatatctatggcaatatgtgaaatattgaaatgttgtgtgttgtagcctggtccggattcggttggcatctttgccatttcgcaaagatgcaatggagtggcagctcgagcctgtggtcttgttagcttagaacctatgaaggtaagaaagggacactcttttcgttgctaaagatacaagtcataatgtttcattttcaaccagtttgggttttttgtgttcttacagattgcagagatcctcaaagatcggccatcttggttccgtgactgtaggagccttgaagttttcactatgttcccggctggtaatggtggcacaatcgagcttgtttatatgcaggtgaatcctttagcctcttctggtttagttttctatctctaacacttgaagatgaatgaataaagttgtgacatttgttcagacgtatgcaccaacgactctggctcctgcccgcgatttctggaccctgagatacacaacgagcctcgacaatgggagttttgtggtatgcagctctcataatgtctagtgtttacagaaaaactctgggatcttgatgtttttcatatgtctttaaaaggtttgtgagaggtcgctatctggctctggagctgggcctaatgctgcttcagcttctcagtttgtgagagcagaaatgctttctagtgggtatttaataaggccttgtgatggtggtggttctattattcacattgtcgatcaccttaatcttgaggtacttaaatcttcacatgtggcattttgtgtgtgttttcaggaatttctagaagaattgattataaacatttgttcttgcattgtaggcttggagtgttccggatgtgcttcgacccctttatgagtcatccaaagtcgttgcacaaaaaatgaccatttccgtgagtgtatacatataataaccttaagctttgattgattcatataacatatctaacggttggaggtgcttcatgttttaggcgttgcggtatatcaggcaattagcccaagagtctaatggtgaagtagtgtatggattaggaaggcagcctgctgttcttagaacctttagccaaagattaagcaggtacttcgatcttgagctaaaacctaattgttctttgctctgtttgctcattgtcattttttctgttcttggttttcttgaaggggcttcaatgatgcggttaatgggtttggtgacgacgggtggtctacgatgcattgtgatggagcggaagatattatcgttgctattaactctacaaagcatttgaataatatttctaattctctttcgttccttggaggcgtgctctgtgccaaggcttcaatgcttctccaagtaagttagtgtgtccagtattggtactttgtgttcttttgacagttttctatggctgaaatttgtgttatctattgtcttctgtagaatgttcctcctgcggttttgatccggttccttagagagcatcgatctgagtgggctgatttcaatgttgatgcatattccgctgctacacttaaagctggtagctttgcttatccgggaatgagaccaacaagattcactgggagtcagatcataatgccactaggacatacaattgaacacgaagaagtaaggcttcaaagtctttacctgccgacaaaacatcatttttatgtctctctcttacatatatatttggttttgttatgtttagatgctagaagttgttagactggaaggtcattctcttgctcaagaagatgcatttatgtcacgggatgtccatctccttcaggtatatcacttctaagttctaacccaatggatcttgaaatttttaccatttcaaagttaaaattgaccttaatgatttatggtagatttgtaccgggattgacgagaatgccgttggagcttgttctgaactgatatttgctccgattaatgagatgttcccggatgatgctccacttgttccctctggattccgagtcatacccgttgatgctaaaacggtactcttctttgctgtaccactgatttttcttttacttagagatggtttgtttcaaggctcattttttcttactcatacagggagatgtacaagatctgttaaccgctaatcaccgtacactagacttaacttctagccttgaagtcggtccatcacctgagaatgcttctggaaactctttttctagctcaagctcgagatgtattctcactatcgcgtttcaattcccttttgaaaacaacttgcaagaaaatgttgctggtatggcttgtcagtatgtgaggagcgtgatctcatcagttcaacgtgttgcaatggcgatctcaccgtctgggataagcccgagtctgggctccaaattgtccccaggatctcctgaagctgttactcttgctcagtggatctctcaaagttacaggtgggggtgtaaatgtttactctcgtctctttcttataatcctcgaacttatcgatgatgccttatgctgatatgtttgtttttccagtcatcacttaggctcggagttgctgacgattgattcacttggaagcgacgactcggtactaaaacttctatgggatcaccaagatgccatcctgtgttgctcattaaaggtatgtgtcctacaccaaacaaaaagcagaatacacctgtagttttagacgtataatatggtctggatatgttgcagccacagccagtgttcatgtttgcgaaccaagctggtctagacatgctagagacaacacttgtagccttacaagatataacactcgaaaagatattcgatgaatcgggtcgtaaggctatctgttcggacttcgccaagctaatgcaacaggtaaagaaccaaaacaaaaacatctgcagataaatggttttgattcatttgtctgagaactatctttgcgtctacagggatttgcttgcttgccttcaggaatctgtgtgtcaacgatgggaagacatgtgagttatgaacaagctgttgcttggaaagtgtttgctgcatctgaagaaaacaacaacaatctgcattgtcttgccttctcctttgtaaactggtcttttgtgtgattcgattgacagaaaaagactaatttaaatttacgttagagaactcaaatttttggttgttgtttaggtgtctctgttttgttttttaaaattattttgatcaaatgttactcactttcttctttcacaacgtatttggttttaatgttttggggaaaaaagcagagttgatcaatctctatatataaagggaatgatgtgataattttgttaaaactaagcttacaacattttttctatcgcatttgacagtttcattttcacatctctcgctatatattagtaatataaactatttcaaaaaacaaagaatcaacaagaatccacagatgtaagaaagaaaaatcacagccaaataacttttttatttatttggccgttagataaaactaccttcagaatttcatgcatctagccggtaaacctgtctgatgattgacggcgacaatctcagagacattgttgcaacgaagaacatcttgaccaagcttagctcctgcagctttaagacctttaagcgaaaccggcatgttgaagagattgagtgatggaagcttagaaagcggagggagtttctggttcggtaagaagtttctgaaatcatccataagcaatggaacttcgaaatcggttttgttgtgtttcaccacattgtctttagctgcgatgtgagctcctggttccatgtggttggttgagaagcttgattggttagggaagtttgggtatagactaacgtatcctctcaggtacatcatgtcgattaagaatttcttccatgacgcttgccaaccgttggttcttgatttcggaatctgaaccgggttagctttcgcgttctctgtgaatctcatgttcatgtagacatagaactctctccattgctttgggaagaaaacggctccccagctgcatggtaattggtgaaggtaaggtgtgtgaggatggatttgcttgaagaaatctgttgggttccatttgggtctctctttgacaacttcaacgattttgggcgtgtaaagagagatcgaggagagttcagggaaagagacttgagggtcgtagtggtaagcaagtaaagcgtatttgatccagaggaaataatatggagagacttcaatgtcgtcttcaagcaagagaccaaaatcatcatcagaagctggataccaactctcgctcacagcacggattaagcctccttggatgattcttcttcttagtgtttttggtccatgaggccaatcgaatgtgctcactacattgatcgtctcttcatccactttgctatccatgttgaagctgagtgatatttcgtcaccaaggtagtatgcattgctcaaagacctaagcaatcttaataaagattgagctcggttttgggtgatgatgttcactgagactctcatcttattccagtctgaaatcaagacatttgtcagtttcggtaaattaaaactggaaaagctatattaaaggcaaaaagttgatacttacttggcaatgctgttgatcttagatcagccatccagagaaccttggagatagaagctctcggtagaagaaccaatgcggtgccattagaattagtctcggtagccattttcaaagctttcttgacattcggatcagcatcagctaccgtaatcaccacgcttggattatgaatcttaataagccctttcatgctcgaatacacagcttgaaatacaggcacctctgagttcgacacacccaaaatagccccaacttccaaatcaaaaatcttgaatctcctctccttacaaacaaccttaggccacctcaaagccgacgccgcatcctcacacggacagaacttcccacccgaaaccgcgatataagcctttttaccaacagtacctctaaacttctccagcaaaggaccaagtgctttaacttcatcaatcgaatgcgcgtaaaacaaagcatcaatcttctgaggatacattgcagcccattgagtcacataacccgtagaaagcgctttccaccactggttatctcttacttcaacaatgtttttaaatatcacagtagtctcagacacataagctaacctgtgttcactatctccccaagtctccttatcatttggatcaacgggaagaacaaacgaacctgcatttctgtatttctgaagctgataactgcaaaacacacacaaaaaaaatcaaaaccacaattattacttcataacaaaaaaaatccatttttataacttttccccagagaatttgaatctatttttttttataatcatgaaacaaaacatgtgattcaattactctcacgaagatcatcatcttctagacgttactacaatgattttagattattctattaaaaatataagttttttccgtttttttaatgatcaagctattctcaaacattgccttattgtacactcaaacgattcaaattcccaagaaaaatcacagaatcgagaatttacgaaactaacctgagatgaagatcttcaccggtagagaatgtgaatggtttttcgatgaacaacgctttcacgagctccgccgataagaaccacgagcttgataagaaatcaacctgaagaatccgatctaaggtgatgtcataagctggatcaggcaagtaaaggccagcttccttagatctaaacttcctatagctcggaaacgtgaaatccttttgccggaaaggtaaaatccttccgatacttcccaaaacagagttttcgtatttctcagttccggcgacgtgtgagagcatctgaagcattttcttcccaggaatcatatcatcgtcgaggatataaaccagatctgcttctgtttgaagcgcgatctggaatcttccatagtatttgaaatcgtagtttgagctgatgaagctgattcgagaatcgttgtaacttccggcgattcgccggagagaagcttcgttaggactcccgaaggccaaaacccagacatggtgaaacggtagcgtctggtggagaagagaatcaagctgagcacaaagtgttttcctcttgaagtgatttagtattactgttactttgggcttattaggcccatttaaagcccattttgacttcatcttcatcaactcttctaaactctctgacccaagattcttcctctggtaacccaaaacgtcgtcgtataactctcgcttcatcttgatcattttctcgtcgtttgattttttctgcgagaaatcaatcttctcgtactcgcaaacttccgctggagaaaccatcaccggaaaattctccgatttgagaaaagaggcagagtcttggtaatggcttacgacgtgaggggtaacaatgtaactacgcatgttatgggcccatttagtggcccaagtgaagtctggcttggcccttaagtcaatggaaggactcatgtagtagagaagtccggtggcgtagacggcaaatgcgaactgaagacacgtcagtgccgtcacgaacttggccgagttaagtttccggctaggttttgttttcccggcggaatattcgccgaaaatgctttctatataatcgccgcttctcaccgccggtggccgtataaaacccatttttgcagaacccaaacccttggttataataagaagatgaaaagagagaaataagaatgtagaagttggtgcttttttctttctataaactgtttagagcaatgcttatatatagatgaagaagacaaacatataagtatatataaagtgagatttgtgggtgaagaagcattacataaggaggatatcacatggggtaaacgttcattaagaataaagtaaagtgtgaataaaaataacaagagtttgtttaatttcattggttgaattgtatgaaaaaggttacacgataccgttagattgtataacttattaaaagtgttttattattatagaaactaatgatgattatatatatttaaaaagatataattaggacaatactcaacgggaaaagccgggttcattggcgtataaaagggttacccttgcatttaacacttccatatgctattttttttttttttttgccaaatacaatacttcaatcatattgttcctaacaaggtttgtttttaaaagttatatttcaattttatcaatatgaactagagaggacaaagtttagtggcattcactaaacttctatttgtcaaaaggcaaaagcttgactaacattaatgttactaggagtggaaacaaaatcagttttcatgtactatattcatttgtataattatatgagaattttaagatttatgcagcctaatcgagaaggagaacataaagtataatacctttgtgtacatgatcaagcctattgtgagagtcaagccttttcttcttcaacaatcgatccacaatatatattatattatagtacagattctccttgaataatacaaaactgaagtaaaatagagtttaaaaatccaaagaaagaaagaaagatttgagtagagaatgcgttattgaaagtttggagtataaaaacattttataacaaatgtctcggacaagcgatggtttgactttgcaaattgcatgagaaacgtagttgaactttgcagcaatttgcaccttttgcatatattatagcttctttgttatctcaatattctaatttttaatggattttagccgaacattttacctgaaattttccattttggaccaatatttgtaaattaaaataatactaagaaaataaaaggttgaaaaggtaggtaataaatttcttaaacccgtggagttttcagtccatattttttggattgaatcccttgtcatcttttttaataactaaagaaatattttgttcttccatgtgcagtcgaatttagatctggtaaaccgatgtagttttctctaaaatattcatgttaaaaaaaattattgtttgttgaactaacataataaagtaaaatataattttagtttataacttcgcattctcaatcttccaaaccagctacattcaataaaaacaaattatatttttggatatataattatcatggagatatttagacatacactttctctgtataaagactttacaaatacatttattttggtgttggtgctctgacccattaatataccacaagtgatcgctcagttttctttgatgctgcatttctcatgagtgcttgtttcacttaagattattcgtttgtctcataacgcaaaatgatcagattttgaaagtatagtaccaaatgacatttgatcctttcaatataatcaacaaagaatttcaaaacagtcgcaaagtttggattttggctttgtgatatttatacccttgagtatatagcctagcctgttttctagaccgtctttacaataagcacttcagtccaagtttatatgtaaagtgataatattttccttatgttttatttggattgtacaaacatattactagtcgctaatccatgatcattattatcaaagctatttaattcttattagtactaattaacagtatttacttatttgttacttagattaggagttctgaggtcggtcacacatgtgtgacttttatttaagaatataattatccttcatcacccaattgaaaatacggtgaacatgattgctatctttttctttgacgtcgattgtttctttagactcatcaggtacattatatacacaaatcatcaatatacgtaaaggatatatacagaaagaagttcttggacatttaacaactcatgtaatttttgtagttttcacgtatctaaaaagatgacattcaaaaattacaaatttctatttaattacaagaaaactatttcataaatcttactgatcaagaccacaaaccatttctaaccttaataaagaaaaaccccaccatataacaaattacttagttgtacgatttacttatttttatgtttggtgaggaaaggataattttgggcagcgggtaacaaagttaggagacaaagtagacatataagtgaatttctaacgaaatttgatttatgatgaccggtctctccaaaaatagaaaatgttgtggtaatatatttttccgaaggagttgtaatttgacttgccataaaccaactcgtttttcaagaccaagcagcttcgttgttccattgtacctaatatatgtggaccgacatatgaacacatatgtatagtgtaatttacttattagaacttcaccaaacttagcttttagtatttgtcaacttcgtagtgtcaagtacaccactttctaatgtgtatgcgcgtatgcatatatatgtctgattcaaaatcgatgtacaggttatcaacttagctattataaaattatataatttatgtgctgtcaacaaaagaaaaaagtttaccttttgctgagaggtttgatgtatgtcgcatattttgattttaacctatgattttcacatgttcttgaaacaagatcaacttcatacatatgcatatactaattgagctaagaagattcataagtatttaaaaccaacgacgtttatttgacaggagtttaaattatatatagatgagtaatatatacgccaatgaatactaagttttagcttctcatgaaaatagtggaatctttttttgttattatttatagaatcaattatgggcatttatggattttgctgttttggctaaaagatcttatatcttataattttactctggatataaaaatttgatttaatatgtatttcacccgtaatatttggatttagttggttctgtttgttcttagagtttaatatttattataaagtatgtattttagcaaaacaaatgataaacattgtttataaatgacaaatttgtaagattttaagaaaatgataaatttgtaaatataactaaaagtgatgaaatccataataagttaataaccctttatttataactgcaaaaaatctctaaaaagggaaagactttagaaaaaaaagtaatagtgttggcagagaaaagccaccgaagcaagttgatgcatcatgcatgtgaagaaaaatatagagttcttaataatcaatcattgtgaaatctagagtagatcgaactctgtgctataaggaggcacatatatgcgagggttgttccatacaaactaaccaagtaaccatacaagatattcgattatccaaactaaagaagtgatatcatatacatattttagcgttgctacatatatttaagcagataagtacaggatacagtaaatgaagatataaaatgtaaatttgaaacgtacctatcatattctattgtgtgcttcttagaatgtcgccatctaatgagtcaaaatctgatctgataacctgatatccgattggtctaaagtacgactatagatatcaaactcacttgatcaatgatcatactagaaactgttttttttttcttgcattatatatatatatatatatatatatatattgacttattgtcttgtctaatattaattttccaatgtaagagtccatcaaattaggctagtttcaatatagtcgttgattttttcgttagcttagtatgtttggccttggtcatatatatcatggtcatctaattaaggaacataaacttaccattcgaccaacaacttattaaaaatgagatagtcctatgcggccattcactagtcgagcgggatttagtgaaggacgtagttttttaaattcgactgacaacagattcttttttattcatgacctaaaattcttcaattgatatctctaataaataactatttgactttatacagtaatatagatgttttgactttattgagagaatttggaggtagatcgatcttgagatccaataacacaggcttcagcacgtgaggcaagtcgcatatcgatttatatattatagtctcttcagttttataataccaaacaaaatttgtattacgcataaaaagaatataaataataattactttatacgtttgtgttgtggtaagaaagtaatttaggacatttccggaagtcaacacaaaaaaattaggaagtttgttaatcactgaattgaaatcttttgtcgttatgatgattattttcttaacgtttttgtttgtttatcatggattcatggtcggttgatgatattgatagatgagtcgatttcaataagtaacgtttactactattcggtttttaaattggattaatgttatgtaattttggtcattgatagtttaatagacaatgaataaaccagagttcttttttgctgctacatgattcaaaagtttcaaactactgtacatgatgttttaaaataaaataaaaaataaaagagatatagtggcattacaggcccactagttggaaaatttaatttggatttctcttatatcaagcccactagctgcgtttcggtggatttacggcggtttgttgccttcttttttttcttttatgacaaaacgtcaattcaaccatttgatgctgactaaattttgtggagtagtgttggaaattggaagttttgaatgaaaatgaaagttagaaagcaaaagaaaatgtagctgaaaaactacatgggaaataatttatcatcatatatactacagtaaacacaatgagaaaattatggaattttttggcagcaaaggtatatataaaattttaactatttatgggataacattttctccacaatcataaactgacaagcttatacccaaaattaacaaaattataatacttgaaaaaaagaaaaagaaaaaaagaagtcactcttgctaaaaatgccaatatatattatctatatagtaagcaccatttccacaattaccccttttttttcaaccccaccagaagctattaatactacttatacccccaaaacttagaaattaagctttaaactaccctcccaattgaaaaaacaaatcgtactaagagaaatcaacaaaaaagacgagggaaaattgaaatatccataatgtaaaatccccattatgcccttccatcaatcacctaggccttggcttcgccggaaaactgagagcttgccggagtttcctctgccccgacggactcgaattagagctagcgataggcattccgaaagtcatggtctgtgagagattcaccatatccaccattgattgcgtctggtaagaagttgtagttgaatcactcatatcgcctctcgccgttgctcgctgccaggagtgcgagctcagaccggcgagcacgtaagccctacccgaagcctcatatacttgacggctcgccattctctcttgcatctccttcagctctgcacacagtgtgacacacaattgatctccggctcgacccgacacggactcggtcagtaacccacggcaagtctcgagaaccgacacagcttcagtcaaatcaccgcgctcggctaaaaccctagcttcagagattgcttctgccgcacgtaatctgatcctctgtctgtcaacttcaactgacactacaggtcttctttctgtcatcactattggcctgagaatctttacttcgccggaattattcaaattaaccgtctctttcgtcacagggtctttgtaaacgcactgaaccttaagtaacgacatcacatctgaaactccatcgacaatagggatatcgagattcaccaagaaattcctctcttcctctgcatagagatcaccaactgcgatagatccggttctcgaattcggaccattatcgaaccggtagcttccagctttaacggatccaatcctcaacagatgatgcatgcactcaattgtaacgcatagctcttgaaccacaacgctaagaagacctccaatgcactgtgcgaatgcatcttgtataaccgtttcagactctatgaaagaaaatgtacctccggagttttctgcaatggaatgcattaaggaagcatcgtggtccgcaccaaacccaaatgcgtgaactggaatccggtttccgttgatctctttaggaagaagggctttgtaatccgtccctctggaaccgttggggctagtcatggtatatgtatcttggccatcggataagagtacgatgctagataccgggttcttgaatctacgatcgatcaaaactcttgcgcccttcttcaatccctctgcaatgttagtccctccgtttgagaccaatgaattaaccgcctgaagcgcctcttgtttaccagtctcggtcatgagacgaagagggaagttacgacgtgctgtggaggagaaggatataactgagagacggtcaaatggaccaagattctgaatcacaaaacccattgctcgctttagcaacgccagttttgttccagccatgcttccactcacatcaagaactgtgactagatcgacaggagcccgagaagacgaagatggatttgaagaggactttgaagaagtaggagcttttagattgatcagtacagcaaaatccttgaatgaaaccgatctcactacttccgaaatctcagggtatgttttaacttccaatgtcccagtaacaccaggtttatccaaaccagattcagcagaacggtcttgatgttccagagcctcatcatcattaaaaaccgcaggctcggtgttaaagatcgaggagacccttagacagtcaggccgtgaagtatattgaataggggacgacctccttggaggtatagacatccaggcatcatcccttggtcgacctatcggtttgacaccagatttaggcttagcattagggctctgaataggaatctcgttccatttcgcgcgacaaacaggacaaatctggttcccgtgtttaacattcgtagtgatgcattggaaatgaaacgaatgagagcattccgctgtgaagatggcgtggccttgcccagctttcatcgccgtcaaacatatcgcacaagttttctgcaaatttcacaaagcagaatacaacaatgagctttcaaattgtgtaaaaaggttcttagtttgatggtatccacaaagcagaagagaatggtatccacgtaatacagagtcacacacaggtcattgtagtaattacaagaatccaaagaaacctgacataagtgagattgtgtcatagtctctgacacatttggttctgttactatgacctctctattattgaatgatgcataaaaagaagagcaaacattaaaaaaaaatggaatctttctatttccataacctggaaaagaaaaaaaaaagtctcaaagactaatcgtttgatcattcaataatcttgggacaaaaaaagatggtttatacgttagaatttggatcttggaatctatgatcaaattactttggaatctatcaggtcaaacaattaaaagaacaatgaataaaagagagggaaagacaaaggacacaactttataaagttaaaggattgatttaaccagaccagtaatcaatagctttttaagtaaattcaacgccagaaagatcaaacttgaaaaagaaaacaacaatgcaaagcaaagttaaagaaagtgtgaaacttcaaaagctaaaccaaatgcttatgtatgtagttatgtaatttcatggttaatactaacagttatcttggttaggatttagaaaatgcaattttagtttaactagatgtataacatgaacaaaaaagtatactagattaaggagaatatctaattcacagtagatatttagaacactaagaagggtatctttcaataataattagaaagttgaatgtaaaaaaagcaaccaaaaaaagattggtccttgaagtgcacttgactattgccaaaaaactttatccccacagtggctccatttgggagagttgataattacatgacaacaaattgttcatctttcttcaacactaccaagaaaaattatactcaaaaacaaaacaaaaacaaaaaagagagaaagaaacaaaaggcactataaaccggggaaagagacagaacaaatagaagccaattttaagccagctataatgtcaaattcttgatgaagataaaatgattcgaatcataagataaagttggttatggaagagagacctttaccaagtgtactaatctcactaatcattctacatattcatctactaatccccatttagccctcttaagacattatttactttcacccatagttttcaaaaaggtcaatactttcaaagcctgtaggtctctaaaacaacaaacctattgacagattctaagttgatgatagacacaaaacatatgagggtcatagtagttgaaaaaacacatctaatttttttatgaaacatataaaagcaactaataagatcatttgatgtgtgtgaagatccaaacactttataggaaagcaaattagttgaataattaaacaaataataaagtaagtttagatacaataacagctagtagaaactaaattaaaattaattttttagactcccaagaaagattagcccttggatttgctgcttaaccaaatcacaaatttgaaccacacaaggatccggtaatccaacggtgacccataatcgaaaaaatcaaactttaccatttttgtaagtaaaaaaacacaaaatttggcacaaaatatcaaacaatgaaagaaaaattcaaccctagagataaaaatcaaaactttatgtcaatttcaatgattgtgacgaacccgcaattcttaaaaacgtaaaggacaaacctttgatgaggatttgctcatggaacgaggtaatcggagaccagaggaggaaggagtcggcgttgatggtctttgaacaataaccggagaaagtgaaacggcgtcgtcggatcttcttggaggagaagaatcttcaagcgttttgggaacgtagagacataaattgagacctaaagccacctttgcttttcgccatttgcttcccatttcttattgaacaaatcaatgatgaaatttgatggctttgtttgtgaatctgataactatttttgttttgtggagagaatcttaagcttcttatcttcttgtgtagatatgtttgagctaaagaagagattgggttaatgaatgtgttgcaaattgcaaagtttctctgcgcagagagaggaagagagaaggagagagagagacggtggtgaagtttttgacctttttttttaggatgagtgaagggtaatttggtaaatgtgtttaatcatgaaaacttgggatttataccaaagttaaatttgacctttgattttctttggtttttgagtttccttttttaattggtcacatacgacttttactttttttcttcattatttttgtttccttaattaatactaagtacttctcaatttggttttgatttgatacgccgctttactttacagtaattatataaatacgacaccgttttggtaataaatgatttaatggtcttgacataataactatagtttccaaattatgacatcatattttgacaatttatctaaccgagaattcatagagaattatttacttttattttgtacattttatattttttgtttgccatcttaagaaaggatttcctaatttctacgcaataatctcattccatggatgcatctaatatttgtttcctttaattagaaagttgcctaatattatagtaaatgcttagcgtttgattaggtctcatatacccaaaaaaggatggaaacttaccgtgaaacttgtaagatttaagccatggccgttgaagtagttggaattaatcaatgcatgccttgtgcatacaatctactaaattaatgatgttgttgactttacaaaaattagctaccttgccttatttgctttttttagcaactacactatttacctatttaataatgtcaagtaatttgggcaattgctatttattactgtatatttcatatattgcattctacaatctacatgaccttcgcttgcaaaattagtttaagctgttatggcaaaacagttaatgttcatgatcatatcttaaacatatgacaacatgaatgaaattggattattatatgatcaaatatgcatattgtattggattcccttcgtcccgcaagcaaggactctttccatggaatttaatagacagagtcatagattgatggttcaccaacttttacctaaattgtataacaactactccggagaaaacaaaactacttacatgtataaaacaaaaatccaaatcctaagtttaggcctgaaataattattgaaacaaattttggaagttatatagtagattctagtatagcttttattttatattgttatttaaataagtctttctacaaatgcaccaaaatatatttgagtacaagaaggcttctctgtactttagtgcattagtttggtattctatgaaagttaacgaatgatgtaataagttcttacatgcatagaagtcattgctttgaaattaggttaaactatttcaacgatgggcggttgataaactatttaaacaatgtgcatgtgtatgtgtgaaggtatgggactatgggtataaatttatggaagtgtagtaactcttttatacaatagaggaaattgataaggaaatgcattaagtttggttgaaaaagagaagaaaacgcgaagagaaatgagttgaggataggaaaataaaggaggggacaaagataaagcaaaaaccttcatagccattaattagaacccattcattaggtggagaatattgaaattgtggtctattacagggtgtcaaccatcataggaaaattaaaaaaaaaaaataacaagtttttagagaaaacacaaaaatatcatggagaaacccatgtccaaaacaaaatatcttaataattaatgagattttgagaattctcttttttttgtaaattaaatagccaaattctatcttcttttatttatttttcatttttttacaaaatgatggatggcacaatataaataaattggttcaattatcggtgttcttttttgattaatactgtaacatatttgtctgtttttaaaaaaattacactagctatatcattttattctattgtcatgttaattttcgtgatatcattttattcgtttaaatcatacgtaatggtagtctgaactcccttttttgtaattgataattcgtctatatggagttctgatgaaatatgtaattaataagataatgctttgttgtatacaaaaaccaaacgaagattgcgaaatgcaaaaagaatacacttgcacataccaaaagtcaatcccccatagtaaaagcccccctaataaacggtctcatttatttgcatccaccgtatcatgtgacataatatttctttattttcttctaacgaaaataaaaataaaaaatcatccgcaacacatacatatatagatattattttatacagagacagcgatgagaaagtgaaatgtcaaatgaaaaacgttaattgttttttcttatgatttaaactaaaaaaaaaacaaggatttggataacatgtcaaagctgaaagtttctcattggtttgcgctgaatcttccattgagttctctgacttaaatcgccgccgttttgtttgaacttaaaacattacataccctttttgcttcctaactagtattctttatcaacagaagaaacgtgctgccattaatcatccttcgttaatcgaaattatttcattgttttctttgataaagaacttttttttgggcaaatctgtttgttagtttttctttctgtgagtgtgtgacattgtctctcgtatgcatttcttgattatctcatcttcatttgaactttttttgttatttaatcatataccaaatatctgacattttacatgccttgattagtaggattttcagtgttaatgttattaaaaaaagtcattgtgcataaatatggtttttatttaaatgattctagctagacataatgtgaagtcaaagataaacgatttggtcaacaaagcaacctaatatactattttggataacgcaacaagaaattcattgtcaaggatatattggttcatctttagtttaaagtattactaaagctgagtgaatcacgagagtattaaaaatctcaaaaatcacgagagtgcatatatatcgtcaaacattttttggttgacatcgaaacattctctataaatatttttttttttaatgaaactaaaattttgtgatacacaagattaagttcatgggaactatagagttatgttaaataatatttaaaacctgtatcttttaacaaatacaaatattctttagtaagagttcttaatttcgtacagtacaacatcttagaaggtttgattaatatcaatcttataatctactcgggaggatcataagatatacgatgattatgttcaaacatatacacgtcatattacaatcaaacatattcataataaaaaaacaaacaaattttgatatttttatttgaaacacaacattttcacaaataaacgaataaaaaattagtagtagtaccctaaatggctaaaagatactgaaactcgaagtcataaggtatcttctcaacggcggaggaggacgaagaagctttggaatttggattcttaaaacaatccaccattgattttctcaatgatccagaggttggtaattggttgcaaacccatttcaccaaagatcctaactgctccatctctccagtaccaccatccgccgtgagcaccacgaaatcggtggcatgtttcaggagaagttccggcaagcctatccgtttagccgcggtaaccaccagcgaggcttgcagatactccagctttgatttctctagctccgttgtcactccttctccagtgtatatcctcaccttcaatttttagttttatagcttttaaccatttgtgcatgatagccatatcattttaccatataacattcattaagaaaaacttatcgataagaaaattatgataatcttattaacccttgtatatatagtgaatatgaacaatactacgtacactaataaatcactaattgccagattaacagtgaattaatatatataaacttactgcaggagaagatcgagttccacaagatagagcaaatgtgatgttaggatccgttgcttctacgccatatagtttacgaataatcatttcttcgtgtcgatcctataacagttatatttgaatatatatcagcttatcgaatttgatcttaaacatgaagaggcttcatatacattaaaatgatagatatgtatatacctgagtcattgtagaagatgtagacttccttaggatacaatgctctatggtatgagcacttatgtttttgcctccgacattcattgtagcctatagtttatactttattattatatcaaatttgagttatttaattcatcagtgtttatatgagaaggaccgaaaaagaaaaacataccttattgtatacaagagattgcaatctctcagcagtttttggaactccatgttgtagatatccctgctcatacacggaagttaagatatccgttgagtatatggtattgactttataattaatgaaaaaaagaagaagattttttttaaaatatgtttgtaatcagtgaaaatatcgaagaaatattacatgcataacacaagcattgaacatgttgatccaaaacgctagcttttgttgatggctcaacacttttagatccacagtctcaagattgttcatcagtaccctgcatttaacgatatatttatgtgatttcatcgatgtagataacattttctcaaaaataaaatccaacacttacctgagtttctggattaaagaaaccgagctagagcttgaaatgcacttggaatccatagaactcgaagtgaagataacaagattcttgtaaggaccaatgtctcttgccaaagatgattctacatcaaatattccataaggatcttgttgtcttgattccttataagacacaagattcatcgattttgacaagcttgaggttgcattgtcgaccctaaagcttcttgagctcaaagagaaattagtggatctcgagatgggtcctgttttctctagctccatgactcttgtggttctaagaagacgaacgtagatgaaattgagacacttcatgatgttctcggcgagcttgtttgggtgccacttctgaatgttttggccgtcttccatcaagattgtgcttgataaagattttggtggaatgtctagtgatgcatcaagtgctgctacacgatccttattaggctgaaataaatcataaatcaaaattaattgaacgaatcaaacatatgtttcaaacaaaggatcatataagaaaatcggaccttattaggagaggtatatctaggttcacgtagaggcgaaggcgatttcatcgtcctaatctttttcattttcatattctcttgcaccttattttcatgttggaccgaccgatgattttccttctcaacaactccaactttctcgttagacttgcggaagctttcaatcgcgtaatcaccttttatagctttgttgatgaaatgcaatgtctttgtaccaaatgttgcattctcttgatgatgactagtagtagatttggtgttgttgttttcactcttcatcatgcctttgtttaccatagggcttggaggtgggagcttagggtattttggtaatgttggagcttgataagggtttatgttgtcatccttgtaagtctcactagtttgccatgctcgtcttgaagaacttgttgtagcttgtttcaaagtttcgtcttgttcttgcttgagatttatctgaagatggcttatttgaatttctagtcttgagatttctccttctacgattgatagttccgttataagttccttcatctgcacccataacaaagtgttaaggtaaatttaaacattttaccgcttaattaataaaatgttaagacctttttattttcacaataaatgtatctttgtttatgatcaaaccattttgtttcatgtagacatataatagtgttaattaacaataatatttttcgttgaccagagacttggtttaaaagcaacgttaccaaaaatatgtgtatgatgttaatatcatcacatatattaaagtcttgctgcttttttacactagccaaacttggaacactatacacgtatatgtgttactaatgaaaacgtaccttgggagggagagaagcaggaagagtaagggaagaggaagaagaaggaagttgatgtttttggacttgttccaatatctcacgtgtcttttcttcttgatccagcatctctcgtaacatccacacctaacgatttatcatatcaatacttttttttaatttcattaacaacaaaaatattaacctcataattaaaaagtaaaaaaaaaactacaaatgtagaatcagaaataccataatctttcaatttcgtttggttcttgattataataataccatgcatgagtgctaatcgatctaatgtatttacgatttttttatttattaattataaagataaaattgaaccgaaaacttgattggacacctataataccttgatctagatacatatttataaggacatcacttgatgtttgcctagacataaacataagtacgtaagctaattttatggattcccatacctctttctctatttcttcctttttctgctgcccatttggctttttcgtcctctatacacatcaaaaaaattcccaacttaagcatagattcttcttttacaaatgagaaaaaatgagaaaaacttattcaaaacgtagacattcatacaacaatagaattatgcagaagctactgatcagcttaatgtgaatgaaagagacgcataaatcgatccggacatgtagcctatatatggaaagaggtttagaacaaggtgcatgtaacccaaattaacacgatatctttgaacaactaaccactagattaaagattttataaaattaaagttgtacgcaaaaattaatcaacatatgaatgatcagaactacgaagcattgaaagtaaaactcacaacactatgagggacattgaagggagagatagagccagggagagttgtggtgggcatggctaagatggagcagtaatcgtcgggactagaccagcgagaggaagatggagcagtgagacagagccggaaagagtggttaaaatcaggaggaaggtaatggtaatgaaggaggttaacagaagaagaatgagacatattgagatatattagctttggcttcaagatgaagaagagagcgatcgtgagagggttgtttggtgagggaagacgagaagcagttttcaaagctgatgctcttaaccgtcattgagatagagagtggtgggtaataattttgggacctttttaattataaaaacatttttcattttttacatatatttttaatatccggtttatgattattatggacctttgttgcgacgtaaagattaggtttttggtggtgatggttttaatccattaaattatgagtttagctcactaatcattttatgaacaattaggttgaattgtaacttgtaagggctttttgtgaaactttattttacctttttaatttattttggccaaaatgaattgaataagcagtttttcttcaaatttgaaagaacaattttcatatttgaaagttaaaattttcatttacaaagtgattactcaaattttaacatatttttattttatactaatagtaaaaaaaaaagaaaaaaaataatttatgaaaaataatttatttcctaaaaccctcgcaaagcccttcttccgtcgccggctccgtccaaaacagagtgattcttacttcttcgattatccgggaaaagttcatcccttttttctattctgaattcttcaatggcggctttacttctcctcaatcgtgtttctcgaagtactagctcaatctctctccaccgggtcgcaggaactctgggtttcaattccttcaatgctcaaattcacggtgacagaatctccggaacactctttcgaggtagccccttgttgctctctctgcaaaaaaattcaaactttatgacatttcttcatcaccgtctcttctcttttgtttagctagaattttctccgcagagttgactatggttttcagatccatttttggtttgagttttggacttgactcttactattgtaagaactctcgttaattgggaacgttattaattgcaaatatctgatctttgtgtcctcttggagtgatgacatgacttcaagattctctgtggagttgaaagatgagaactttactgattggtgaatagatgagttgtggtttatcatgagaaacatgtagttgaatatgtaaataaattgctgtttggatcacataatgaagagtaagctatgttcaccttgctctgtagcctgttgaactgtgattttatccacggaagcaagtgattctgcatatagaaagttctgtcatttgatatttggtttcttgtttgtttgtgtagtgagatcattagctactcttgctgaaggagcttctcattttaatgagatggtatctgtgaatcagcggaagtattatcttctgggtggtaaaggaggtgttgggaaaacgagctgtgctgcttctcttgcggttaagtttgctagccacggtcatcctaccattgtggtttctactgaccctgctcactccttgagcgattctttttcccaggtatcaattttttatttggttctctatgttttcgcttggattatgttttcaggcatcagctaatctcttgttttgaaatccaggacttgtcaggaggagtcctaaagcccgttcaaggtgttgattctccacttcttgctcttgaggtgattaaaaaactacttgtctctgcaaactccgggataccttacatatgttgctgagttttcttctcatgttgaaacagatcacacctgagataatgaaggacgagataaaacgtcagacgggcgataaaagtgtgaaaaatatgatggatagcatggggctcggaatgtttgccggcgaggttcattttccttttctctcttgttgattttccaagcctccattatgattggaaaacttcatttatgtcttacctgtgttgttcatttttggtagttaggggacttaaatcttgaagatatgctcaacgctgcctctcctggtattgacgaaatagcagctatttccaaggcacttatccctctcagaattcccctgaaaagtgaaaactattcatgttaattactaatgttgagatctcattccaggttcttcaatttatggaggcaccagaatacagtaggttcactcgtatagtttttgatactgctcccacggttagttattttgtttctttctaatttgtacggctcctagagtatgatgcgtttgttaatctgattgattccaaataatttcttgcaggggcatactctgcggcttctttccctcccagacttctatgattcatccattagcaaaataactaaggtttgaggatgaaatatagcctttggttgtggcttgcttacacaattgatatgtttagggtacttgtttctaactggattgtttgattattcagctcaagaagaaaatcactgcagcagcttcagcctttaagttggtctttggcaaaaaagagatacaacaaaaagaacttgtaagtataggttttcccttgaaccattacttccccttcaccttctttcaaattttgaacattcattgctttaacagcctaacgagttagatcaactgaaagagaggatggagaaagttcgaaatgttttccgtgatgtggacactaccgagtttgttattgtaaccatcccaacggtaacaccattcttttacttgttcctaaagatcattaatttgtattaagaagaacacctggcttggaaattatcttcttggaatcctgggtacatttggttacatattcacttggctattatatttccctttaggttatggcaataaacgagtcttcaaggttacatgcatctttaagaaaagaaaatgtgccagtccaccggcttattgttaatcagcttctacctcaatctgaatccgattgcaaattttgctcaataagacgaaaggtatctacaaactctctgcaagcaaaagttactgaaacttttgattttaattcagtatctgtttagtatatactataggcatagccattgcttgtgacttaatgtgatatggttgttgatgtttcaggaacaaacgcgtgtgcttggacttattcagaatgatacagaactttcggggttaaaattgatccaatcgccattgctagacgcagagataagaggggttcccgcacttaagttcatgggtgatctcatttggaaataagatttttttttttcaactttcgtttccagtgcataacaataagttaaattcttttgctgtcctaagatctaaaaagtcttgctgatgagattaaacaaaataccaatgttattaactttaagcaaagaaagtaatggaagttcttgaaggtttctcattgcttcttctatatgcttctacatttttacttggtgtataaaacagaatcgatacgaaacaggtgataatctatgttatatctaaagcaaaagaaagatgtacaacacgaagaattacaggtaggaaactcttaaactctgatgatggaactacctatgaacagcgtaacagggctattatcttctgcaaacgatgtgttctttcttgtaaaacctttgtgatttctctatgtcctctatagggaagaaattggtattttcgagttttcccagatttgcaggtatagaaggaagaggttatgggaacgtaaagctacttcttttggaaagttaccatacaaaagaaagctgcacagcggctcaagataccggttaatgtcaggaagacgaggcaacgagggaagtgcttgatgttatatccattctccatcagtgatccacaccgagtgataagccaaactcctttatatctgaaatatatacggaagagtaagcaagatggtctaaactctaaagactgcagatatatgcgttgcaatgcagttttataacagggagagatcaagtttgcaacctttgagcgtttgataccacaaatgcttctagagcccatctcgtgtagcacaactctgagattgaatctacgattttgttgtcgtttgtactggtggcaattagagtcagaaccactggaagtaacactgaccactgcacaaagaaaatgaggaagagatgtttttttgggtcaagaagtgaaacagagctttctagtccgagtctttggttctatcaacagcattgatgagacacttactagttgagctggaccaggttcgaaaagtatggccagggtataagctataccagtcacacagtatacaagacagatgaggacaacataattgtctgtaactgttgatcttggattgttgaagaagtagaacatggatagataaacaagcggcttaacgatggtgttgaagtgatcaactgtgtctttcgctaggaagtaagccaggctgctcattccggctcggctttctctccaatagtgtagtttatccagagagaaagatcttaatgcagtaatcttacacaagagagctgaaaaaaacaaaaaattgttgccagaatagatgaaagaagcaaagttgttgtcaaaatagcttgaaagtttctacttacaaacagcaataactgtatatgtatatcccatggcaccaaacgtttcatcgctcactttagcaagcgttcctaagcagataccagcaagtaaaagtattaggtaatctacagctagtgtccttgcttctcgtagtctttgtttacctaacctgcaaagcaaacacatcgaggttaagaaaaggattctctgtgaatcgattgattttgcaagtatttggaagggatctaccttcctaagaagtatctgtattgctgatacacaccaggaacttctctttcggataagtcacctgaactactgaagttattctgcaagttatctttcttgatttcaacatttgccttgacatcttgccagaactctccagcgaaagatgttccgtcatctcctacaacgctcccgtgagcgcttcctccatgagcagagttctcaccggaagcagaagaagccatcccttcaatgcttttaagcatgtccataggaactggatacccattatgaagcatccatctaactggaagctgcttataagtaactcctgaacttgtgcttggctttagtataccttccaatatgtcaatgtagtaatcaggcggattcacacgttcagggacaacgatcccgagacttgagaagtattcttcaactttcttgactggtccttgataacatattagtccaccttttgctagaagtatcagatcgtcaaacatccgaaaaagagtatagctgcagagagagaggataaaatgagaataagatctaatagtctctttagtattaacaaatgggagagtaaatatgttgaacctgggttggtggacaaccatacatatgtttactccttcaagagcttcacgacgtaaagctctgagaagtaactgagaagatgaactgtcaaggcctgaagttggttcatctaatatcagaagtgatggttccatcaccatttcaagacccacattgactcttttcctctgacctcctgatattcctctcttttccacagtccctacaagagagtctcgaacatgttgcaggccaagtgactcaatgactctttccacaactaaaactttctccggctttgggagatctgcaggcaacctgtatgcagtgaccaatgagattatgcatacagttgaataagattttcattaagcaaaaaagtagctaacctgcatcttgcgctgaaccaaagattttcctccactgttaagtttccatggactatgtcatcttgaggtacaaaacctataatcttcttgtaggattgaattgattcaaccttgccgtttacgagaatcattccagtcatgatgcaacctggtgctttgcctgtcaaagctgttaggaaagttgttttcccggctccagaaggacccatcacagcagaaacacgtccaggtgatagttttccggtcacacatctcataagatgtttgttttttccttttaaagtaattgaaagatctttaaaagcaacttcaatcataggtctctttcttatatcaatatcattagccatagagataactccagagaaagtcaagttcttgttctgctcctgcattgctttttccttttcaatctggccataagcgtacctgaacatctggctctgtgtatgcaaggccttgccttttggagcatgttttttaatgtttttatcaccaatctcaagattaaacccttcaggatcttcagggttttgttcaatgtcatgtaacatctctgttagtttgttcttctcctttttctttccctttttagtgtctgagctgcttcctagcattggtggtaaagcagcatctgatccaggttttgcttggcttaaacctctcatcaaatcaggctgtttcatagatttcctcctcgaaaatgttcgagaaaacgattgttgcagctcggttgcatgcttctttgcaatatctttggcagatttccatttctctcgcgattgcgaatcacgcacactctgcactgctttttctctggattttgcctgccttctttctctcgttgcaagcacttgatcagagcagttgtataagattatgagcaagaaacctagcccggcctacacagtacaataaccaagggtcaaatgatcagaaataaccaacaaaatagatgaaactaaggagagatcaattatgactcacgaaaagcatgattccatatgctgtgatattctgatttgttgatcttggattacacgttgccaacttaaaacaatctgcaaaatattcatcagagaaaagacaccgtaagttctttgcttctccttctttatctctgatataacaagtagtgttgtttggacaaaatacatcacttactcagttctgcagtagaacctgtcctgcagtaatgtctggagaaaacaaaagattagtctacctgattagagaaagatgaatcttcaaagaaagtaatgaaaatcattcttagttagttaccctttagtacaaggaagcttgtcgatagtggaaggacaaaaggatccagctgaacagaaaacttcactactactaccaatatcagcccaaatatcagctccaccacaagtatgatttggctgaccagaaggaagctggtaatgatatctgcaaaaacaataatcctgcagcaatcttaccatatgttcaagacaaacttagaaaaatgagcaaaaacaagacttacgggtcgcataatcctgttgttctgttcagattagcttctggacaataagctcccaaaggacaagcttcacatcatagtgaggaaacaacattagaaatggatcaacaaccgaatctttcatcgtttctgaatgtttaaaggaggttaacttacggatcatgcaggtgataccacgagggcagaagaaacctgcgcaacaaggcgcacattgctgagttctaacaggaacattcttgtcgtctttaaggtcaactttcacatctttagcagtacgacaagcccatccaggctcacatccagacatccatgaagatagattgcagttcttgttcggtttcaagtaattagtagctctctttgcacctcctaataatccattgaagtatattctcacttctgcagccgtacatatcctctgcatcatgtcacctattctcaaaccaaaaacatcagcaaaattaaaatattatttcggcttctgtcaatgaaacagaggatgtataaatataccttttgtggttttaccacatgcgtttaagaaatctggctttgtagagaaattaaaggcttcgttataatcttcttttctgaaacaaagacaataacataaacatcttcaatgctataggataaaggttaatgccattttgaaactaacacattggtaatgcagaatccgagctctcttttgatgtcatcctcaaaaacttcggtgagattcgatattttgtcgaaaacgaattggttatagagacgattagccgcgggattatccaagcttctatcttcttgacaaatcactctttcttgctgaagaatcaacacgataaacacgaagaacaatggaacaaaattccctggaaaatatgaatttctccttcccatccctgaaaattttccaagaaaacaacgttgcaaagaattgtcttgagatcaggatggatcaaggagacattagacaattgaaggagacagaaagagagaattagggtttgtttgttttttctttttttctttttctttttggggagagagagattgttgtgtatcttgagagtcaagaaatggatgagaggaaggcatggcgatatatgaggaggaaagagacgaaaacagattttaatttgaccgtttgactttctctaactcgtgtcatggtaatagattcttcaccaaggaatcatactatgtaatttacagttaaggctctgtattttgataatgtttctactgtgacctctatagttttgacatttttggtgcaatatgtcaaatagaaaagatttgtttttctgaaaaatataaaaataaatttaccaatgtgttctgaaggcaattcagctataaactataaaaggataatgaacaaattggtttattcatcaataaattggtttattttggtttaaacatcggttttgttcgatggtccggttaagacggattgttaattattgtcgttgaaaattcaacaacttttttttggtgagaaaaactgaaagacacaaaatcagtcacgaaaacccccaaatccacagattaattagggttttcgatttctctgatgaaactgagaagaatctctcattagggttcttcattcttcagagggatttctcatatctctctcattgagcttgctaaagctgaaatctgagtttgaaattggaattcagattcccatcccatgttgacctcttcttgctcttcttcgtctctcctctgccatcgcccagctctctctagttcgcgttccaagtttagggttccttgtcgaactgttttctctcctgctcttaccaagatttcccctttaactgcttcttcaccttctaagtccgccaagcatgtacgcttctttcttcttttctctgtttatattcaaaagtatgaaactttgaattgaaaaagagactttggtgtttgaattgtgttgaaattgaggaatcttggattcgaatagcactgtggattcagtttatttacgaaagagagtgctttttgataaggatttgcttggattactagtagttttagaaatttgtggtttcttgaggttttagtaatcttgtgacttctttattgtaagaattcaatatttgtattgatgcagtgtcaaatggttaatggaagaatcggtagtttgtctccaatgtattaaactttggggctattttctgcagaaatggaagattttgtgttttagaaatgaagattctgctcccgagaatccggagcattttgtgcctgaggaattagttaagccagatcaagattctccatgtacagataaaacagattggaaggcaacttttcaaaaggtaaagatctatggacgttactggatacttgtacagttgaagaagaactaccttctgtctctgttttagtctgacaaaccggttttgatattagggtctagactctagaggttaggactgcagcagaatcttatatttgtcaataaactgttatgtatatatccattatccactctttgtttttttttgtttactagtgaaaaataagaatttgaggtttcttttgatctggaaatgtgccatacaaattgatgaggctttctatttactaaatgtgatggcaaaaatgcaaataaggaaactctcacaaaggcttatcgatcttgtgttcaacctattattattgggtctaaaaagcactttgtttcgttggttttcaggctgcagatgcagttttgaaggccattgggactcgttggaaggtaccatggactgtcgagaccattgtgcaggtacctacatcttaatgttacttaacctcttttgtattaccgtatcatattcataacttttacacaagaacattattgaaacctatatagaaattttacgggattatctgataagagtgtattatggatattgagtctgtgtaagacgtagtttttgaatgtatagacatttaaacgtgggctaatatccttgacttagtaactagggactacaagataacatcaagctaatagtattatagatgctttggttcatacaaaagatgcaaaacaaacagtaatgagaaatgagttatataccaaagctttcagttatttccttggttaatcctgcgataatctgccatgcccctaacatacactttttcaggtaatgcttctgtgggtagccgctttctggttcattggttcatggatgatcccattcatggctcatatatcaggtttccacaaagaatccctaacatttagaggccaagctttgttcagtctgataaccgatgtaacagaaggcctagccgggattgctatcctccaccgttgcctctccatgttccgtccacttgcaagtgattggttccgctttacccttaaaggaaactggcaactagatgttatcataggctgtttcatgttccctttcgttaaccggctctcccaattaaacctaaacctcttgccactcccaccaacctcaagtccagtctcactctcaagtgtcgagcagtctataatggctagagaccctgtggcaatggcactgtatgcagttgtagtatcaatttgtgcaccggtttgggaagagatagtgttcagagggttcttgttaccgtctctaactaggtacatgccagtttggtgtgcgattcttgtgagttcgattgcatttgctttggcacatttcaatgtgcagaggatgttaccattggtgttccttggagtggtattgggtttgatattcgcaaggtcaaggaacttgttaccttcaatgctgttgcatagcttgtggaacggctttgtattcatggaattgatgcgatgatgactatcttttgtaggtgtcttgtttcttattcttcttgtaattgattcaaagtatgatgttagcttttatttttttataataaatggacagttcaattgtacaaagataaaaccaaaaaaggtcaaaaagaaattctaattttacaacttcagaaagttgaatatgattggtccaaaaataaaataaagccggttatactttgattcgtcttttcaaaattctttttcaagctttttctatcgattggactaagcttatatcttgaattcttgatggatatggaggaaatgatacgaaacgacatcaacacacacatgtataaacaagaagtgcatgtcaataaagttatatgactttctcaattaaggtggtaatatgaattatccggcccttgagctcaattaaggccaacaaattcttcttcgacctctaattcagtttgctaatactgacaaactcaaatccatatcactgttaactttttactaagatttttccacttatcgttaaaggttgagatatttaaatatctttcttcctctttcctacagataaattcgattagtatttatataaatatatcaggttacacaatacacatgttcaggagcttatattattctttatacagccttttaatccttttgttaacaactttttgtttcgtagtgaaagatttaaataacttggtcttcccaattgttccgagtctatatattaagttttggttaacctttaagtacactatagaaatcacttttggctgctatttatttgcatatttcttctatccaataagtaaacatattttaaaaatctagagagactcgagcctcgaacatcgatttcctcaggatcaccgggaatgtctaattctgttagccgaagtcatcgccgtcaaatcagacatattaatggtcaacatatattacttggtcaaaccttccattcatgtgtaatatatggttacatgcacatgttggttggttagctaaaatgcccactcacatataaatattgcaagtcgtataaataatctaggatcaagattgtggtcctttctttatttaatctcataaagtttcctagatcgatttctagatagtgaccaaatatataagataagttgattgattgtattcttacttggctgcttgtgaatgtacatcaaactgaaatattttcatatatatcgaatcatgcatttttaataatttaaagagagttaggttatagatctcatgatatattggagaatcgcttataatatataacatataaagctaaagactagggttattaacttattatcactttttggttactatcaaaactgaaatcatataagacatgcaaatgactgtttattgaaatgcagtttgttttgttcaaataaaattacattatgacaaatgatatgttaatgtatagtttttttttcctttttggttcaaaaatatgtattttgtggatttgaacatgggtggtagtggtagcacaataacaatattaccacaaaccattggtttagaagaccttttgcagtctctcattgggatgatttggcatcttcttttaattatttatttacgatc

SEQ ID NO: 937 - DNA, 54632 bp, Arabidopsis thaliana
gactataaagagattggttgtttttaaaaaaaaattagattggttgttaatgctttggttttgcgaaaagatgtgattgcctctttggcactaggctgttgaaacatataaatttatttgaacttttttaaaaggaaaaattcagcagagaaaaataaaatagaaaagatgaagatcaagtcaaagtgaaaatgaagataaagtccgtgaagcagtcttcgtaaattaatcactcttatatgtgtaatttgcgtgtctatataacataagacacatatattgacggactgaaaatatttatcggctaacttcattacaatttagaaaactgcatttcaatctaagaatactaagaagattattcatatatattctcggagttgtgctaccaatttctttactatcttatggaacccaagtcagctagaggttagccggttatgaaatatcatatctttagtatctctaacaatttggcattaatcccttttttatatatctctagtaaaaaaagcagccaatttgagtatttaattttatggtgggcgtaacaatcaaagaagaatctagttggccattagcaaccaaaccaggaaaaataaaaaagaatttcagttgtttcatagtaatatgatctgtttatatgcatgctaacaataaaaacttgacatgttgtagtatttaaagtcactgaaactacctaacgctttttaaagtcattttcaattttatgttccaacatgcaaaataatacagactttctgttttgcgcatgtttttgaacttgaaacttagtggtagggtctccccaagaaccagttacactgttacaggcatataagcgtataattaattaatatatttaaatgttcaaaacaaattgaaatcaaaagttcttttcatatatatatatactagataaggtccgcctatttaggcgggtgtacccgaaattttcaaatattcgaacgggtctaaacttcaaaatctgaaaaactcgaacccaaacccgaagaggtatccaaacatatttcaaatataagtatatattagttatatttatacttatatatagaaaatattaggattttttggatattttagttatttttgtgtatttttagatatattcaagcaaaactactcgtgttgttttgggaatttttgaaattttaagtaatttaatagatttgcacacaaaatttgatatttcaatatataaataaactcgaacccgaacccaaacccaaaccgaacccgacccaaaatcttaaattacccgaacgggtcctaaacttctaaacccgaaaacccgaacccaaaatactcgatccgaatacctaaacgcctagggctaataatgaataaaaaaaaagaaatccacaaaaatatttagaaaccaaacattgttgaaaatatattttctatatatgccgtaatctcgtaagttaattttacatcatgcaaattaatattaaatgagttaaaattaataaatgaaaataattgaaaagttaaatcctataaactaagctatttttctcaaaatgttctattttcacttatgattacatgagttaaagacaaatttgttaattttctttttgttgaataaatgttaattgtttataaatatatagacatataaattagtatatgtaaatttgtttactttttaagattttctattttttagagaataaaataaataaattttgaatgacacatgtaaacatctaatcgtttgacttgacacgtggtacaatcctttgagttagcaactttgaaaaccatactttatataataagatatttatttttccacaagttcttttcttataatgaactggactataatataaatttgaaacaatatgttctttatttgtgggcaaaactaaaacggtaaaacctatgaagccgtttattttagaaaaaaattgacagggtcctccactgatggctgttggtaacacattcatggttcatggatgtaacgtttgtcctctgacccaagtcatggcctctcccctttcttgtccttttcggtctttttctttccttttcacacagtcagctttatccttgtcctcactttacatttacaactttaccctcgtcttgattctcgtctaaacgggtccacaggatggacttttaaagcgaacaagaaggcccatgaaactttttgcttcgttttccctaaaacaccctataatcttagacctacaacaagttatacacgtaattaacggcggagattagggtcaatttcgtcatttacataaataattattgtcccaggaagacttataaaaagtcaagacagttaagttttgattactatatgattatatgaatcatatggctgaatattcagttaagttcgttttcaaaatacacatatagttataaaaggagttgttttatgtaaaaatataaagccttttgttttatgaaatgtataaatttgcagtgtaccatttttaaattgtttctgtcatttatgtttacgaaattagaaatataaagttttttggttaggcaatgataagacaaatcaactttcattagtgttaactgatttaacgatttcgttatctaaacattttttagattgaagagtgttttgtggatcatcttataatcagtttctttctgtatttaatcacataatatgtgggtcatctttctgtcaagtgtcaatgtggtttcatattttttaaggaaaatcttgatttgagaatgagtaaaaatatcttacgaaacctaccattttaacgaagcatttaatgtgttagccgaaaaagttgctcaaattgaggtcttatcgtatctatgatccgttcatttgtgaacaaaaaatgcttgtacacaacaaactgagatcctagatatataatgaagacatactttttctcctaagaaatagatcctaattaaatgttgacaaaagaccggatcaatggggtcggcgaaatacttggttataaaaaaaattaaaaaataatactactaacacaaattttaactatacaaacagagaaataaatatttatcaaaagtcaactaaaaataaaaaatcctaggatataacccctacattttgattcaatacgtatttaatttaaggtggatatatatacttttatctatttaaaccagatataatcgaatgaaataaagagctaaccggatgtctgaatatatcttaaagggagtaatttgattaattaaaaagttatgcgtaacaattttaatgaaaagaaaaatacatgttgaagaactcaaaatagaccaaaatacacacacaaaaaaagttttgttttttaatatcctccaggaaggaaacgagagaggaaggtggggctttaaagagagacccgtggaggctctactgaagcgatgcgtggaacaaagctgacacaaaatggccacaccaacttctccttctccttctccttcttcttcttataacaacaagtgatacattctcaatctctgattcttctgattctcaaaaccctaatttccacacgctttctatcatttccacccaaaaggtaacgcgctttttatttcctttcctgcattcataaatttgtctcctgcatgttgaaaaaaaaaaatttacatcgagattcgtttttattttttagagagagatatgacggagacgacgaaggtgatgtacatagtggtggtcgatggaacggatacggcggagacggtggaagaagacgggaccgggacttggaaagattcgtttaggtatacacgtcctgttttgcagagtactcttcagcttatgggatgcaaagcccgtcacgccttcaaggtgatcctcgattttacactttcgaaccaaaaaaactttttttttgttaaattgttttcacatcgctttcattgaattacgattttttatcattaagaacttgtattcttgtcgtttattagtttgggattattttcgtgttttttttttttttttttaaagtaacgaactggcttttttttgggattctggaacagtgatgtgtctggaattgaatagaactaagcactttggtcttaatctcgttatttggcattattctgtcgaccgacatggtctattctcaattattgtcttgtaatttggagaataattgtcaagaatcaggatccagtaaagtatgaatttttaatcagggtgttcacttttctagtttggaatttcatggctgttacttttgtgtgtttaagaatcaggatacagtaaagtatgagcttaagtttcgttgtgctcttactttgtgtgtttcaatgttgtcattaatgagcttgcttggtatcctttaaaggttatgcttttgtttgaaactaaagacaaagcttcttgatttatggtggttctgattcatgccttgttgattttgattgatcctgaagttctgttttttgtttgtttgtttgggttgtggacagattagccgcagggtgtttgagttaataagaagtgagggatctttaatcctttctccctcgctttcgccctcgcatagtaaagaatctgaatttcagaagacaggtgatgcttcagcttgtgctaatgtagaaaaggctaacaaagttaacagtttggctactgatgatgttgataagagtaaaagtaagccgtttgaggtgtacaaaaggcgaacaaccgttgttgtttctcgtgaaatatttgtaaacgttgtctgtgatgccctggctgagtacaagtatgtgggtcatgaccaaagggcagacttgattctgtcgtgcaggtaaattgcttacctttatgaacatatatgttgctttactaataataaattctctaaactttatagccattatgggtatatatatatgataggaactgtagtcagattttattatactgaattgtcattagaaatgatgtgaacttaatgttgtttgacctctgttatgtgtttcgcttcatcctttcttgcattatttaatgcttcattacattagtcatgccatttatggctgtaactagaatcaatgcatttgatcttctttcacttcacacatcatctaaacattcttatcattttctacagaatccgagaaaggaaagaatctgtgactgttctactgtgcggtactagtggctgtggcaaatctacactctccgcacttctggtatttttcatcacatgtattataatcgttttagattgacataagatgatgcttcactgttttgttttgttatattcaatatttggttaggtactgtttcacttcttttttccacaggctttacaatactggattctgttttccttacagggaagtaggcttgggattacaacggtggtctcaaccgactcaatccgtcacatgatgaggagtttcgttgatgaaaagcagaatcctttgctatgggcttcaacataccatgctggagagtaccttgaccctgtggcagttgctgagtcaaaagccagaagaagaagagccaaaaaaatggatagtattgaggacgaaaaagcgaaagcctctgaaggtgggaaggctaagaatactcaacagactgatgttggatcaacaaaaaacacccctgtattgttaagtcccaagcaaatggctgtagaaggatttaaggctcaaagtgaaatggttattgacaatctcgataggctcattaccgcatgggaagaaaggaaagagtctgttattgttgaaggtgtccatttaagcctcaactttgtggtaagactcaatttgttctctttaacacatttcattttgaaagttgtaattctaacttctaacttgttttcagatgggactgatgaaaaagcatccttctatagttcctttcatggtatacatcgcaaacgaggagaaacatttggaacgatttgcagttagagctaagtacatgaccctggacccagagaaaaacaagtatgtaaaatatatacgtaacatcagaacaatacaggattacttgtgtaaacgagctgacaaacatctcgtccccaagataaacaataccaatgtcgacaagagtgtggctgcgatccacgctacagtcttcagttgcctgcgtaggcgagaagcaggagagcatctctatgatgctactacaaatactgtctcagtgattgacgatgagtatagaaaccagtgtacagctaattcattgagctccaaaggaatgtttcagctgatccaaagaaaaggttcttctaggcatcttatggctcttctcaatactgatggcactttcgcaagaacttggcccgttactggtaaggtcgatgagagtggaaagccagtcttttgtaatgagatgattgaagaaaatggaatggagcacccggtctatggatacctacagaaagctgaaccggtgaatcttcagtttggtctatttgggatcagtgcttggcctagtgatggagccactagccgcgctgggagtgtagatgactgtaaagctgacatggctgaaaccagcagtcggtattactcttcttgctgcagctcgcctaggatgtctgaaggaacttctaaagaggtactctacaactattttctctgatgtgatttgtatgtggaaggttgtttgatgattctgtatcttctctgttaacagcttaaggaggatcagtcagtccatgggagcgatgaagaagtcgaggatgatcctcccgagccagatacagattttagcgatgacgataacaagcgagaccatgacgaggtaaaatcttcttaatgatctttctactcatttatgtgttcatatgcaatgaagtggtaaccatgaggccttgtacatctgcaggtgggttcggttgatgagcaatcaacaaagtcagatgaggagtacgatgatcttgctatggaagacaaaagctactggacagatgaagaggaagagtcacgagatacgattgcaataatgtctgaaaaaaacaacaagcaagcaacaaaagaagacaagtacatacagaacttagacctttttctacggaccgcaaaccagcagcttgtcgagccacttcagctatgtgcatcactgctcacatgcgagaatgggaacacaagactctggttgggtaaagaaaagatgaggaaacgttctttaagcatctcggccattggcaaacatgggtcgggtttgggtgatgcgattctcttgggtgccccatgaggccatgatcttttactttagtttgatatttctctggtgtagtcttttttttatttcttgataaagtattctggttctggtctttagtttaagttttctgtgtgtgtatgtgtgactgtgtgaatagtcttaacttgcacaaatttgggggtttataaagtgcttcgttttcttttcttttttgatttaaggcttttcttttcttcgacctcaaatgtaaatacttcaatattaacatctaagactccagtttaaatttctatataattgagcgtttgcaaacaaatataatattagagttaatctgattcatgtcactttcttaaggttggttctatttttcattcttttttttaacgttttaagtgaaaaacagtaaattaattctataattgatttatagtactatataatagtttaaaactttcaacttaagatggactcgatgataaaataatataattaagatgacatcatcgaatttagttcaataatctattggaatccagagaatctggcttggaatcgttgggccactactttagtcttatagacacgtacgattcacattttggtacatatacaatcataaaattatttgtgagcgcctgtaaatctgctggcatcgtaactagcatgttgctaactatagttgacaatcctaagattctttttatagtttttggcttcttcgtttcttcagaaattactttcaaatgatcgtcaaaactcatcattccacaatatgtacatacgaaataagttatggaatagatatttatcttaatgaagatttctcttttaaaaaaaaaactaaagcacaaaagtgctaactagaaaaaagttctcgttcacaaaacataaaagtcattaactcattacgaattaagaataatggacttaatataatgttaaaggtaaacaagatcaaacaatagcactgttgcacgtttcctctggagtttcttaaggacaaaaaaggtttttatttgtgaaggtacaactgttattgctgttacaatcttcctaagcataattagggatctgattacatcatcacaactttagtttaataagtgaaaatctatatattattttgtttatttcaataacattctattatattaacaaaaaaaaaaaaaaaatcaaatggaacctttgaatccatgcaaagacatagtcacatagagagagagaggacccaccggactcgttcacatgtatgaatatggattgatttttatttctctttttaaaaaaaaatatggatcgattattgcatcccatcatgtggaaatagctcattaccaagaaaaaaaaaattacaatgaaattttcttagattaatctccgaagtctgtagtagttaagcttacaaacttcaaggaaaatcacctaataaaaattcgtggatttattccatgagtatggagctataattataaacttattaaatagagaatagacttgataactcgcagttgataatgcctcatggtacaatctctgaaaacatcgatcgaggttcgaaataccaccacagcaacgcaaaaagcgttggcaaaatgccaaaatctcatgattctttggatttaattacttcacccaagtttaacgatttttatcgttaattttctttaggtaatgctcttttgtaatatctttacatttcattttcatgatactaacattcatagcaaaacaaaattatatattaaataatgattttaagaagtaaacatgattttttttttctgtaactgtaagactatgttatttattttttatctgagaaaaaaaaacttagaaagaaaaggaatcatatagaaaagagattacatcatgcgctgcgacatataaagtttcaaattataccgccgatctttattatattgatagtaaactctatgaggatttgctgtattagacatgaaaagaaatcgttgtaaacagaaccagaaagtagtttctcgtttgagaaaaaaaaaaaaaaaaaaaacttcctagatatatggacagtttagtaatattatattgttgataaatactaaattggaatataagtgaaagtgaacctttgggacgtatgaccaggctaaattctcgtgtttgcatgctcgcggcgaaagtgaatattccatactattaatataaagacacaacttgtataattgtaatcaatctcacataaacaactttgaatcattaattatcgttaagaactatactattatagtatcatttacgtaaaacgaatcccacttatagccttttcgaatctccatcggctcttacgaagtcaactttcgtatctctatataaaaccattcttctccttcttgttccctaaaccaagaccacaagaaaaaaacataaaaaaatattcacaaaatggccgatggttttggtgaaccgggaagctcaatgcatggagtcaccggcagagaacaaagctatgcattctctgtcgagtctccggcagttccttccgactcatcagcaaaattttctctccccgtggacaccgaacacaaagccaaagtcttcaaactcttatcctttgaagctccacatatgagaactttccatcttgcttggatctcattcttcacttgcttcatttccactttcgctgctgctcctcttgtccccatcattagagataaccttaatctcacaagacaagatgtcggaaatgctggtgttgcttctgtctctggcagtatcttctctaggcttgttatgggagcagtttgtgatctccttgggccacgttatggctgtgctttcctcgtcatgctctctgctccaaccgtcttctccatgtctttcgttggtggtgccggagggtaagcattcttgtgaattgtaaaatttctcaaaaaacttaagattaacttcacttagtcctatataaatatatgtactaatgtacatatgatatgcagttattgaaacaattttaaaagcatttttctaaaaaaccaaaggatttcatctcaaaattaattgacaataaggaaagtagtttatataatggattattcttaatgtgggtttctaacaatattttggccatatataggtacataacggtgaggttcatgatcgggttctgcctggcgactttcgtgtcatgccagtattggatgagcacaatgttcaatggtcagatcataggtctagtgaacgggacagcggcagggtgggggaacatgggcggtggggtcactcagttgctcatgccaatggtctatgagatcatccgacggttagggtccacgtccttcaccgcatggaggatggctttcttcgtccccgggtggatgcacatcatcatggggatcttggtcttgactctagggcaagacctccctgatggtaatagaagcacactcgagaagaaaggtgcagttactaaagacaagttctcaaaggtactttattagtacttaagtaaaataaatgttaattcttcttggatcctttgattcttagtcttatatattagggtctgcagatcgttgtctaaattatattattttcattgaatatataaagaaggttgttctgatatagatcttagattaacatttagatagagacattaaattaatccaagaaagcgattcgactaactaaaaaaaaaaaaaaaaaacaattacgttttcatatagaaaaagcgaaatccttataatactcttccatagattttttgttttctcttttttttttttgttatagatctttttatttggttaagagtaagactcacagttttctggtggacaaattaaccaggttttatggtacgcgatcacgaactataggacatgggttttcgtgctgctatatggatactccatgggagtagagctcacaaccgataacgtcatcgctgagtactttttcgacaggtataattattaaaactggtatataatttatcgaatccatagtcagtcagtctctaaagtataaacaataataacaagggtttgattgcttttagcatatatagtactattattattgcaatatacaaggattttggttttttcctaaccattaaaatcaatttaattaacgtcaatgccgcgtgttaattgtagtagacagtaaaactcaaactcaaatttgttgataccttgcatgtcgatttactaccacaatgttttagccaaaaaacatatatttttgaaaaatgtattctactcatgaaaatgattcttgttaagctttctttacatttctgtttttgtaaatccactacttacatttcatttatttgttaccgagtagaccctaaatatataaattacttctatggatcaaagactcaatacatggcgatcatttttcaggttccatcttaagcttcataccgccggtataatcgcggcaagctttggtatggcaaacttctttgcccgtcctattggtggttgggcctcagatattgcggctagacgcttcggcatgagaggccgtctctggaccctatggatcatccaaaccttaggcggtttcttctgcctatggctaggccgagccaccacgctcccgaccgcggttgtcttcatgatcctcttctctctcggcgctcaagccgcttgtggagctacctttgctatcatacctttcatctcacgccgctccttagggatcatctctggtcttactggagctggtggaaacttcggctctggtttgacccaactcgtattcttctcgacctcaacgttctccacggaacaagggctgacatggatgggggtgatgattatggcgtgtacattacccgtcactttagtgcacttcccgcaatggggaagcatgtttttgccttccacggaagatgaagtgaagtctacggaggagtattattacatgaaagagtggacagagaccgagaagcgaaagggtatgcatgaagggagtttgaagttcgccgtgaatagtagatcggagcgtggacggcgcgtggcttctgcaccgtctcctccgccggaacacgtttaagagtttttaaatgtacatgttgtatcagtttctatatatttctccaaatgtgtaattagttgatcgaattgcatgctttaatttcttttaaaggatatgctactcttcatgtaatttcgtaacaattatattgtttttttaaatttcgtatttattttcagtatcacgtcgattaatttgtttgaactataacctcaatgtgacaaagtgtggtctatatcagtctttgtttataatcttcgttttcctagttttaatgtaccataatcaaagttcgaaatagcccatcgagccaaattagatcacttctctagatcatgtggcattttttgttttagtaaaactctatgttcaaaaaatgatacggtctgagtgatatagacttttcagaaagcccatttatcccaattagatttcaatttctttctcagaatttgatcaacatattagcccattatgatttgttttacttttcttaaaacttggttttacttttgtagttttgttgcggcgattccttctaaccggataatctcataactagtatgaaactttatgagtcaacttttgattgagcaacaaagttatgtcatattggattgttatcattttagtttttgttctatatctgtggagttttcagttatgggtcgaatgccgaaaatgaatactaggcaaaactttttattgtaaaccaactttttgtcttatccgaaactttctgattagtaaacacacatttttaactagtactcacagacgagaacaagatatgtagatgacgtgtgtgttaaaattcaatggtttgaatgatgagaattaagtcagagaggagacgtaccgtacatcttccgcatcctaaggacagaacccaatgctgtgatctgtacggttataaaataggagtactactttaacagataagtcaattaagttatcgttaatatatttattatttaagcaagtcaataattagcacctatcataaatttttatatgagcacgataagcatcaaccactttattggtgaataatcccacgttgtttcgtgaaaattgccgtcattggagcgcgactattacattatacaactaaaactttctgaaaatttacaaaaaggagtcataattattcacgctgaataaaaagtaaatctgtttttaacctacaacttttgactccaatctattcacaccgtttacttttcaattaatccacttgaaggtatatactagtgatgttcacttcaaaagcccgtatctacgaaatccaaaccaaattgaaaaatccaatctaaaaacttatctgaatctttttatctgtcgaattcgttgtaattttccctatatcaaacaaattacaacctgaaccgggcgaacaaaaaaggaaaagacaaaaactgaaatattttttttgtatagctttttgctagtgctaacgttaagaaattctcaacattgtttgttttgtctgttaaagttttttttatatacaaggagttccactaaatagtattatgaataatagataattaagttttaattatggtaatttgatgaagaactagactctatttgcattgtagttttacgtatacatgaaaagtagaagtctaccaagttgagcaataaacattctataaacttgagaagtcaatgagccaataactcctgtaatgaaaaatagttagagacaattttttttgtttgacctttccacaattttcgattcttaacctataaacattggacttttttagttgccttcccctacatgtaaaaacaatatatatatacatttttgcagccattttgtgaaataaattctagagttggaacttatttacaatggctgccactggattttaatgtttgtttttgataattagaaaaaaaatcttcaaattaaatatttgacatttaacaatcttccctaaatctctccacattaactacacggttagttactaaaattaaacttccaaaatatttaatatcatttaattactacacaattatcatttttgatattgtttttctccatgactataacaattcgattataatcatcaaaccgtagagatatttgatagcatttaattactacaaaattataaaatatttagacaataattcataaaaatatcataaataagatcaatattaataaaataaatggtttttttacgggacgggttggcgggacgggtttggcaggacgttacttaataacaattgtaaactataaaataaaaatattttatagataaatacaatttgcaaagttttatgtatagtaactttaaaaaataaattgtttccgcggtgtaccgcgggttaaaatctagtatatatatatagaactaaaaccattacaaaaagaaaagatttcgcctttttaatgatggataattctaaagcctataagacttaaacttttatttaaaatctacagtttgttgcccaaataaaatgtgataagtatagagataacaaaatataaaattatttcttaccaaaaaaaaatatatatatatatatataagactattttaccgtaatttattgatgattgcagacaatacaagatatctctagtttacaaaaatatcatcaacaatattcgagagaatagttcttttgagtatttgcggatggccggaaacaacaacacttagaaatcatatttagtaaagaattatgtttagagtttagactttatagcttatatattatattgagatgatagatgattataaggaaaaacataaggaagtcaacttatcataacgcttcattgtaaggatatgcgaatatcaaaggcggaaagatttagaataagtgaataacccataatttcataaacgttagagcatttttttaggaaattattttaagatagcaattatttcatttggtgagtcgaccacatggaatcctcaagagacaaatgaaaaataattagactttttgacgatttttgccttcattgatacgtacggcctcttaggctttttagctatttccaatgccaactgtcaacattcgtatctctttcgccattttagtgaaattccacaaagtcattatctttgatgtatataacttgccaggctgctactataccaaatagatttataaatattatttttagatttcttttccatactttttaattctcaaacgaaactttatgcaaagttgaaataaagttttcttctgcatttcacttaaaattataatttgtcaaacagaagtgcaaacattgattttctgactgaaaatttttcaaccttacaaaagttgcttgaactttgtttagaaaaaagaaaatactaatacttgataaaccctcacggttcctattttaaaaccaaaaccttcaaatcaaagactcaagaatcaattcataaatgtgtgagacaaaactcataacccaaatatggtacacgtacgtatgaaacgtacttaaatgctacaaaagaataatatgtttagttctcaaatttaaataattttttccttctatcattactaatcaaaattacaactcatatctatactaaatgctattatcagctaacaataataaaattttcacaaattggtaaagtccttattaacttttacttatcttattcaaatctcattattggacccacctaaccctacccaccatatgatattggtatcccctctggcctctatataaactttgcatttctctaatctccaacttacaccaacaaaacacaacaaagaccattagccttctctcccactcagagtctttcatctcactctcgccttaaatgactcacaaccattctaatgaagaaggctccattggaacctccttgcatggagttacagcaagagaacaagtcttctctttctccgtcgatgcttcgtctcaaacagtccaatcagacgatccaacagctaaattcgcccttccggttgattccgaacatcgagccaaagtgttcaacccactctcttttgctaaacctcacatgagagccttccacttaggatggctctcattcttcacatgcttcatctccaccttcgcggcagcaccattagtccccatcatccgcgacaacctcgacctcactaaaaccgacattggaaacgccggagtcgcatccgtctctggtgccattttctcaaggttagccatgggagcggtttgtgatctcctcggtgcacgatatgggactgccttctccctcatgctaaccgccccaaccgtcttctcaatgtcgtttgtgggtggccctagcggatacttaggcgtccggttcatgatcggattctgtctcgccacgtttgtatcatgccagtattggaccagcgttatgttcaacggtaagatcataggactagtgaacggctgtgcaggcgggtggggtgatatgggcggtggagtgactcaactcctaatgccgatggtcttccacgtcatcaaacttgccggagccactccgttcatggcctggcggatagctttcttcgttcccggatttcttcaagttgttatgggcattctcgtcctcagtctcggccaagatctccctgacggtaacctaagtacccttcagaagagtggtcaagtctctaaagacaaattctccaaggtacttttctatatatatatatttctgtctcatcttcaaatatataacaaatccagaccaagaagaatatggctctcattaaaagaatcttgcaaacattaaacatactcatgaagttttgcaataaattcgtgaagaactatttcgtttatttagttaaataaatttctagtgtctaaaggtttttcttgttataggttttctggtttgctgtgaagaactacagaacatggattttattcgttctttatggatcttccatgggaattgaattaactatcaacaacgttatctccggatatttttacgacaggttcgatttcttattcgttaaaacccaactgatgaacttacttacttctgtcacaaggtaataaccttaatttgttttcttgttctctacgtatttatcaggtttaaccttaagcttcaaacagctggtatagtagcagccagctttggaatggctaacttcatcgcccgtcccttcggtggttacgcttctgatgtagcggctcgggtttttggcatgagaggccggttatggaccttatggatctttcaaaccgtaggagctcttttctgtatctggctaggtcgagctagttcacttcccatagcaatcctagcaatgatgctcttctcaatcggtacacaagcagcttgcggagccctcttcggagttgcaccttttgtctcgcgccgctctctagggctcatatcgggactaaccggcgcaggaggaaacttcgggtccggtttgactcaactgcttttcttctcatcagcgaggtttagtacagctgagggactctcattgatgggcgttatggcggttttgtgcacactcccagttgcgtttatacattttccgcaatggggaagcatgtttttaagaccgtcgaccgatggagaaagatcacaggaggaatattattacggttctgagtggacggagaatgagaaacaacaaggattgcacgaaggaagcatcaaatttgcagagaatagtaggtcagagagaggccggaaagtagctttggctaacattccaacgccggagaacggaactccaagtcatgtttgaagacaaaacttacaagagattttccttttacattaaatccctttttaatagtttcatactccactcatatatgtaccgagtaagaccttttctgtgataggtaaggatcgatgagcttggtactttagtataaattattgtaatgtcatcagaatgttcaactactcttttttctgcaccaataagctttatgttcaatcagatttacatgtcaagtgaaaaaaacaaaaaaagtctctgtttacggtgtgtgaaatgctaagagagtccacatgaagaaaactttatggacaaggaccacggaagaagcaattgaatgagtgatctttacatcacagaaacggatctcatcgaaagaatgtaagaagagtatgagaaaataataaactacatagattttcgaaatattgattcagaagattaatatgttatttttttccactcacactactcattttacaagagatactccagagattttatgtgcaactctgtaatttgattcaagattccttcactggaatcaacataaagatggaatatctgagtcacctttccaacgaatattcgaatataattatgagaatattcgaatataattatgagaatattcccactttaatattaaatataataccataatcgtcaacatctcagtctttaaaaaaacagaaaaaaaaaatcctacaataccaccaaaaaatattacttttctctctgtttcgccttcaaaaaaacgttcaacaacaataacgaaaaaaaaagaaggtgcacatgataatgataatactaatatagaaagaatctctgacctcttaaggaaatgcagagattagtgagtatggtttctctgtctctcaagtgtgtggctttagaactcgttaaaaaccattcccaaacccatcaaaaaaaccaaagccttccctctctctctcttagcatgtgaccccaatctgagtcttttccattttccatcaagagaagaagactcgactctctatcttcaatcttcaagtccggctttagccttaaggtgcctcttgaagtccataatgtcaccattccatttagtgatgcattgtttctcgcaaacccatatctcatgagccacttggttgatcaacctgaagtcgtgactaaccagaaccaaaccaccatcccactcattcaatgcctcagcaagcgagtcgattgtctcgatatccaaatggttagtaggctcatcaagaagaagcatgttaggctgcttataagctaaccacgcaaagatcactctgctcctttgtccgtcagatagattcttcattggcatcacttgagccttaccagttagaccaaacctaccaatcgcagctctcattttctcctcttcagtacccgggaactccctcatcatgtagagaagtgcaggcaattccaagtctagcttctcagccagatgctgatggtactgagcaatcttcaagtggttgtgacgtcgcaccattccttcagttgggtgcaattcaccagtcatgagcttcaaaagtgtactctttccagctccattaggtcccacaagggcaaccctcgagtccaagtcgacaccaaagtcaatgttcttgtaaataagatagtccggtgtgtaaccaaaagacacttcaacaaactgaagcactggcggtggaagcttcccaacatcagcaaaacggaaaacgagaacactgtctctagcaaccttttcagtgagcccacctctctccatctttgccaatgttttctccttactctgtgcttgacgagcaagtttggctgaaccgtgaccaaaccgagcaatgtactccttcatgtgagaaatctgctcctgctcccatctgtattgtttcatctggttctcttcaagttcagaacgagtctggcaatactgatcaaagttaccagtgtagtacttgagctgtttgctctgcatgtggatgatgtttgtacacactccattcaagaaatcctgtgagtgggataccacaacaaggatgcgatcaaaattcttcaggctctcttctagccacacacaagcttccaaatctgttccaagagacaacaacaacatcagcgacacgatacttaaggaaaaccatctgaagcgagtacaaagaagagagattaccaacctaaatgattagtcggctcatcaagcaaaaggattgtcggcataatgaagagtgctcttgccaatgcaattctcatcctccaaccaccagagaaatcttttgtcttcttcgcctgcatttccttgtcgaaaccaagtccaaacagaatttcagcagcacgtttctcagcggtttctgcatccatggcgtctaacctctcatagatagattgaagacgctctccgcctccatcatcctgctgtacaagaatttcaacttctttctctaacctcaacctctcctcatcacagctaacaacagcctccagggaagacatgtcagtagcttcaatctcgtgagacaaatggtagatatccatttgatccggaatcggtatctctctgcgtccgattgcagttaaaagagtggactttccacaaccattcaacccaaggagaccataacgccttccatagttaagctccaacattgaatcaacaataaggtcataaccatgaaacgtcacagacagagattctatctgcaacatattttaaacagaggatacaaagtatgagcaatcaaacaaggattatccaaacatatattcacagatcaaaggacacgaatctaaatttccaaatcgaatcacgaaatctagataagaggacttactcggatatctctagattgaggatgagaacagagaactccggtacaagtccgatcagaaatttgaagagcatcgacaccgcttgacaagctatcaacaccgttggaagaagtagcggcggatttggatggagcagcagctttaccacctcttttagcggcggcagcagctttcttctgagctgccttcttcttgctagcgtcagacaccatcttcaaattatctccctgagaaaacagatcaaatccaaactataagaaatcaaaccgtggagaatacgatagagataatagaatcaacgaatcgtggaagaggaaatagtaaattttttacctgggagattcgggagatctgtagatctagggttttcagcagaagacgagttcggcaaaaattagggttaatggtggtttctgttgacgcgaggcggaagaatcggtatttataggagatgattgttctgggtgtgccacgtgtacggcgacactgagtttgctttctatattttcagttgcgtatcagaatacaacacacctacttcactttggtcggtcccgaataatgtgcttcttttatatgggctttaattattaaaggcccaataagtagttggtaaggatcctgaagtgaataagagaagcccaaggcttttaagtgggtcgttttattctcccaatgcttcggccttgcaactataggccagtttctgcaaatgtcttttacaatatattttttttttgtttttttgtttttttttgggcatgtgttaacatatgtgttgcaatctacagccttgagaatccacgcagtagatgtacaagtacgaaactcattcatgatgatgaacatgatattgataggtcttatccattaaattctatcagcttttgtgttctacttgattcttgtagatagactgtagaattaatgtaggtattcacgagtatacaagttgaatagttattcttgtaaacagaagaaaagctgattcgacttggaagttgaagatctcctagtatatggaatgctcactcgatgagatgtatcagaaagatcttcatcatttcttcaattttgtaattattttttccaaatgcttatgtaaattttaatatgtctatttcaaatttatgttgtaatgtttgccccaaaaaaatggtcatgaatgaaaaattacagttggataattggatttatcatctggctaattgatccttaacaaaaaaaaaattgaaatcatttatacataatttaatctaaatataaaatagagaaaaccaactaaaaactctaaccaaagacctagttattgacctgcatatgtcaagtcatgcttagtcgtcttgtctttgaggaagattcaacgaaaccgtcgaatgggttatgtctcacgtacgaaaattaatgttttcatattggatatttgaaatttgttttccaaggaagaagaaagttcgtcgaccttatcatatcatcattcactcattgcaaaagaagtttggaaattagtgtatagaagtaatcaaatcaaatagaaatttcacaaagtactagctaaagttgagaaaaacatgagaagatgaggaaagaaaaaaaaggcaaagcattgactcctagaaaggctaaatgtctttctctttttcctttttttcattgttgtggacctcattattacctccttgtgcaagaaggtgttgttttgaatagagcctatgttttggatgcttatgagttatgtctatagccattggtcaaatttgtttagaaatgatgatagttcaatcgataatttgaatgaatctaatcgattaaaatttatttttttgttgaccactggattaacatgatggatgatataagtcctaaaatgaaaaataataataaaaattctgaatattgtaagtatggggtaaattgatctctaatattgtaatgtgtttttaattccataacttaagggaactaattagtatacttttattcatatcatagtccaacaaatccaaagaatctatatggtccaagaaataggactaaactaaagatcgatgagtcaatttgagacacatcatattgaaaacatttggcaatagacatatcaaataagtttttcgcaagaccttctttttattaactatcaattgatttttcagattgaagttttttttaaaaaacatttttattattcatatcaaaggaaaacaacactcaaacgaatatttattgaaaagaagttccattctatacaaaattgatggacattatcttcaaaatgttgatggagaaaagttttacacactacaaaatatgagactcaatcaaaatttatagtcacaatgtatctttagttactttctttaatccgtgttagttgtttatgagatggtaatcttcaaatatgtagcttgatatagatatgctttaatgataatcttcaaacatgtgcctaaaactttttgttcttgatcaatccatggtacccaaagaaaaaaatgtaccatgtaaatgaatattttatatgttctagcttggatttgtaaacgtataattttgcatagctgcatgtaataataaggtatctgaagaaagtgcttcatgaaaacaacaaattatatatgcatgcagtaaagaatcctcgaatattcggttacagtttcgttttaatgttttatccaattgatgatgtgcattataaatctataacatcttccaatgtgtttttaatttttctctttttttaaacctttttctttatctttttttcttcttctccttttatcttttatcttttttcttttatgatcttttggtccacttttcttggcatgccctactaaagcccacgtggtaagaaccaacgacaatcatcaagcctatgcaacaaaaaaaaacaaagggaatcattttgatccataatttattttaatattgtcttaactaaaccatttgaaattttaaaatatgctagacatttcattaaccaaaatgtatcatgaagaacgacctcttgtcttgcaactaactttaattattgatacgaaacgatgtaaatgaggaaaatcatgtgtcttcttcgtgaaccattttcttatctctctcgaccaaactcttattacatcagcaaacaataattgatttagtgagttcctttgaattataccattctttcttgctttactattttcaattaatctacagatttatcttttactcttttaacccctgtccgactatacaaattaactatgttataaacgaatgaatcttcaaaatgtagaattagcagtggaacttcgtaaatcgaatgactaggtctactaaaccaccactatttagtttatttagttcaattatttcaatttaaaaacttcaatgcactttggaatacaaagaaagctgcttacacgctaaattaacggaatatgataaactttttatttttgtaaagtgaaaaaggttgtctacaaaaaaaaaaaaaaatccaggcaatattttattgtaagaaaaaggataaagagtatgagatttatgagcgtgttgaaagctttaagttacttttctatgagatttatctataaatccattagtttcctcgaactcgaatgtaactttcctagaaaagaaagttggacttccaaactaacatgtatgatgatcatcatcatgatgatgcatgaagcaccccgtatcatgatcacaaaattctcaaacacatgttcatgcatgtattattagttaactaatattgaatgggatgtcgcatcaaacgcacatgcacaataaaaacatgaatacgacgactatattgatgttaatataaatttcttattaatgcctaaattttctacaagaaataaagaaataaattttggctttacgttaccataaaagagtaaaaggaaataaatggtaatgtgtgcattgatgtcatgggttggcattcactatatgttgacttacctatcgaattcgttatcatataaactaaacttctttttttgaccaaaacaatgctaatttcatttgattttcacctgtagctgaacagtaactagataaagagcattaatagtatatagtaccaaatatacttaccctctatggatttcaaatgtaggtacgtatatggcttaactaaatctagaaataaatcaatagatttttagttcaatataatcggcttaatatatgctaatcaataagaactgaaaactaacgagattttgtcttttactttagcaacaacacgcttaaaatagtttcatatccattattattaggttgttgctttatttcttaatttgttttctcgaataggcaatggttcgactcatatatcctccaccgttgatttcatatattaaaattcatatttttataaataataaattaatataaaagtacatgatgtactagtttatatgaactcaaatgtgtccaaaaacttaggaataatatattaaaacagtaacaacttacaagacgggagagggcatgaagcataggacaagagagaactcccatccaaccaactgtctcaaagtttcgtagacacacctaataaggacactatttttcaaaactatcaccaactcgaaaaagaacaaaaagaaaagaagaccgaaaatgtaattcgatctttaacattaaccggggaaaagaaagttgagtgctcataggttttctatgtaatttatggtaaagttgtagtatatgttaaaaccgaaatgaaaatgtgtgattggagacgatagaaatttccagtcaagtgagtggtgggaaagaagaaactacgtaagctaaatttattacaaggcaaaaaaagacgagaatggtagtagtagtagttatataaactagacatttattatgtactttttgactaagcatttatggacattcaccattgcgcttttaattttaataggtatccgtattgtcattatttggtaaaattaatactctgcaactcttctaggccaaaaacaagtctgcacatagtagtacatagacacacacaagacacaacaattgtttgtatactagtagtaaataaaaagcttgattgtttatagtaaaatacattcgattgactaattcgtgattaatgcagagaaaccaaaaataattgcttactaattctaatgctctgtctctgaataatgtagtaaagtactctaatatacaatgttatacaacgttggtggcttagttcggtgtattggacgaattagttgggattttatactcgaatgtcaacattcacttagagggaaccgatggttctaaatttataaggccccaaattccttttttctacaatcaatctaactaaacgttttatatttattcccaattaaattagacaagaagaaaaattaaaatattaaaatctctttgtaggatatatttgcatgtttaactcaagtatatccagctagataatcaaaactgaaaccgtcgtagtagtagcagaatcccaagacgaaaaatacgaaaacaccccaaagattatggcttatttacatctctaccacattccaatttctccgccgccgcttcacataacaacacaagcattcggattctcatcgctaaaaatctgcggcgcgtgggcctgaatcggatatccataaggcccacccgggtaatacccataaccgtaagctggctgagccgccatgtactccatcatattcactccctcaccaccgcctttgttaccggttttctctttcccaccaccgtctccgccgccacctttcttcttctcgccattttcgttaccattctctttatctttctctttcttcggcggcacaatctccaccgcacgtttgagcttctcactcaaaatctcaacgagctttttaacatccattgttcctttaaccgtcagcaaattcttctctttgtccattgttaaaccattaacacctgcgtttcacaaaaccgctgttagcaaacgccgcgttttgataacgcgaatcgtacagatttttgtctctaacctttggtttttgtgacagtcttttggattttcccgatacaaccttgacaatggaagttcagcttcaacaccgccgttgttaccggagtctataaacattacaaaaatgtcagaaacaaaaaaacatgctctcattatactaatcagcaaaacaaaaacatttttgagaatcagattcttcagagataaaaacaatatagtaaaaagcaaatgagattacctctttgggttttttgtcattgttgtctggtttcttcttctcctctgatttttttttgtcttcatcgtttttgtttttgttctctttctctttttccttttttggttgaggagaaaccaaatcgactttcttctttgtcttctcttcaagtttctcccttaacttcaccggatctaatgctccggtcaccgtaagtttccctgtagccgactccgatttcacagtctcaacacctaaaagacacatttttggttaaaaccaacttaacaaagtagcgatttttcgagaaatccagttacagattccgtggaataaggattttacaacgttctgaataagaaaaatcgaaactttttttggttaacaatgaaaaaaaatcaaaccttggaaagatcgaacacatttgacgattcgagaagcacaaccttcacaatgcatgtcgaccttcaaaacgacggtgatggaaggcgtttcgttcttcttcttgttatctcctcctttcttcttgttatctccttcgttcttcttctgctcagaaacaaaacagagtgagcaaacgaaacccattattatgatccaaataataaaaagctgagatttttatggataaaaacgagagagaagattcgagaatgtagagagaaagagagcgtttttgactcggtagtacctcgcccatgatgaatcggttagtgagagagtagtgggagaaggaaggaagtgggtagagacagagtcggaggaaatgggagagaaagatgaaacctttcgtttgtatttatagtctttaacgaaaatcattattttttggagtcggttatgttttatcatgatgatgatgatgatggttataaatgaacaaaatgaccattccatcatgtatgtgtatgatgttatggttatacatgtaacgtttttattttattatgatgatgacttttcttctgttaatgcgaatgtacgtttgttcttttataagagtggaatggatttatcagtaaacaaactcttctttgtcataagtttttatctcgttctaaattggctacatattgtgatttttaaaaaaattccagacccagctagattttggggtttcggtatttgagacgtaacattttgatgtattgaaatttgaagttcaaatgcctacctatgttgttgcgtatacaaaattgaaaagacttgcattcaaattaaccaatgcactcggtttttgaaaagtgatactacgggcctagataagcccaaattgaaaatagtttttttaaatgtaatcatttagtgggccgttttaaattatttgaacagagaaattagtttgagtatataggccaatggtattggtatctctgtctcttcactatcgaactttatttttttctcgcagatctcttattgtgctcggtccattgtattaatgtctgatattttgaacaattaacaattgtcctatattttcaacgagtccatacgtagataatctttggattgatgcagataaagaaaaaaaaaataaacaaaaaatcaagttgatataatgtatcttgtttttatttttataatatatatatatataatttttatgattttaatttcgtctataattataaatgtcacctatgtattcaccgcaatgacaaccatcatttgggttacaatacttcacatccctgaattctgaagtataacaatgaaaatgacaccacgcacatgctctaatatgttcatcatcagattcaatatcatcgttctttccaagaatcatgtttggtggagtttgaggactcactacatagttataaagagtttttctttctgaattacttttctccacaatatctgatacacctattatatatatataaaaaatagatatcatataactaaatcaatatactattgaaaatacatgatatacaatctcttcaatttaatcgtgataaacaaacttacttgatgaaacaagaattaaaagagtgagaaacaaaaagattgttttcatttaattttatttgggaatttttcaatatatatattttagacagataaatataatgttttttttgctagttgttttaagttttgaatgagatttacggatgccaaatggtttcatatttatacatgttatatttatgttacaaaaaatgtaatggtcttttattaacgtttttctcttgtcttaacattagtaagaccattataaccactattaacgtttttggttataagaaaaatatctctcttgaatacatacaaaagtatattacctaaaataaccatgttccatggtcagaagataaattttttcaaatatgtattaaacatttttattccaaaggcttagtagatccaccaaaaccgaagccccttttgtgaaagtgactcatttcaagtgaggctcgtctttcatgtaacaaaaattttatatgataccagggttgctgtaatcagccgttaaactcaccgttttgatgagtctcctcttgttgtttcttttcatcaccatttctttactatctaccccaaaccattcttctcatttgcctctccattcacattacatgcttcaatgtctttcggttcctaagaataaatatgattcaaactagaattaatccattgacaacaatatacgtctagtttctatttatgaaaaaaacatggattgagaaccgagtactatagcatatagtgcttgctacaagatcttcactatttaccgcttgtggaggtatagataaattctgattagcatgtttatgacgacgcttcaaagtctataaactgatgatgtaataaataataatatatggaaactttatgtcatttaaaaaaaaacttgttcgaccaaaatcatataattgagaaagtgtcaacgaaatagttcaatgcatatttttatgttttcattaaatcaaagtgaaacatttttatctgtataaatttcagtatctcaattttcggaagatgtgtgtagttttctcctggtaaatctacatgattttggatatgatatgtctaaatcaatcgtaatttcgtaacttattgatcgatgaaaaagtagcatggtgaagttcataaagtggacatcataaaaaatttcgaaaccaagattctgggccttattgagcccagttggaggtgcccaatttttagtttccttgtacgtaggttttttgatggttgctatcagatttttagattcctcaaaatagtaattagaacacgctttcagatttttactgaaaaggttgttaatttggtttctttattttttagaatactgtttaggagaagttgcaatgtgaggggggcttaattggaaggagctacaacgacaaaaatgttgtggaatacaagataccattaacctatgtcttcttaaacaacgctgtggacataactcggtacattcctcaggaataaaatgacctctgtagctttgaaaatgcaaatatggtggatgttgaagcctcattccgtgattagaaaagggagcttttctctctgaatcatgttttgccataagatttgatacacctgttaaaaattaaaacaaattatagaacaatttaattaatatattattcgaaatatatgctagatatagtttttttttaatctcacttgatcgataataagcttacatgatgagataagaattacaagagtgaaaaacaaggaaagtgtcttcatttctattttttaaacgtttaaaaaaaatcgtaactaaattttgagtgtgaagttattgaagtcaaatactagctagtatcatatttatatgcatgttgttgttatatatatatatatatatgttaccaaaaaaaacaaaccaaatgctctttaacgtttttatttgtttaaaacaactaattaacccatagtttttttgttaagatttttaaaccatagttgttacaactagtaatcaattctgtcaaaaataatcaattagttatattattgttgatataaacacacatgaatattggactttttgtttccatgtttaatttaaaagtttttgtttcagcccaacaagtttggattgatttgtgtgtgttggtcatcttctcaatgtccgcagtccactgccagagtttttctatttattcagaaataattgtatccattaaaaataacttaaatatcattatattctcttatattaataagaatcttctcaaaaccatgggagatcgagagagggttacaaatttgacgaaaatgataatttctaagtaaaagtgattatacaaagtgtgtactaatcaaaatgtacaactaaaacagaagataaaactaaagtaaaccaacactgataatctctaatactgtagactgcattaagtgatcacaatcactgatgctaatcataactgctagactctaatattctttccaacaacaaaagaatatggctttcttcttcttttttcctgtttcttttaataccccatatatatatatatatatatatatatatatatatgtgaaattaaaaaccaacaaacgtctctcttgaatacatatataattcaaaagatcatatccgcataccatgatggcatgatcatacatgtaaaaaatatgtgaaaattttttctttctattaaattatagatgatgcaccaaaattgaagcctttttgtgaaagataggctcgtctttcatgtaatacaaaaatgtatgcaaatacatatgattatatatatatatatatatatatatatgttttagttatgcctaggaggatgatgaccagggttgctataatcggcagttaaactctccgtcttggtgagtctcttcttgttttttcttttcttcaccatttctttactctctatttctaaaccattcttctcatttgcctccaccttcacatttacatgcttcaacgtctttcggttttcaattacatcttcagcatgctaagaataaaatgatgtaagtcaattttaattgatcaaaaccaatatgtctaacttatacttatttcgtaaacaaaaaaaaaatggattgagaattgagtaccatagtacgtagttaccaataccttcttggcaatttgggtaccattgcttgctccaagaccttcactatttttcatttgtggagctatatagaaattttgataagcgtgataaaacttatttacatacatacgtacgttttatacatagtaattaatttatctacacggttatgtagtagatatataccttggctattaaagtttgcattggagactttagcatgcacctgcaaaacggaaaatactaaaagatagcaaataacccttatggacaccatctcgccttccttttttctccttggcttgatgtacgtatatgaacagaaaagagtaaacttgtgtgttttatatgatggagaagatggtgggaggttatatagagcaacaaaaagtccaagaagaacaaaaagagctcaaggtcaaagctagtattccgataacctttactatctttctttttcttttaaaaacttacattatagtttatcgtaatatataagaaataaatcaaagtggaaaatgcgtttaactgttttgaatgttgatcgtgcttggggattgtctaaaaagagacaaaattaacaggtgctaagtccaatgttgttcaaagctttggttttggcattcttcttgtatatcatgtgttttgaattatatattgtcattaaattttccagatgataataaaaaaataatacttacttatttttttttttttttgataaaatggcgtctaaattttattgtaataatatatacatattattttgtgattaatatgattaatatgattaaatatggtatagaacatattatgagtttagaatacaatgtgcaatttaaaatgcttccttcgtttttctaacatactgtaacatgttttaggaaatagatacgataatagtattatatatgtagacatatatcacacatgttttttgttttttttggtagtttgcatgtatcacacatataacttataaagatatacttacacaatcgtcttccaattaaaaaaaaaaagaaaaaaaaagagaggctgttactaaaacctagaaagtgggtattacaacgtaattagtcaaagtgtcgagtgtcgacgtagttttcaatttgctagcagacaggattggtttttgtaccaaaccgaagacattagagaagtttttggtttcgaatattaatcctacaaaccaaatgtgaagtgaagatgtttaaaaggattattgatagaaatcggttggattgtgaaatgaataatgggaattggaaattacataactttattctgttatgcaattgcaatatttacaatttcggtatgagttaaaagaccggaaaagaaaattaaaccagcaccggccaacaaatgtagaagaccgacagtggctcttgtttttaacgcagtcgttttcgggatactaaaaaacctcatgtggatgtaaagaatgagattttaattcatactataaaaagaagtaaacttcaaaatatgggttttactttccaaggacatcttcacgtgatgctttttctatatgctctctaaaataagtacatcttaattataagttataactcttttcttttttttgttaaacatctttataagttataagttataactaataaaatattccaactttttttcttactacaacatattcctcaaaacgacacataaatgaactactttttgtaataacacctgtaatgaggacgaaccaactagttcactgttatatggtattcttgattaccttagaaattccagcaataatacatataagacgtttgtttgacaaaaacaaaaacacaaaaaccaaaaaccaaaaacaaaaacaaggtgtgtattatagcaacgatacgccataatcaaattgtagcatacatcacttaaactacatgcaagaactagtaagaaaagggaagcaagtgtgcagattaaacaaacatatgttcatatttgctaaaagagcttcttttggtagcgactggcattctggcaagttcggagcatgacatttgaatcttgggtttcccaagcaaattggtaataccgacgtctttaacgttcttctttagcaaattagtttctcgttggtttttccaaaactcaataacttttatttttccttttgctcatcactcattcatgaatcatgatcatagtagaatataatctcggttataaacttataaccaattggttcttatctacgtttttaatatgcattcgcatagatcatatacataaccgacgctcagtcagaatataatgaaacaagtttgttttctaaacaagaagtagacctatcatcgtcacttctgatataaagaaatagataattttttactggatgcagcaacggttgataaaatatattactttatgcaaatcaaagtcccacttacttaatcatataaacgagaaacaaataagggtacaactaaagcaacaaaatcctatcgtactcttttaagccatactcatatcagtcacactattccacttgaatatagaacaatgtttttgtcaacctgcactgttactcctccccaacatttaccattttaccacggtcctttacttattctccggtagaaaaatcactcgaatcaagcccatttaggttcggcccattagcgtgaatcagcggcatttttgtacttttacattaaatatatattttggattgattccataaataaagtcaaaaagtcttttttgacgcaaatttaaaaaaacaaatagaaaattgttcctctcaaataaaaaagagaaagagatccaccggaaaatatggcggagatgtcttaccttcagatcgacgatgctaacgatgccgttttcaaccattaccgccaccaacggcggctacatgatcacctgagagatcaatcgttttctcagatcctatatccgcttcctcactggatccaatcagacgacggcgatctctacatctctgaaaccgatttttcttccggcgacgtttcggtgtccgatctagtattcacgaccgacgacggtctcgatcttctcgatcggcgtagctttgttatggatctgttccaccaacgcgttgagcaatctcaggtaactccgcttgataatgacggaatcgatgatttcgaaaattacgagatgcgtgaggataatgtggaacttgattttggattggagatggaatctggtaacggtttcgttgatagtgatcttgttgttaaccttaatgaacacgttgatgggatgaggttattagggattgagtcaggcgatgttatagttacagtggaatcgtgttttgattctgatgatgaagatgatcaagagaaggaagagagtgagatttggggaatagatttgaatgaagaagatgagtatgtgaatgatgatgatgataatgatgatgaagaagaagatgctagtgtgacaatccctctttgttgggattcacttcaattagaagatttaggaataaacaatgaggattgcgagtgggaagaagttgatagtgatgatgagagggaggttttgagtgttttagcagaagctgatgataacaattctgtatcagtctctgtcgcagctacaatatctttggaagatttagcgataagtgagagaaggggaagtagtaatctagggtgggaagttctgttgaattctcgtagtctcgagtttaatctagatgatgcagaaagcaacttggagttatacattggtgatattgatcatgaagaagaagattatgaagattatcttcatacaacagagtatgagatgttgtttgaagctgagatttcatctggtattggtaagcctccagcatctaaatcattcataaagaatctgaaagtgtctcctttgagcaatgaggatgttatggagaacgatgatgatgcggtgtgttgtgcggtttgcaaggaagagatgattgtaggaaaggaggttgcagagttgccttgtagacataagtaccatagtgaatgtattgttccatggcttgggattagaaatacgtgtcctgtttgtcgttttgagttgccttcagattgaagacttaagcagggcctttgaagaccctgaatattagggtttatgagacgaagaagatgatgactgacttgtgtaattaataggataacttgacttgtgtgtagagtttgagccagtaaaaaatatttacatatgttgtatgaacaaaattatgatttgtttttccctcttatactgaatctcttacaaaatttgttacattttttcatatattcttatgttcaacttgtatttcaagccaaactttattgggatgattattggagagactaacaaaaaaaaatactattaaactatatacgacacgtaatttttcagtagatcataatctttattttagaatatttggtgttatgtcatttaatcacccagagattcttttgctgtaagtgtgatatgagtaatgaagaaatgagatggatagagcctcaatgggttcaggttggttcagacgaaactttgcagaaaagagacatattctccgtttctggaaacaagacatttcctctccgtaacatttaatcaccattttggttagctctttcaaagctgttaaacatcattatctctcttaatggtgtttggttcctgcattaattagccttgaaattcaagattattccctaatctcagtctggaaacaacgcattgatgtttcttttgactttattgcagtaggttgtatttgctatcggcgttattttcttcttatatgattaagatccaattaccaaaaaggaatcaagataacaactttacgcaattagcattgtctttgtccaactaggtacaaaagtttgattaacttaacgctaatggaacatcatcttgaatcgtttcacattttctttttatctacttttaaaagaaattttacaattcctaggattttctaaattgacgaatagacttggaacagtaacattgtgagtgaaaatagtgaaaatagcaaaaaaacgtgcaagatagcatacaccgacctatttcgctacgaagtccttctcatgacacaaacattattgtattacacacgaagtagcatacgttggattcgcacataatcgaaagaaaaaaaaaaaatcaaaacgtaaaaggtgtttctaggattttaatggaatcaaaacaaacaaaatgagatgaaaaaataagaaaaaattattaagaatttagttgtatatatctaatacattcatctccttttttttttttttttttggctcaacttcaaatactcattcatctcctttttaagaatttcaaatgattaaaacaaattttcatatttttgatcgatcaagttaaatgtgactcatgaaaaagaaaataaaatttgaaaaaggacatgaaaatttgtaaacaaagaaaataacaggacatgaaaaagaggctatcgtgagaaaaagataggactaaccttgacaaagatgtaaataagtgagattttgtcaaaaagtatcactagatagtttaattagtgggaagttttaattgctaagcaaaaaatgtaaatacatttgtcttcatgcaagtaaattttgtgtcattatatagcattcataaaccttaagtatgagcctacacaaatcttttatctcttctctcattctctatcttcctcattctctcttgctctagttctatcactctccctatgaccctatcctctcgatctcttacttttgacgtttctgattcctgcatcacagagaattcagtttgatgattagacatctaaaaccctacatggagtcgtctagtgtccatcgctctcattgtttcgatattcttgatggagtcccactacacgacgatcatttcaactcggcattcctaccaaacactgactttaatgttcatttgcagtcaaacgtatcgacccgcatcaacaatcagtctcacttagacccaaatgcagaaaacattttccataacgaaggtcttgctccagaagaaagaagagcaagaagaatggtctctaaccgggaatctgcaaggaggtcacgtatgcgcaaaaagaagcagatcgaagagctgcaacaacaagttgaacaactcatgatgttgaatcatcacttgtctgagaaagtcatcaacttgttggaaagcaaccatcagatcctacaagagaactcacagctgaaagagaaagtctcttcctttcacttgctcatggcagatgtgctattacccatgagaaatgcagagagcaacatcaatgaccgcaatgtgaattatctaagaggagaaccatcaaaccgtcccaccaacagtccctttggtaagtaaaaaaaaaaactttcatcttccactcttctagttcttggtgtgttaacttaagccagtagtactatgattgatgccatgtatgcgactagtgactactacagtagcaattacttacttgcatttgtatgtagatactagataacaacaatgttaacaccgagattgtgtatcacattattggtctaaagaagcaaattaactgaagtaaagggttccattcaaacattgttaacaccgaaaacagaacaaagaaaaagaaactaaatgggaaaatctggtttctcgccaacatcacaagtatcctctaagacagtacctccattggagatttcaccatttggtatctctgcagaagctgaatctatgacctcttcttgttcttcttctacttctcctacttcatctacttcttcttcaacctcttctacctcttccatttcttctacttctcctacttcttcttcttcaacaatgcattgtggcgggtctacaaacgaagcatccgggtctgcataccaacgtgcacaaggcaacctaaaagcaatatccaaaaaccaagataaacagtattatcaaaaatacaaaaacttatgacaaaacctctgtttctaacacctatctgattacttacacgcttgaaaaaatggtttcaccatcaattgttgttgtctcctcatattcatccactgaaacaaacaacaaaaccacagccaaaaagattaattttttatgaaaattcaacctcaagaacaacaattcgagacaaattgaaagtaaccttcagagaagtgcttatccatgagatactttctaaaatcagcttcgtagcttcgatacttctcagcatactcttcgctatccagatatctaacaatgaaattggtatttgtgaacattcaaatttaggttcttcaactgcaccacaaagcctaaaaaatttcaaaattcatgaaagcaaaattacttgtaaaaagatgggtcttcatcaaccaattgatctgttaaaattccgttgctattcacaatatccatcatctgcaacacaatcggagttttatagatcgtgtaaattactcagtgaaagagcagagagagcggagagagtaccgtaatttttggcggcggcggagagggaggagcgggggaaaagagttcagcgttgcctggcttctcctgtggtggtgaatgctccacctgcggaggcggaatcgccggagatgtagtacactcggtcgtcgtcatacgttttcagttttttttttctttttgaaaactcaatctattattgactctgactatatgattgtactatctttggttttttttttctttcaactttttatattagaatcaatttatgaagactaggtttttgtctttttatatatttctatattaaattcatttttgtatttttgaaaaattataaatttatataaaaaaattaggtaatttccccttcatatacagtcaatctcatgaaccagaagtcatgagtcctcaaacattgaggttggaccttagaaggctttttgagtacgggccttctaatttgatatggaaaaaaatcaaagctcttttttttttctgataggaatgtgaatttcattagaatgaagtgttggggttttgcaaaatgttgaacctaagtctgtaaactttgctaaaaaaagaaggtaaaaaacaaagattacaaaaacagagttaaagcttttctctcgttcatttgttatcatcgttaaaggaaaataaggcgctcttataacctaagacccacccaaaatacgactcccgtaagttcaaatagtcaataaaaccatgatagttagcgtttgctgttgttgcattgcataaatatgtgatcgattcatcgatatatttgaatttgagtgaataggtttacaaatcttactaaactttatacatcagaaggcccgtactcaaaaagtcattcaataaattaaaatagggcataaaaacatgataatctagtaaaattcatatggcgtgatgatttttttgtttttctaatcaaaaagatgatgattatgtttccataaaatcatattattgtaagatatgtaccgcctggtactcctatatatgttaactagattttaacccgcggtataccgcggtatgatttatttttttaaaataatatatattaaaacttgcaaattttatttttataaaatatttatattttacagtttataattgttattaaggaacgctataccacgaatccatgagaaaattgttaaaaaacctgaagttttaacccctataaaaacagcatattaatagtattttaaaattttataaatattaattcaaatacatctaccatataacccaattccaaaataaaacccgttctgtaattctttacccgtcctgtgattttttttttaagtagtaatttttaaaatttaagaattatttattatatataaaagtttttcaaatttgtatcattctctaatatatttatattttatagtttaattttatatatagtaacattatacataccacataacatttttggttttatataattttttctaaattaggatgatttgataggtttaatattagtgatcttaaaaaataataaattaaagatttaacccgtattgaaacggtggattaattatattttacttttttattaatgttgattcaaaaacccgtccctccaaatccgttttgccaaaaagtcatttattttattaatatgaatttaatttatgatatgactctgaattataatctaaatattttagctaataacataggagtgcaccatatttatttaataggggaatgtactatatgacccgaatgcacttttacccaaatccaccaaaaaagtcttgcaaaaatactatagagataaaaaacgatagtcggttttgataggtataagattagcaaatatattagctagcttaaattagttaaagaatacaaattgaaaaggtatattacactttattcgaatatagtatcaaaaattatataacacaaagatttgataaatttttcaattgttgaatattttttttttgtgctaatttttatgtgattaagatttaattgatttcgtatataaaatattaaattgttttacgaacttatttgtttataatttggtagcaggcagatatttgaatactcagtatattttgcttcagtttaagaaatctttgatgatccgtctttagatccaataaaccctataattaagagatgaatattatcgttaaatgattttggtaaccttaatgacgtcattaaaagattttgtttttgattaaatttttctaatggcattgtcatgtaattaattataaaaattaaggttacatttaaaatgtactttccaaataatatagtaggatcgttgaacacgacaaaaagataaattggtacatcaaaagaaagcattcaatatcacaaattatttggtacgcacaaataagatcttttagacaatgaattgatgatctatcgagatcatcatctgcaactatctgcgatattttcaatataaatcacatttctacacaaaacacatcgacctttcatatctctatcaaaatcaaaacatctcacgatctgtttgttatccagccgtatgtgtgtgtatttgtatgtatgtgagtatgcgtgtgttttgtacaataaatggaagtatgatagacgagagctgtgagatgttgatgggagatgggcctagtgggcccaatgatcacgtgacagaggtgatgatgatataacggtctaggacccatgggccttaagaagactttgctatctcaaccgaccaccgacgactgaaccttgagcattgatggtgacctttccacttaactcactgacatggctcgtcgttttagcaaacactcttcatatttgttaagagtatagtatctctgcccaaaaatagtatgttactgctcttactatttttatatattctttttatttttattttattatagctctaaatgctaaacaaatcactcataaaatttttctagatagatgctcgtatcacacattttggaatttattatatagataggatgaaaaagtgggtctatatatacatgtatttgacggtatggtccgtatggattgtgaaataaccagcagctcctagtcctagctaaggacacctgtatgtgtgcacctatgtacagatggcgtcaacattccttttcatttttattttttttcgtcaacattccttttaatttctattgattttatatgttttaatgtactgaattatttgctaaatcgaatgaatttggttcttggcaattattttaaaaattagcagaaattttggtctttttcataacaaatatcatgttattatatttgctatcgtcatatgctttaagtcatgcaacaaatatttaaacaataatattatttgtatgtgaaatttacgtggagccaaatgtgttgatattcaatttcgaaatcaagcgaactagtgaatgtaaataattaaattaattagatttgtcaaacattcgacatgagaaaatacttagatgcgtgtgtgcagtcaccgaatcttactgtgcacatacatattgtggctaactggctatgaattggtatagtatatgcttaacatcgtccacgaacagataaagtaaaacatctaaatttcgcgtgagtataatatatattgaattcaataataatgttttgtgataattatagccacgtcgtgacgaagcgcatgtgtgatgatgaaagaacaaggttttgcatgaacattagagaatatttaatatacaagacgtttatatattttacgatcactaatttttttttcattaattgaataattcattactgttgtatattactgatacaatacaaattcacaaccaatatatacttcattgctactgctattgctactcatcactgtctttgataattacaacacaaaacaaacactatcatatgtaaatcactgctaattctcatcactgtcatgcatttgtgacatatgagcgatgagcattgtattttatgtctccgagtcactattatcgtgttttcagtttacactttgcacccgacatttgcttacccactctagtggtcctatttgctatttccactaaaatacgggtcaatttcataatttctgaaaatatacggacaccatccaatatgaactatgaaaccatggatatctcaagtgaaggtacattcaaaattaatgcgaacgctgattatgaatttcagttcacattttctacaaaatgtaaaatctgtaagaaataaaaattataataaaggtacggcattttggtttaaactaaggttataaatcatcaactacaactatgaatcatatcagttaccactattcgaaaatccataaaactatggactatagatctaacagttttggaatgtacaaaaaatagatgagattacttaaatttgacaaccggacaaataattgcgattacaagtaccatatttgtacacatacactacattctcataccaaatagttttatcattcttaagagtatacggtgacgtggcacaagaggaaccactgaaacaggccacaaagctctttgaatcagcagataaagcggggtggccgacaagtcgacaatccaatttatgtggacatcaaactcttacgtttcttcatcctccacgtgccctcttatccttatcaaccgcccagattcttcccaatacaaccaaaatattggcccactattattagggtttaatatgttatatgcgtttacaaaatttctttgtgaaattgacgtattaattaaagattagactttcaggaattagctataagaaactcaacggagtataatctatttggggaagaaaacaagattaatatagttatgttttgaacgaaccccttttacaaaaaaatgttttgaacgaataactttgacgaaggactgttataccactatgacaattgttaaaatcactatttaacattgaaatatttatatatctaaaagtgatataactaatagaataatagttattcaaagatgactgtaattatgcggcaatgggcaactatatttcactgttcaaaccttaaacatacaacaaatgttagacgatataacttaggtgttgttttttccttgtagatgaagcaacggattttactaccttttgacattgcttccattatatttccaacacaaaaagtatctgaaaacaatgcaagtgatttcatcaaagctctacgcgtaacttcaaattccaaaagaagcttctcgcgaaaatacctatttatgttatgtttcactttcacacgcaaagtaaaattcgatatttaaattaagtacgaaaactttagtacatcagaaatgattctagcatgttcaagcaacgtagttcaatggttatatcctgtggagtgtggactatgtcttatcagtttcttagactcagtacgaggataatatctaaagattatatatgatatagacgtaatcactagtcaacccatttcaaaacatttcatatgatatgagattttaaaactggtaggttgtagacttctaattcatttctatatagttatagaatatgattcattgttttgcatactagacaaaaattgttattcttttaaatattctgctggaaaataaaggattcaaatcatattttcagttacattatctcattttatttgcaacaagagattaacctcttacacgaaataatttgttgtccacaataaaaatttgattgtttaagaaacaatttgatatgtatcatttttctttttttttatgtatcataagaaaccagaaaactacttaacatttttaagaaggaagttacagttcaaaaattattgcaattttgaaactatagggatttaaattcgacgtgatttttttttttggacataaaaattcgacgtgaaataaaagatgtatatacactcttttttttatcaatcattggacgtttgatgcgactcctttggcataaatatatatacaaccgaaatataacaaatcacttcaatgcccaaagatattaataaataataattccatggggccaatttttggactcgaagctaacttctgaatacagccacactatgggattgtaaaatgcaaaatatcacaggggtataatcgtagttccaagataaactgcctgttcagacatatgaaagatatgctttgtcagagtttcagaacaagtctttcccatgctcaccacttcacctctctctctctttcttctccactgtaacctcccaattcaaaaacaattataaaccaaacttgattaatatatatttctttatcatcatctcttcgaaatgcaagatattcatgatttctccatgaacggagttggtggtgggggaggaggaggagggaggtttttcggtggaggaatcggcggcggaggaggtggtgatcgaaggatgagagctcatcagaacaatatacttaaccatcatcaatctctcaagtgtcctcgttgtaattctcttaacacaaagttctgttactacaacaattacaatctttctcagcctcgtcacttttgcaagaactgtcgtcgttactggactaaaggtggtgttctccgtaacgttcccgtcggaggtggttgccggaaagctaaacgttcgaaaacaaaacaggttccgtcgtcgtcatcagccgacaaaccaacgacgacgcaagatgatcatcacgtggaggagaaatcgagtacaggatctcactctagcagcgagagctcttctctcaccgcttctaactctaccaccgtcgccgccgtctccgtcaccgcggcggcggaagttgcttcgtcggttattccaggttttgatatgcctaatatgaaaatttacggtaacgggatcgagtggtcgacgttacttggacaaggctcatcggccggtggtgttttctcggagatcggtggttttccggcggtttcagctattgaaactacaccgtttggattcgggggtaaattcgtaaatcaagatgatcatctgaagttagaaggtgaaactgtacagcagcaacagtttggagatcgaacggctcaggttgagtttcaaggaagatcttcggatccgaatatgggatttgaaccgttggattggggaagtggcggtggagatcaaacactgtttgatttaaccagtaccgttgatcatgcatactggagtcaaagtcaatggacgtcgtctgaccaagatcagagtggtctctaccttccttgattctgatcatagcttcttcttcttaacccaaaaatatatattttatacacataaggtaaagttcgatgaagtggtttttttaatttttatttgatgggtttaaaacgggatttattatataattatatgactgcttgtaaatttttttcccaaatatcaaatttacctctctttttttttagtttttggaatatcccaagagtgcaaatttatgtggcatggttttagtttggcttcggttcagttttggaactggccgttttacttatcgttgtatcatatttgataagattttaattttctgggatttttttttggttttcattgatgtatctaataaatttatatatatattgattgggcatacaaaaacctcttgtcttcatgcttcttagattatgcgtttttcttttgatttaatcctttgttaatgtgtttctgtacgtatgactcattagtcatttagtagttatgaacaggttcagtgtagctaagctccgccgtgttagcacttaaataaacaatagtaaaatcaatttcttatgataccttaactatcttcggaaacatatgataatatcgaatataaacaactatttattccacatcaaaagcatgcactaggcgatttaaaactaatgatatactattatagcattagttaatttgtattaacgataaattaagataactcgaaagagtaatcttaggtttgttgatgataggcttgagatatgttagtggcgaattagaaaagattcagagggaattgtacggaaaacgagagagccgtgccgtcgcgtaaaaacagtgcaaagcaagaatagacgagcgatttgcgcagaggacccacgtgttagtgacgagtctcatgcgcgacatgtattccacgtggcttaagatgtgtcccacttcacgtgtcgtaacgtctatggctgacgtacttataatatcgaagtcggttcgtcgtttactctaacaccaatcgctcgtagacgatttcaaagatctatctagccgagagagaacgagtacggattctctgattgtgggccgttggatcaaagaaaactcactgctcgtattggtcgttggattggattggtgacactaggaatcaatggtgatgatggagaggggtccagattaggtaggtggtggtcattgtagggaaaacacttgagaggggagtaggtccattaggacatgtgcataagttataaaatctcatacaaatcatacacgggaaagtttggttgggcggttgggagagtttgggattgtctgtgggttggtgtatgactccaccatgttcccctaatcatttttccttttattatttcatgatttcttacttgtattttctgttttttttttcatcgatcgactcaattgtttgacaaattagctagaagtagttcatggacatttttattcaaatgcgggtttagtcctatatctataatgatggccctaagagtgataggtttgaacgttttaatagattttttcgatagcaagactctttacacttcgccatttttaacattttttctttggctattttgtagaatcttctagaactcttaaaatcttgtaggatggtttagagattctaaagaagtgcggaagaattcaaatgatcattagcacttttcagattctcctaaatcataaatcataattaacttcgtatcaaacacatttactttcaaagatcctaatctaagccatgttgatggaaccattgtgatggtgcgacttggtttcatgcatgttatgatgtaatacgttctcgacacgtgaattatgtctgaatgaccactggtcaaagtgttttttatgttgaatatgcgtatagaatttggggaaaactgttgaaaaatggttccaccaacaaaacctatttttaatctcacattgaaagccatacgtatcaatggacgtcgatatctaaatctaagctccaaagagccgatccgaaaccaacacatggctgaagtgatcacctgctaagatagaaaagattagtgtaggaatctctttagtaaatgtcgaagttgaagattaagtcaccatcagttgacaatgaactcagagaactccaagtatcatgagacaatgacaattaatgaagaaattgaaacttgaaagttggaacggttgacgtcggtgggattaatgtcacatatgtgtaacatggcaatagaaaatactaaaacttaaaatgaatattgaaaagaaagtctcaattagtacgtatgtaaattgttcaattgtgcattatcaagtttacattagctgaaatgacaactaaatgaaatggtgatgcgatcgtagaaaagataagttatagacaaatttagagatttaacatttgcaaagaatcacttttaacatacaaattttgtattgtggattatcaaggtaacattataattgattagctcaaacttgtatttaggtatagtaggttgctgagctgggattacaatgaaacagctgtattgaaagacttggtaagtggtccattcttagtctttgaatcgaaggcatggttcgatcggaactcgtcctaaccgtatttcgcattactatttgtatgtaacagagtctaatctctcttaacttaacaacacaaatcccataaaaatggatagaactagcaaaataaaaatcaaagaattttactgaagttactgaactttatgattgtaatgatcaacagtatcgtctttacacaaaaaaatatatgaagaagatgatacacaacacatttcattacaccatctgatccatctccatcttcaagtataaactcattcttatttagtttacaactattttttgtcttttgggaatcttataaattatttcggggtaattaacgtcaataaaataacttacacctaccgatataagactaaggtgaaaaagtatacgttaagaaaagtgaaaaactttaacaaaagaaaaaattcaaatcagaatcactaacccggtaaaaatgtaaaaccgtttcccggacccaaataaggacctggataacaacccagacccgaaattaagtcggatccggatctccttgatttattttttaacatttttgtctttcccctggaaatttgaaactctctcttctttttttgttcttcttctcattggttgatcgatacgcgctaaatttctagaaatctcagatccataaaattttccgaggagagattctctaatcagagaacctcacaatggccgcatatagagccgacgacgagtacgattacctcttcaaagttgtgttaattggagactccggcgttggaaaatccaacctcctttctcgattcacgcgcaacgagttcagtctcgaatctaaatccacgatcggtgtagaattcgccactcgtagcatccatgtcgatgataagatcgtcaaagctcagatttgggataccgctggccaagaaaggtatatatatatatatatatatatatatatatgtatgcctcgatttcaattttgagaaattttcgttttcgattgaatctgaagaaacatacattgattcctgatacattagcttgattattgaatgatctacgtaatcgtgattgatttttggttttgaagatatcgagcaatcacaagtgcatattacagaggagctgtaggagcgttgcttgtgtacgatgtcacaagacatgtgacgtttgagaacgttgaaagatggttaaaggagcttcgagatcatacagatgccaatatcgtcatcatgttcgttgggaacaaagcggatctccgtcacctacgagctgtttcgactgaagacgctaaggctttcgctgagagagagaacactttcttcatggagacatcagctctcgaatcgatgaacgtcgagaatgctttcactgaagtactttctcagatttaccgtgtggttagccggaaagcgttggatataggagacgacccggctgctcttcccaaaggacagaccatcaatgtcggatcgaaagacgatgtctctgcggtgaaaaaggttggttgctgctcaaattgatggtacgttcgactttcaagaatcggtctcacggtcgatcttgttcatttcttttttgttgttatatgtgaagatcttgttcatttatttgtataatcacacaccttaaaccatattgaataccactgcgtttccatatcaaatgtatatcccaaacaacctttgagctgaaccataatgttctgcgtttctaaggaacggtaccgcctatccaagtgttacttaaggtgatcttgagactaaacacagagcatgagaagcaccaatggaaattgagataaccttgtgtggttgacactcatcttcttcggttaagaaattgacttcgaccggagtagtttggatctcagggagacctggaactcctagctggaaatctttagcgtttccccacatccagagttcacccccatctgtcaaaaaccaatcccatccttttggttttgtttgagttatttatcatgtcaaatgaacatatctatagctaaatatacctgttatcgctgcagaagaggaacctccactagcgatgaagactatctttttgtcagctaatgcttcgatttcagtaggaactttctggtttcgcagcgaggaactacccaactggccgtggccaccgtggccccatgagagtactttaccttcctctgttttcacatcaagcaattttcaagtcaacttagtagagaccgacaagaaaaattgttcagttgggagaagattgtttaccggttaaggcaagagaatgatatccaccgcacgcaatctgggtaatacgaaccccttctaaactgggaaccggcattggttcccaacctcccaagttatcaccgcgtccgagttcataattggaatttgctgatacaaaaagatccaatgaattcttttttacaccaccaaatgtaaaaacgaaggcttgaattgggttttacctccccagttccagagttgtccctcttttgtaagagccattgtgaaaaaaccaccacatgagacagaggctacaggaactgttaaagctttgacctttgaaggaacactaagcccaccaccttcgtttggtcctcggcctggcccgagtcctaatctaccatctccttcttctcttccccacatataaagctcccctaaaaccaaagaacaagtcttgctcgattaagacacagaccgaatactagtatatcaaacaattgaaacaaagaagaagaagaaccggtctatattttaagaaaaagagggtaactatagacatatgatcctcagtgacagcacagtggggatggtttgttggaaaacttcaattaagttcttttcaagttgtacatacatatgaaaacatgtctacaactacagaaatgtagcaagaagagaaagcatgtggaaacctgattcagtaatagcagcggtatgagttccactagtagcaatggcagagattttgcaatcccaagagtcgtcaacacgtcgaggaacgagttctctagtgtaaaccttatgaccaagcgctccaaaaccaccataacccctaacaacttcatttttaatttatggaaccatcacattatgcagaaccaaaagatcaaaacacaaatgcaaatctagctaacattgcatcaactagctcaaacagtatgattccaaactcaaatgaagactatagaagctagagcttttaccaagtgaatacatctccttgatgtgttaaagctactgaatgcaaaccaccaagagctatacatcgaatcgaatgttcctcaaaaagcggatttaaattggggacgaaaaccgaattctcttggccaaaccctaaccttcctccgtcacctttcccccaaatccatagatctccgtctatagttaaaccagaatggaacaagccgcaagagattccaattcgaaaactggaagaatctgcgtcgattcttccaggagtttgagcgagagagaaggattgatcagagcgaaagagaagattagcgactggagacggatacattcgaatctcctcgattccgccgccgagctgacctgacgcgccacgtccccacgagaagagctggagagtgacgggatcggagtcgatgtctgggcttgtgtagagaataggtaccttggtgttggctcctccgccgcttctttgagtggtccgggtggaggagaagcggcgtgtgaaactacgtaagcggtggcttaacgctgccattgttgtttcatcggagtttcatcactacagtctaccggtgggatttaagatgtgaggcttatcgaaacgacggtgtttttttaagtaagatggaataatagctctttggaccttatattattatcgtatttgtcaatagggcctatatgttattttatttattttagaccctctagttttaattgtaaaatctttcaagtaatcgggaaattaaagttgattgtaaaataagtttaagtttaacgactataataagttcttttctttttataatcgttaaatataatgccagatttactgcccaaaattgtgtaaaatatttaaatatgtatagtactaaattagttacaaggtgaagaaagagcagaaagttttagaagggaaactcaaaatctaacttgaaatttgaggtaattttagtattctattactttgaatattttgaaatttgcataagtttcaaaatttaaaagattcacctcttgttttatggaaaaagcaagagtagtgtatgttgaagctgtgatacttacttgtagtcacttctatcttttgagttttgatactaatttacactaatttttcttgacatacattcaaatttcagaacagatatatagatatgtgtaaccatcaagacatgaggatactgatgatttcatctgaattcgtgtcttatcaagattgtagattctatgtcctttaagagtgtttctttactctgaagtcagaaacagagtaaaacaaaagaattggataaacttgtaggatgttatctttttcagaatctacaacattggaaccctaaagcaactggcttttgtttcttgggagacaagtcatctgattcaggcatcttagcaggactccccatccactctactcctaatctgcattaattttcaatcccaaattgtacaaattatcagaaacatttatttccaaacaaaaaatgttataaactcttttgttgttattgaaactcacatgggaaatgcaaaagatccccttccttcatctgagtgactagacccgctagatttatcagaggcatcaatgtcttcttcttctttggttctctgcgacagtcaaagaccaatatataaataagaatgttaaattctcaaatactttgaagttgaaagatgttacgaagcattacttctgtaacatcactagagacatctttagttccttgacatgaagtgttatcgttctgatcttgttctgtccctttagtctccggcgagttattcttctctgttcctcctactccttggtctccatatataagctgttcttgaaaataaaagcattaagaactttgtagtttgctatgtttcaaactaaaaaggtcaaaactttttaaaacaattttgattttcggacaacgaaccttacgattcaccgtcctcggtgacttttccgaggacgattccgtctctttcttctcttgtttaccctctttaaccacatcgaaaccaccatcttcgcgatcgaagcagaagacaatgaatccagattcttctgagacagggggctgaggccagctcaagcgccggtgctgagaccccgacgtcgtcggagaaacgctactgcttcttagatgaagatgatgatgacgtgtacctggtgggcttaggctgagtttcctctct

SEQ ID NO: 938 - DNA, 61634 bp, Arabidopsis thaliana
gatctcttcttcttagtacttttaatcttcctcttaatccttttgaacgttagattattgttgttcgtagtgtttccattattattagctccatcttcatctccgtctgatacatataatcggtaaaataacttaacaatgattgaaaaaagtaatgaaattaggaagaagagaatagaagaagacctagaggaatcttgcaagccaagaaacaagaagcccaatctctgactctccaagtgacaagttttggtattgtccactgtgaagccatggctgttatgtttgtgtttctttgtcacgagaaatagcttttttttatgagtgtgagtgttttggctttttcaagaaatgttttcagaagggagataaagaatttattatgagggagaagaatgatttgaaatttgaaaaaaaaaatggagacaagaaatagattgccatgaattagggaaggggggttacaatgtgcaacacatgaatgcatttaatattattggaataaaaggaaataacatttttattctggaattgtaataattgggcagtaaatgctatcatagttattaaacactgctatatgaaattcaattttttttttcattttccattttcatctttcaatttactaattcaattttcgtgtgtcaagcagacggcatagccaatggaacgttggctagagacatggatgtcatttatggtggcaaaagagtttttgaaatgagtttttatttatttattattttaaatgaaaattataaccaaggaatcttcatgagcccatatatatatatatgaagcccattatcagattatctgattaaaagagtagtaagactaagatccacttgatgtacaccttttgcttgtgcctaatcgtcaacgatccgatagttgtcagtgtggtcaccaagtaagttgcaagcaattgagtcctaatatgtgcagctacaaggacattgaggtctaccctcgctacaaccctcaaaagttctgttttctatgtgtccatgcgatttgttagagatttatgattgggggcatgttaattgctaatacgttgtttcatgtttgataaattcaatatatttggttaaaacttaatcagaaaccgttatttgtttttgaattcaactctatataacatgaacttctccttcttttgaatatctttttttaacagaaaaaattcaccttcttcgttgcgtttgtttactagattgagcacatactcttcttctttttttctattccttttttgggggggggggggcaaaagaccacatatactcaacaacatgaaatgcatgggcgtataaaatagaagggtccactataaagcacatgattcacgaccaaacatgatttgttgtaaagtgtggctttgcataatcgagtactatatatacaccaaacactaaataagaaaatgtgttaaatctttcgcttcatttgtttaccattttatgctagctgccaaatatcatctaactacctccactctgtttcttttttggagtatcgcatacatacatattctataatttatagacatataagctgagacatgtgtcctcattaatttatggaatttcttaaaggtccctctttcataaaactacagttccttattagaaaagatgtaaagaaaatctttcaagagatctaattttatatgaatgatctgctggatggcctacgacagactcgtttttcgaatctcattatgtaaagagtctcctgtagtagtttactggtctggccttcttgagtgatgaaagactatcatctcatgtggctttaggatgatcaaattccatcaactacagattttcattgtttggtccatcttaaattacaatagatatctgattttctacaattttctgagctttgttggatttcgattcaaattctatgaaaatgacccaaatctttatataattcaaaatataaagtgattgtgaagatcatggccggtgggcataaaaacaaaaacgagcagaaattcatcaatgaaaactgaacataattttatgataacctggacggtacataaagttttatatcaaataaacctaaccaaactcgaataaacctcaatttatataaaatttaaatttagtttataaatgtatataattatgctaaaaatgtatttaatatttactaaaattaagtaattattcttatttttaatatctcttttagattaccggtgcatgggtcatatatactcatatgtgcgattgtggacctcgtggttgagtgtgaagagacgtgaaaaggaaaccatgtggccatgtgggggggggggggtcatacgaccacaataggcgtgtattacccacaccaaaaaaaaaaaaaaaattgctctaaaccccaaattatatggtgaaattaaagtttctgagtgaaaaaaaaaaaaaaaaagtttcggagtgagaaaggtggatatattttgttgcacagaaataaaaatagcgagaggagttttgagcaattgctctttctagaaaatagaattcttccgaaggaaaagtggtcaaacttgtatatataaagatataccttatatttattttattttgttcacaaaagatcgaccttgtttagattcagatattgatacataaaatgtgtagtgtccgtgcgacatgtctattagtggacttcttcgaattagctatggcctatggactatggagtatgttggtgtaactgtggatctctcttacattcttttcagaaatatgttcgtcgtgtcttattattagctgtctatctacaaaatattttgaatgtattcttgtttgttaaagaataaaaataaaaatataagctctaattgatatgcatatatttaattagttgtgtctcttctgataaccgatattgtagaccaccccttatgacacaataatgctgataaaatatttaaaaaataaaaataaaatattcgagaattattgtcatgcatccaatgattcaacaagattttatcatttaagctctaattgagtattcttgaaatagattacccaccaaattaaagtgagtgagaattacttcaagaataccacaagtggtggatcattgtgctgttatactttatatagccgaaaagtactagaacagaacaagatgatacattattgattaaatgggactcttgtgtagcaaagatgaatatccaaattcagattaatatttgaagtctacatattttcaatctctagcaaagatccatatgtcactgactactaaactaatattatacttgattactcttctttggtttataaaagttattattgagtatgctttctaaaagagttgttatgatatatttaataaatgatattttgtttaattacgcagtaaaagaaactgtaaaactttctattcttttgtcagaggaaaaatattagtgggtgcaaattgttagatagtggagttgaactcctcactttgaaggctttgcgggagaatctcaaacaactttgccacttaactgatttttctaaaaactttttttggttcaagaagatatgcttgtaagaactttacagtagagtttaacgtgttatctcactaattaaaatcaataaaatcacatgggaatactttttgccagtattttttgatcatttgttaataaactatataccaagttgtgatcttttgtgtgtgttggttttatcaatttcctaagaattataaatatgcactatatcttgtcagagcttatcttcgacaacaattttaggtttccaactgctcgattttacattcttgtgctttgcaatgggttgatttatcttattgcatcgggaatcagaaaggatccaacatgtaccacaaccacatgagatcttcacgtcagtccctcgtagtttacatacgtgcaataacttttttactaagaacttaaaatccaaaatataatatgttcgtatagcggatgttggaagacatatatattaattcatacacaaggtttttagacccttttaactttctatccttttttttttttttattacaattctacacatatagtttgatataaggacgaagacttttttttgataaaggatgtaaacttataactaaaggtgagcacaaacttgtgttttcatatatgtcgtcctgtttttaatttcaaacctcatcccatataaaattaatatccaacaaaaaatttgtatcacaaaaagcaaatttttgctaacaaaagaagagtttttgaattatcaaagaaaaaaagatttttgtatcaaaataaattcgtcttggatcacaacggtccggttcaccagtccaaataacttcaccattgtagaggatacttgatcccaaaagaagtgatatatattttaatttggtagacctttttttttgctaagatatttgaccccaaaaaaatgtatatcaccccaaaagacgtttctgtagacttataattattattagaccgcaatcattttttcttggtatatcaaatcctccagacatacatttatcagtgatcttacaatcacatttttttttgttaaatggtttttccttgtttaatagttaatcaatgatcatactagcttcccttaatcatactagctataaaattaaagatgaaaaaaggttgtgcctttaaaatcaaatcctccagacctatgctataaaatatccgatacattttaaaatataatgtcatagtcatggactcatagttcaaccttcactagtattaaaagtcagtaatattattttgaaagaatacaaatagcaatagtataatgatagtagcattaattattgattgaatgaatcaattattattttagctgaacaatttttgtgaacaccgtatctcctagaatcgataaaaacttttacccaaaatctcaatgttccttgatctcgcaagaaacaaactaaaacggacaagagcatcagaacagtgtcatcactcatcagtatatgcatttccgtgtgaccgcgaactctgacagatgctcaactgatccaatgacaacactgcacgtggcatttccccacagtgacttagtggcctgtgtatagaaagatttaaagaacgtgtaatcccaaccattcctccatcaaagatatatcgatcatttctttttgacagcaataatttttaatcattttatctgtctctctgttctttctctctcccgcagtccctctcgtaattttgctatataagagcacctctataatctgtgtgagacagaattataaaaaaaaaacattgatagttttgtatctaaactcaatatataatgataacacgttcacgtgttcatcgtcaaaagagtgtctcagtgagtacaatcttcaggtgtcttctagttttgatcagacgctctattcaattctcttaattagtcatatctttctttcttttttcctcgtttcgtgttaattttattttaaaacaaaggattaaagagtcgttctttcttttggtaacatggagccttaatgatcctttgttagctctagctaggattttacgtactacttagggtattcaaactaaaataaaatcaagaagaagagcagagagatggtgaggacaccatgttgcaaagaagaaggaataaagaaaggagcttggactcctgaggaagatcaaaagcttattgcttatcttcacctacatggtgaaggtggatggcgtactctccctgaaaaagctggtatatatttttttttgtcatatataggtttaaatattagctactttttaattaaaagaaattattgttatagtgtgtgtaaatgtatataggattgaagagatgtggaaagagttgtagattgagatgggctaattacttaagacccgacattaagagaggagagtttagtcctgaagaagacgacactatcatcaagcttcatgctcttaagggtaacaagtaagtatctctttttttctttctttcttaattcagtttggattagataatcattactatatgtgtaatgttgcatgaaaatactttacttttcatctcaaatgccaaccataactttttaaatcttttttgataaagattccaaatcttcattagaataaaataatatttgttagtattattttattgatagttgtgtttgattattgaaggtgggccgcaatcgccactagcttggcgggacgaactgacaacgaaataaaaaactattggaacacaaatctcaagaagcggttgaagcaaaaaggcatcgatgcaatcactcacaaaccgatcaattcaaccggtcaaaccggtttcgaaccaaaagtaaataaaccggtatattcatccggttccgctaggcttcttaaccgcgtcgcaagcaaatacgcggttgaattaaaccgggacttactgaccgggatcatcagtggaaactccaccgtcgccgaagattcacaaaactccggcgacgttgattctccgacctccacattgctcaacaaaatggcggcaacatcagttttgatcaacactacgactacatattccggcttctccgacaactgttctttcactgatgaattcaacgaattctttaacaatgaagagatctccgatatttacacgactgtcgataattttgggtttatggaagagttaaagagtattttaagctacggcgatgccagcgccggagttattgaaaattcgccggaggtcaatgtagctgatgcaatggagttcattgattcctggaacgaagatgacaatatggttggagtctttgtctgacgagtcagactaaaatcaatcttacgttggttttttctttaataagctgtgatagattcgtgtaatcgtcacgtagtcaaaataatgtgctgttgtaaaaattaataataataaatatttctacttacatgaatttgtttacaaatccggaaaaaaacacgttttttacgaaaatacatatgttttgttaatttcatatgacatgccactaacggaattgataagtctgttacacatttttagagtctcataagtcataaactatataaaaattttaaaatgacatatactgaccaccgttttctatcaaaacaataaaattatttcccaattattggtataaaagagcttttaaaaatcctgatttgacaaaaaatattattgcggatagagtccagggctaattcttcttttttgcttacatataattaattctagatttttaatgatgatatctaacgaatgatgtagattaatctgcccgtggtcaatttttgtttccgttaccattaacaaaattgtgtatgcagaagagcgtttaacagaaaaaaaaacattaaattttgttcgaggcactaaaattaaacaattacatattgttgtttggactcataccatttaaaactaatgttttgcacaccgtgaattttattggtgatacattggaaagagaaaaagcaataacaaataaagagataaataaatggtattactacttttggtaccacatattttttttggtgcaaaactttaggtaccactataatttaaagtttttaacatgcaattttgaacctagcgattttgaccaagctaacaacatttgacctacacaatctccaaattgagatatccatgacttaattaggcacactttgatctttaacttttaaaatcactggtagtatatttaaattcgaaatgcaaatttgctttaacgtaataaatcaaatttagatcaataattaaagtgttgaaaaaacttaaaaacaaagtatattcctctgcgaagactgcaatattccctaacaagtgaaactcccattccgtattataatattcctactacaattattttcatattttggtggattcacgtgaatacgtaatctttacaaatatatcactcatactagtatatgcagaacacaccaatcaagaatcgtcagcagcactttttgattagtttcgaaattcttatttttcctaatactagctatttaatccgtagttcatgatgtatatataaaactgatattcaattgtgtgtattaataatcttagtggaggtttagagtttgcacgaaaataaaaaaagtggaggtttagagataaagtttacctaataaattattttgcagccactatccctagtttgatttctttatttaaaagaaaattaattaatattttatatagtcaaagtaattaataattttgatatttacaccttcgcacaacaaataaaaaaaacaatgtatactaatatgtttatttgaaacggaattgttccttttaatataaaaaacaaccttcatgacttcatctagaacttcatccatggaataatatttatctattgcaaacaacgcaagtaacttcattttgataatcttcgtttttagtattaaaaaatgatatgaacttttcgaaaaaaaaaaaaaatcatgataaaaacattgaaaatttgtcatttaaaaaaaaaagccaaaatcatgagagttacaggtcaacgatcgtaggctacttttctgctcccagtactatccatccatacggtacgctcaagcaaaattactcatttttatgaatcaattcatatatataactcatgaataaaacgtgttcgacattggaactaccgactacgatctataactgtcttccatgtattcttgccttctgaacattactaacgtcgaaattgaaggattttccttagtttactaagagttatgttattggaaattctacgttaatttattaagaaaaataaattccgaatcttttaaaagaattacacaattagtttaaccattcatttaacccgattgcatagccagttctgaaatttgtagcagtgtcaattttgtttaacgaaattgtaatagttgcaatttgtgtcataccgtgctggttatatcaacataattaaaaaaaggtgtgattatttaacgtaatattaatgattggagtttattccatacaaaagtataataactttattttgtttttttatcaacttatcaaacaagtgacactggatcactagacaaagattcatcagaccaagtgaaagtgctataaggagacggatttggaggatcaaaaacttgaatcacaccttcaagcatctgtgtaacatttctcatgttaggtctcatcccatgctcttcttgtatacaccatatcgctattttcacatatctctccacagtttccatgtcattcattgcctctgaatcgtcctcagtcagatcttccaaccttccttgtcgaaaacaatcgtaagcccaattgatgagaatcacgttatcctcaaggtcgacggctttcttgcagcacacgatttctaaaagcattactccatagctataaacatctactttggatgtaatggggctattcctgaaccattcaggggccacatacccttttgttccacggatgttagtgagcgtatacgtttggttcatcaacaaaagctttgctagaccaaaatccgagatccgaggagtgtaatactcatctaggagtatgttctgcggttttatgtcacagtgtatgatctgctcgctgcactcttcatgtagatacaagattccacgagcaatggccaccgcaatattctttctatcttcccagctcggcctcggacgcctgaagagaaaattggctagcgtcccttgtggtaaaaactcatagacgatcatctggctctgtccttcgttgcagaagccaatgagcctcactaggttcttgtggtgaatctgacctatcactttaacctcattcttgaactctttttcgttatctaaatcaagacgatctagtttcttcacagccacggtaacttcagaaccaccggcaacttctaaatatcctttgtaaactataccaaaggctcctcttccaagctcttccgtgaaatctcttgtagcctctgcaagctctccatatgtaaagaccctcaaattcaactcatttgcagtagttgtagctgtagtccgaccgatatctctcgcttgattcttcatcatatttttactcttcttagtctttctataaagagcaagaagtatcaaaaatcacaaaagctgaagttccaagtagaacagaacaagcaatgattaaccagtcaagttttttcgctctgtttccggtaactggaacatccgcgatggagcggtttcgaaccttaatgaatgtatcactatcaccacgtggagatctttcaccgtgagacaagggaaacttcttcttccaacattttagatcccgatttgttccaaaaataaccgcagcacataaacaatcgctaagacaagaagctttacatctttcttcatcatagttggcataactctcataatccccaaacggccaattcgtcttctctaaagtaatgaactcgtaaagattcacatctgagtttgcggtttggttctctggtctacaagtctgcatctcaaaatctggcaaacaatcaccatactcattgctcggatcctttaacacaaacctctcaggacactcacattttggcctcttgttgtttcctaaactacatatattattatacccacaagccatattcccaagtgcatcatcggggctacacatattatccggcacagcccaagcaaacacccacccactattctcctggcctcctttgggatgatagtactcagcaaaaaccccgtcgaaatgtagaacggcgcggcgatagaaaaatccggatctctatctttgacgacgaatcttgaattgttcctttgaagaacatatatttcccctgactggttgaaaactaattgaatcccggggttgtttggatcgttggtattactttcgtagtactgagagtatatgtctgattctgaggcagtctcggcgttgagagagtgaagctgaagatttccgtcatcctctagacgtaggctgaatcttccttttttgaagctcgtctctgtcctacgtgatgacagattccttccaacttctatattctgtatcatcatcattcataaatatatcatccgcaacatactaacggaaacaaatcaattaaaatcgattgcaaatctaacaaaagaagtcaactaaaaagtattttctcacaataggatcaaaaccttaattaatagtgctaactgctaatttaatttttacttttatttttttttgagttaatttcttacgtttgtgaacacatattattatttttgttttagtaaataaaatatatcttacatgcaaaaaaaaattactagaatacgtatatattttcatcatatattgattacgtatagtgtaaattaaaaaaaaaaaactagaaatttctcattttggcacctcatctccgcgtttgcaattttgtcaaaacaaacaaaaaattataattgaagattttccatattttatctcccaaagatattctttttgtcatttaattcatcaattttgttttaaatttcatagaattttttattattttggtcaatattgtctatgatcgcataataaagatttaattacctgattaggtaacagagtgtcggtgggattttcaaagctcgaccatagaacctcgtcagaatcttctgacccatctctgaaaagaacgaagtttccgtcgtcagtaaatcgccctcgagaaacagagccaccactcaacgctctccacagctcctgacctcgagggtcagcgataaccagaccgccatctgcagttaatgtaaccttcgaaccattagggacaagaccggtggttgtgttgacggcttgtgcgtgccacacgatggtcttgtcagaaatcttgtcgaaccaaatggagagagtgaaaccgtcgtttggttggatcttgcggaacccgaaagcaaagtcaccggaaggtgaacgccatgaactagagatttgttgggactctgaagcggtgagagattctccgacaggaacagagccgtttctgatgttttgagaaaaaacgaaaaatgtttgtagttgcagaataagaaccagatggattattgaacaagaaagagaacccattttactgaagcaaagatgtagagattaaatctgcgtatatgtgtaaatataaagactttttagttctaactctctgagtcaatgactcaatggaccaggttttgaaaagccaacagagacttttaagggtaggaacaaatagactacattgtggttgtgtgtgttttgtctttagatatttctgattgtaaacgtaaaagatggattatcaaacaagaaagtaaatccattctgctagaacttgagattacatgcgagtgtgtgtgtgtttgtttgtgtgtgtgtgtgtgtttgcataatgtagatttgttcgttactattgaacgtaggaaaggggttgagaagacttagacatttcttgttctttctcttagtcaatgaaccagattttgaaagagtcaaaagtctcttctcctccatacaatattacttaagtcgtgaacatgtgttctaaagtcttttaagggtaggaacaaagtgtggttgtatctatattgtgataggacattcctgaattgtatacgtaatagctttgtattccttgtgtttggattttgaatagtaaaagaacaattttgctcattgacatttttggatgataatacatcatattcagttgttaattatttttggattatataccatcatagaatcacatactttgttttctcactgaatattttataaatttttaaaacacatgcatataccatattcagttgtttataaaaaaaatatagaatcacttttagaatatttttgaatattttgaacaattatcgtatttatacaaacctttttccatttttcaaaaatcaaataatcatttgtgccatgcggtaccttgctgcgacaactttaaagcgcaaataatgagcacatttacaagaagactaaatttgagcaattttgaatatcagtcataaaaaacatagtgatcgcatttacaaatgatagaatattgatatattgcgttcaccacagtttaaaaagtaaaagttacattaattattcatgagaaatcattaccaagatatgaatctttgttcttaagacgcagtgaatctaatgatagcttacgtacatacgtctcgacaacggagttccatcatacatataatatgactagctaaaacatatcggtattaataatgagtataagtcaccaaaaaaatgctgaatgttatgaaaatattaaacattaattatattatcattatattataaagagtgagatagttctactcgttcgtagtggtaggacgtaacatccaagccggaagcagagagtttggttccgtcaacgacgatgcaccaccgttctctcccccaactctctccacaaagccatctctgcccataaaattaaattaatcagaatcattcatagatatacatgtacaaatttgaattatatatatgcacatggcacaattaatcaacctcttaatctaatttggactagtactgagagagagaaagacgagacctggaggaggttacgcagtattgaggcagaagaactgaagaagagttggagcattggactaattgtccttcttgctgacccgttttcttctccctctccttaatctaaaattattgttttgccattagttagtaataatatataccagcataaatctacagttgcaaaaattctataaataaaatatctgagttgtcagaaacaaattatacaaatattagaaaacattaccactttgagtcttacgaagaatttatatcaacttcatatatatacagatcaagaactaaggtaaactaaaatcgatctaaacatttttttttcttttgatatatgtataactagtttacgtctagatagctgcatgatctcaacattgatttttattagaagggttatcaatagaggattaaataatgaccattttttgggattagataatgaccatttctaatgctaaaaaaactaaaaaccatttctaattttttttatcttacatctacttaaattcttcactcagatattatggaaacattattaatataaatatatatttggtctccattatatattagtaccggttttttgctattatattttgtttatgtaataggattaattacaaaaattagagaattatatatgtagtaaagtcacatattttttaaatacttttataatatataaaacattgttaaacctaatctttttaaaaaattatggtgagatgacatactgtagttaattatttcaacttctatcaattttaaactcatatataaccacttatatcaaaaataagttgtacttacctttttgagaagcgaattgttgtgatcttgcaaggctttatcctgatgatttaaaagaaacaagtagaattatgcctcaaaatgatttttttacgatgtacctaattgtgatttgatattggttgcaaacatagttatatatatatatgaaaacaatacttttcggttgttatatatattatctatctaaacaaaaagttgaaactttaccttcttctggagcgcagatatggattcgaacatagcttggttctgcgaacatcagacattagttaattaataacatctcaaatttaaaattctgaattctttgccaaactcaacttctcgatcgaaagctttacatacatatgtagacgtatgtaactatgtatccatgttgtcctattacctttcttgacctaatgctcttgatagctgcatcgagctgatgctccaagctttggagctccttcaagctcaacgaatcaagatcttcccccataaaattcctacacattttcgtattttgtgactactgcttatataagcaaaccgtggttgttgctaaggtagaaaccattgatatgccttagtttttatgatcaaattgacaacagaaaatgaactttatgaggatccaagacacaattcccccataaccgtatagtgtcataaacttatatgagcaataacgaagtcacgatcaatacacattcattccctcttaagtaaaggaaaaaagttgaatacattagaagtttgtatgtgcgacccaaaagtttagttaacttgggacaaatactcttgtaaatatatgttttacttggctatttgattagcacgatcttaatttgacattgtgcacatatataaatttgaaatatatatgtgcgatcatttgtaaatttgaaattataacatatatataccttttgttcttctcaagtacctcaactcttgccttgagcttagcatgttctagaacccaattttcctacaacattggtgtatgataaacattagttactacaacaaaaatacaacattaagtagctaaaagagacatatctaaaacttacactttgtgaaacgtctcggccaacaagttgtttgtctgaatataaatagcgatcatagcgttcaagtatcctctccatgctagatttaagaaagaaaaaaaaggtcaacactcgattaatttgatccataaaaattattataatttcacatgttataatgtgtaacatttgttacaaactgcaagccaaaagtttaccgtatttggtataccgacaaagaatagctaaaaataagaatataacacaaaaatgtatatagaacctggttttggtgagtccacaaaacatcatagaaaacatacgtacaaattcaatttaaagattcgagtttccctcctgactcggttatcaaagcaaacgatcactataaatctctatgatcgtacataaaaacatatatatacactttcacaaaacgcatttaaaatatcagtacgaacttacatatatgtttaacgttatgttattgtccattggggattatagcacatccttgttataaatgctttatttcatcgtttcaaatcaacctttctttcaaatatatggtatactcaagtattattatacatgttatctacatacatatcttcgtacgtgtctgagtgcacgtgcttccatacatcaaaaggggcaatcaaatcgtgagtgtgtgtactaagtttcataattttatgctattttcaattgggtaaaggaaaggaaatttagaaataaacataaacagctttttcatgcgtccgtacgtaaaatcccaaaaaaaaaccctaatttctcgagccagttcttagggaacaaacaaatctagagaagatatgaaagaccaagatacgagatttggatttatttccaaggctgacgacgatcgagatcgagaagtacgaataaaaaacaaaatctggttaaagatcaagaaaacagatagatatgatcgatgtgatatataatataaaacattaaaaaaacatttaccaagagtcggtggaatattcgaagagtttgcctttggaagagaagacgatgagagcaacctcagcatcgcagagaacagagatctcatgagctttcttgagcaaaccagaccttctctttgagaaagtaacttgcctattgatcttgttctctatcctcttcagctgaaccctacctcttcccatatctctctctcttcaaaatctcaagaacaagagagagaaacgacaaccctgaaatgaccaaagtatctctctctctctttctttcttatgtctctctgggtatcttttgtgttgatgaatgtgataatagctattttattttttttattttttcttttatggacttttgttgggtttcgcgtgagtctacagtgacgtaagtgatgtggtataaatacggtatgtgacgtgaatacatagacgatgatatttgtggaaaaaaaagaaagaaaaaaaaaacacaaaagctacatacgagtggaagaagagaccagagtggagataaagttttaagggctgtttgggaaataaaccatttgatgtgttgtcgagtcctcattggctactttttactgtgcttgtaactcgttcgttagttttgtgcctccctttagcttacattgtttccgtaccgtacggacttttgttattgtttttaaggttaagaaatcagaccaaagaactcaatagatattaaaggagaataatctttaactccttaatactttctacagtaacactataacgactatatatagggtttaaatattctttcaaaatgcaaattgtattttggttttttaatttttctttttgcatggagacaagtttttttctggttaaatgcacggagaaattttaattttatttaaggtgactttctgtttttcctttaaacagggagaaacattgtgcttacaatttcaaagatatatatattagataaaattaaatatagtgtgttttaataagtacacgaaagaatttgacccaattgtaataaaaccttaggaaaaatagtaattttataattgcaaacacaaaaataacacggaacattttacaatattttatcctgctaaattggaaggaaaaaaactaaaatgatgtccttttcttcaatttcaagttaagtatcgatcttctctttgctctggaaattgatgaacctacaaagtggaagctaggctgaaatttagctgctgaaccaacaaaactcttaacatcaaatgaagcatgttctatagatcgtggcgttgatctttttggaccaaccaatatgcaaaatgcatatattgttgtaaaaaaaatgcctatattccataacttattcacttgatatactataatttttcttttgaccgggaaaaagtggcctatttatgggaagagaatctcaaacgtatgatactctcaatgtaggaaaagtctctagactaccattttcttttactcctttagacccattggatttgggtagatggatttattaaatacaatgtaaggagtttttaaatgaaatataaagatactttaatgattaactggtaactggtaaattggtaatgtactactattgtagtcaatgtaagaaaatagttacgaaaataaaaccttttctgtcaattaataactcactactataatttttgtaggattaacacatcacactaagctattttatgactaaataagtaaatataatttcttccgaaggttcaactttttgagtggttattgaatagggaacgtgttccgataagaagttaacaaaacaacattcatgtcggtcccatgactattatatgtctgactctgtgtgatatcgatatatacataacatatattggtctgaaaagtggaaaatctattttaagatttggtaactgatcaatgaattgataactgatagtctgataccaaacataaactagttttgtacactaacaaaataagaatgaaatatcaaattttgtaagaattggtaactgatataatgaatcatcgtaactgattattttcttttaccttccgacgtaaatttgtttatgttgctcttaattatgttcgtaccttaattgatcataaacacataaattttagtgattccttatgtcgagttgtcaatggtttggaagattggtagctcctgacatttcatcggaatttcttctctccaacagctcaaattctgatcgacaagttcgatgggttactccaaatttggttccggtgccagttctcccaactactgttacggttactgtttctatcagaactgcgtgactgtggcctgattttttcattaggctgaactaacttagtctagactgacacaatatatatgtcttaggaatgtactttctgctaaacaaatacagatgatgtaaaaaaataaaattttataattaattggactatactttaataactcagaatagatattaattcgaagcttgtgttggaaatttgggatttaaggtagaaattttctatagtaagctattcttggtagggtacaacttataagtgaaggggaagaaatatattatataaaaaaattttaaaaagagaatatataattctacgagcatatatatatgagggtgttcggttagcaattttttagcatagacaaacactcgtccgactaaaatgtatgtaaaggtactatagactatatagtatataccaaaattggaccacatgaacaaaaagaaatggaccacatttgtgtgttgatgagccctaaacatctaaatggatggatagtacctaaacgtatttaatttctctgaatcgttattaacataaatttggttctctccttagtacgataaatgtttgccctcttagatcaaaactttggatctttttttctgctcataccttatgttaagtccacatctcaagaccgcatgtattatatcgcacgttgtcttgtcaaacttatataccaatatatagtggacataaacctcatattttccattattaatatttatagcgaatcatccttttgtgaaatttgaatatttagatatcaatcgttaaaagcttttaatttacttacatatgtcaacttaggaccattttaacatcacgccttgtctattttttctgtgtgtgaccacactcgtacatgatatttggtacgcatatatatgatatggtgcaaagtgaaaaataattttttggcatgaaaattataaatagaagtttttatttcaccataagggccttcatcatgactaccacgttctattttattttacagtatttcttaaatacgcaagtttgaagtttgtgaggtaatgatttacccaaacaaaaataccaaaacatctttaatggctactaaaatatcttaagagagaatgtgaataatattattgatccagtcacatgtctttatatattattctttcaattaatttttctttatttcaaataaatatactttatttttaagaatataaaactaaggaaattatgtgtcttaggactataatctccctctctcttgtcctaggataatctcttctcagaaaaaaaactcagcatccctcaaaagaatctgtgctaattaaccaaatatagtgttaccccctgactactatgatagaataggctacctaataagttattgaaaagtaaaaaaaaaaaaactcctctaccaggtaaaaagtaataactaaagtcgtagccaagataaccattattttctaattttgcgaaaaggacaatttcccttttccgaagttaattttggaggaatcgaaacttgacacgtgattgagaacccagccgagttttaaaccattcgacaggggtaattacgaaataaatcaacagtgtgagacatcatttgataggaaaacgacaaaattacttttaaaaccaaaggagatatccctgtgaacttttgataggaaagcaacaaagcaacaaacaaagaattaggttaattgtcctaactcctaagtcagggtacaaactttttaaaataatcgaataagcttgatacttattttaaattgttaactagagcagatgcccaaaaaaaatgttgatcatagtgcctagtgagtgtatcgaatagatatttctaactgaagaattcgtcccaaaatttttttttattttttttgttaaaaggcccgtcccaaaaattattttggaataccacggatggaaattggactgaaatgcaaaattattcttaaatcaaagttttaacattattctaaagtttataacattatatatgttaatttaacggagtattaattaattattgatgtaatgcgtttgtaaccttttttccttaaatctttgtatttaagaaactattaataattgtttttttctttaacattaaaaccaaaaaaaaactttggtgactaaataataaatatataaaaaccaaagcacatggatttttattttaaatttctgttaggtgggttttgataacgaaaatatataagaaagaatatcattgacattttagggtttgggcattgccacttgtgatcttcctctttcggaaataaaaaaacgaatcccatttcttccgcttcgttaaaataggcatcctatagactatagaactcacatgactattttaatattatttatttttatatggattataaacatgatactgcaaagaaggaatttcaataatactaacattacatagtattgttatttcttgctttgtttacttttatggagggttggtaattttagggtttatatgcaaatatggaatcgacaacgcacacaaacttttctaaagcaacttctcactttgtctcattttgggtgagattctctgccacacaactaatcaatgttccattttacgagtccattatctctttctatttttattttctttcatgatactgatacccaatatatatattcccaatccaataattatattttgaaaggcacacctattttttttttttttttttttttaaagttgaacgaactagttgtatttcaaataacagtttaacagaaagaagaagaatatttctagctaaattaaatgtagtgacaaaaatacaaaatcattatttcttgttgtctgttggctctttgaaggaggaaactgggcctagttgaattgaagtccattaagtgtgttttataagatgttcccaaaaaaatcaggcctattcttttttcttttcataagtataagattgagattttccccaaatgcgttctaaaaaatgacgaaattacactctcgagggtttgttttttcaaattcactacatattcgtttttttttttttgaactttttttcattattaaacatttagatcacagtaagtcagtaacagaaaaagtaaagtatataacgttcggaaaacaaagtttacagtatctaacatctttttttttttttcccgatattctacaacgacggaccaacagaacacaaggatataaatttcttttaaaaacaaggaagttgaaaactatttatatttttaaaaagtatcaaaagattataatttttgtgggacacaaaagaatcataaataaacgtttataccactccgccgtaaccctaagcaaaccagtggcaaaaccgtaaatccgagattaggcagagaagaagaaaaagacaagaagagggaggagcacggcggcgacgaatgagaattgtgaccgggaaccaccgttgggaagaaaagggtaagagtctggaggaggcatgacgcaattgtctccattaaagtaaatccttcgtggaaaagcccaacctttctcgaatgtgaaggttgattggtctttacggaacaaaatctctgattgaacattcccaagaggacctgcttctgataagaaatcgttgtagaacttcactccccataacatcgccgtatcgtctgcaaaaccaaaatgttaaatctttgagataagctggcataaagagaagagaggggctttgtgtgtgtgtgtgtgtgtgtacttacttagtccagcgtaaggagtaagagatttgtagttgaagctgaagatttgagtgatgttgtcgagatttggatgttgagcaacaaggttccattgtgtgtagttcaagcgatagttgaagtttgtgattgtgatcttcacacgccaatactctttgtagttctgctttacatgccaatgcactctgatcgggcacatgtgtctcgtgcattgcactaatggtggtaaaaccgttcctttctttgttggtggtgacacaaccgaggctaagtgtggtgtgtccgggctgcaaatacataaaaagtgtgggactttatgattgaaaactgaacagagaacaagaggaggaaactgaatattgatttgaactacttactcgaggcaggcaccggattctgttctgttgttttgacatccgcaagcacaagttggacatccaacaatggtttcattgtagaaagaagataaagaaacacagcaagttggagttctttgagcaaggaactgcgagtatgtgcacgtaatgttccatgtcactgcagtaattcaaagagaaacatttaaccggtctgttagatgagaaacaatgttaactaacattatggtttaaaaaatgtcgaattgcagtcatgggttcttactcatagcttgagtggttctgcgtgtgtcagtcgtgacaaattttgttggtctgacaatctttgctggaccacaagtgtaacctggaccaggtcccatgagagtgaagtttcttgggaccctaacggttttgtttgtggttccagcagcaccaacactaatctggaaggagctagccgcagtggcagggtcttgaacccatgagttcataacaccacccttgcagcaattagcaatctgctgattataaggagtccctggaagcaagtctacaactgttggatccttcttacaacaatgtggtatgtttcctttgtactttgaacaatcacctgtaaaaccattttgtctataattcatatccagataattcgcaattaaaacataaagtaatggaacctgaaacaattagttaccttgttcagttgtttgtgctccaaccatactccatataacttccttctttgcccatttccaacctaatgtccatcctggagattgaatgtgtctgtatttctggaagttgaacatcgtaaccacggcctagatcgaacaaacaaacagtttagatgaatcaaaaaccggtaaacaaggcctaatattttctacttcaggttcttgaacttacaacatagccatcaggagtccagctcataacatcccatttcattgtaatgttgccttctggatcaagcgcatcatatgcttctgcaaaaggatttaccaaaagtcagaactttgtttatcctgatccacaccgacattgtgattgcttcaatcttaaaactactaattatttggtttgtagaaaatagaccaaagtgttaactgcttataactcacaagtgtgcatcaagttttctacttatagaaaatatcagaaagttactaattttagatcagaaaacttgaaactttggtgtttccttatataagcaaaatccactgatctacatatgaagcactaatatggaaattgacgtattgattttaggatctgaactctataaaaaagacttgaacagtgagcaagcaattatcatctcactaattgaggaaagatctacaaaagagtttttttttaaaatggatcatgaactgccaacaccacacaatacacgattcatattatcacctctctttatcaatttcaacaaacaaatcagttacaattgaagatactcagatgcaaaaacatagtctaaatttaagaaaaatgaacaatttcacgatcttaactctgaaaagtgaaataccgatcaaggagcaagattggaagttgaaaaagctctgagacaaagaaacagaaccaagaagcagaataattggtgataatgggaataagaaagtaacctgtcgaagtaaaagaagatgaagaaatcaagaagacgatccataaggccaagaaactcaatttggagacgatggaggtggatctggagaagaaagactccatttttaatactctgatgatcagagtggaaccagagacgaagcttgttccagatcccttagatgggtctggtttaatcttaaaccaatctcagaggagcaaaaagaagaggaaggtgctttgcttgaaggaggagtggacttatagagagatagcagcaagattttttttagaacgagagaagcaatgagacatttttgggatctggctggctagtggctgttttagtaaaatttgagccgggaacgatgatttgaccattttacccttctatcatgatttgattttgttttccgattatattagcatcatgttaataagaacattaattcttgtcttgcttcttatgtttaagtaattgtttctcgataaaaaatatatgaacagaaaaaaaatattttaaggaatctgtatttttgacttcttaataaccaactctgtaagtttgctatgaatcatagcctatgattataaacgagaaaggggcttttgtgtaattgtgatcggaagttagtttattaccggaaaatattaccgaagacgacagcttttagaggaacgtgggccattgacagtgttttcggctgtcggtggagagaaatatatgatcgtatgtggacagattttttaattattcatagtttggataatattactttctgttgttataaaaattttaaactttttttttttttttttttttaaatggttaatttttgttgccaaaagagaaaatggttaatttagtttggataatttttttttaaaaatggtatattcattataaaaattttaaacttgccaaaagagaaaatggttattttttgttgtgatatataggcttttacaatagaaaaatctagggaaaataactttaaaactactttttttgttgctcaagaaattatactaaatagatgtaaataaacagagttgatatcattgaaatattcaatgtcaataacgaaataatgtgtcggcgaattattttacatttctatattaaaatttggtattgtttaggaatattggtcctaacaaccatctaggcatatatcaatttaaaactcaagtgattgattctagtcccaacaaattattattactggtgactgattatcagtggaaataccctattgtcaattaaccatactttcaatattatattatagtaaaactgtgaaagttattggactaataactcaatcaaaagtgaaattatatttctaaattagtccctcaatgtataaaaatatacatggttagtaagcaatcattatcaatatgtgaagacgttaattaagactaccattccaaattattaaattcctgtgattacgtgtatcctggctgattattacgtatacagagtataactttattttgccgacactatcaacaataatcttaaagacacccttttcactttaccacaagaaataccatacttaaatcagtcaaatcttaatcaaacttcaaactttaacaactgtatctgtctgagaaaattcacaacaggaacctgaattcacaaccctaaatttacgtttgttatgttctaaaatcacaccataaacaaaaagacaaacccttgaaaagatttcaaacccatctttcttgcacctcaagcgacgtctcctctttagacccgacgagtgtggttctccttttcatctgaagttctacttccacttgccctacccgaattgctctgcacaaaaccactattgcctcccgactcacttccgttttgatcagcgtttctttctctcagcaagttgctgccatttgaagacgctgacctcattgccctcggtagcttcagtttgatgctattagactctcctgagtcactgttttctggcattctcgctgtgtccgagtccacagtcactgaattagcttctggaatcaggtgtgtgtttgtgtgtgtgggtggtagtgctggtggacctacaggaacaagctgaagcacagtcttcttccatttctttctttggcttggccttggcacattcgatttaccctgaaaccaaaatttcattaaatcagaaagctgttgtttcctagctacatgaacacagatatgttgaaatgaccaaaacagtggaaactttagagagttttttaccgttgtgtttcctatgtctgatagaggttttcttcttcttcgtgttcctccatcatcgtttgtctcctcctctggcttgtcagcaagagcgttctgtagcagcatagctccacgtgaagcaagaacttgttgttgttggcctttgtccttttcatcagattcttgcgagttctccccgttttccaaggcctctgattccgagatggaattgttctcctttccgtctgcgtttctgttggagcatttcacggaagaacatccacatgacggaccacaagatccctttgtagctcgacactgacacttcattgtcttgcaagaggagctcttgctgcaagtgcaacaacacacgtcagatttcactgcatcatctgaaggagtttccgaattctcttcatatgaacgcctcatgaccacactcgagcgccgtcttcccactttgaagtttcgtttcctatttagctttataaccgattcctgctcggactcacgctctgattcatgttcaggtttccattcatcatcaagatctggatcttcccgttcatggtctgacgcttcagaatcagaggtatccatgtcctcaagaactatagtcgagtttcgggtttcctgctttttcatactatgctcgttctttaggttctcatctgctgacaatttcttcattgcagaggtctgtaatatggaatgccaatggttttatatgctaaatttcagacatttactgtcttatacaaaaagagtagaagatgttttctactaacctgtgctttcacttgatgcacgaggtctgctttctggatctccatgtatcttacataactgctaaactttactattttttctttgaggtctcttattaggacatctttttctctgcagtctgcctctttatctcgggctagacaccttcaaatttaaacaatggacagaaagaagaatgtaggatgagttttgcatcatattttgaagatgatccttcaagaagcaacatattaccaaaaatctccagtcactaattgagattttacctcgcagttgacgccaagttgaatagatagttcatgatactcttggcgtcacctaatgttctaacttggttccacctccctcttccaccaaacacacgctcacgttcttctgcttcagataactgtgatgccatggagacaagagtgctggaagaggtcgcaagcatattctccagagcaaaaatccttgagtttcttgcaccaggagacatggtgtcaccatgaacgctgcttttgtcagagaagacactaattgtttacgatatatttcattatgaatggtcttggtttatgcaaaatctttgtcagtcctgattacgcaccttatcttggcattcttgagaagctcgttttcttctcttagccttgcaacttccttagccattcttgccctcctgaattatagtcagtgttatttgagacaggttagtaagaaatcatttttttaagaattacttcttgtcaggccttaataagttatgaaacaaatactgatgaaagacatactcttccgtttgcctctcatattcagaacgcacttcgtgaacccgaacagtgacttcaatctcatgctcaattgcttgcatcaatgcctgcaaatggagtacatttgaaattattaaaaagttgcatttacaaactaaccagaagaatcaccaaactcactaaacctagtcaataacttggaaaacaaaacattggtttcatagagtttggtgggtgttacctgagttccagggccattagcaccacctgcatatataataggatacacagttagtagacatataaacaaaggtggtcatactaaataatgttatacgaaatatcctcactcaatgtctcgcgtgaagaagcctttcgattatctaaaagctctttgagtctttttgtcacctgagatgcctcttctgtctttctttgcaaaacctaataaaacaaactttgagaagccatgataatagaaatgatcgttaccaatgggctgaaagtttataaaaatgtgctcaccagcttctgtttttgattcagagccatgagtttgtgcatctcatactcatttctccttccctcttttttgagctggtcaaatttaaaatacgatgtaatgaatggttcaatacgagatagatttctgaaaactaaatccaaatgtcttaagaattagtttgaagtttgagaccttcaagtcaaatgtatatacaaatactggttatatactacaggtgactaatgacagaaaatgacacttgtctaagtagttcagaagtggagcaagagatagcataataatcaatcaataaattcaagtaagcttaagaagaatcttaattggctacaaactgaaaagtcaaatatacctgcataacttccttctctcttgaagccttccaagccctaaactgctctgactcctgcttaatcttttgctgtaattgcacctgaaaagtagataaaatcagattagcataggtaagacatatatgtagagagtctctaatagagattactgcaaaaaaaataaaacaccttctgagacttaattctgtgtatttcatcctgcaattttattgcggcatcgtcacttttctgcttttgtctcataagctgagcctgtgcatcttgtttcttcttcagaacagaaacctaaaaagaaacaaaatacaataaattaggaaaatgatatgtgaaagacgagtataactaagaaataaaacgggagttacctgtgtttcaagcgtgttcagtttctgaacatattcttccttcagtttctgggcaccatctcctggtccagatggtatgctagcaagattatgtctcaaaccttcgatttctctctgcatgcaatttgatttagtcaaatataggcccatagttccactcaaatacagtataaacaacagaatactgacctgtagtgctcttttttcctgttctaggtcataaacttttttctcatagtgttgtttgagaacagatgtaccaccacttgaaaagcgcttcatttcagccttcatgaaaaattgaagttatagacatactatcttaaggaaatagatgaaagactataaagaagagcactctaaacttgagaatagtacctccttttcttcaagtctcttatccaattcctttagctccatatccaacttttcttgaagtgagcaatgttcaatctctttttcttgaaattcaagttcatctgcatacaaggttaagctactcaaacagagttcttattgagaaaattctctcatatattaaatcagggaaaaaaaattcagcctaacaatctgcaagtagtagacaaacaagttgtgttttgttagcatctaaatatttaagtgttccagcttctttctgcaaggcaagcaaaaacaaatgctaaaacaacagttaaggtaccaaccagtgacatccatcactttgtcttcacaatctgacgactcattggatgagggaaacaagacattgttcgaacgaggcccaacgtcataggaatcatccgaatattggtggttactggttttcttcaagtttttgatatgcaacagttctccttctagctcttgaattttcgagacatacttgttcaccaaaccaacatcctggaaaattagacatttcagcgaaaaaatacactcgctcataaacttcaactaaggaatcataaaggaaatctcacctcattttggcaggattcaatctcatccaaggatttaccattacgaacagattcaattatcattataagtttgtccttttcaacctaaaatagatggaaaataagtgtaaagtgctagatgccataaaagtttgatccatcaaaaaagaatgagtagaagaaaaacctgagcatcataagcacgctttgagaaatgctcagacgcgactctccgttcttgaagttcattgtgtagctcacgattgcttgcctcaagtagtgatatcttatgcttgagaatctaacaggttttatagtagtttaagtataagaaaatgttactagaaaaactgtcactatttgtctcagatcagattgaatacctggagctcatcaaaagcaccactatcacccctatagaacaagagttctgtttgcagttgctcaatttggctccgcattctttgcatttgtgcggttgctgggtctcgattgatctaagtattagaagaaatgacaagaatgttaggccacaaatgatatctatagttgagaattcataattaaaagcaagaactaacatataagtaccactgctttgttttgaatattgcgagcacgatttgcgtatttgagcgtatttaaagtttcctcagcatttgtatcagcgggacttacacaagctgcaacattcagagatcataaattatgtgatccaatagatgggtgaaaacagttctgtctaatacttggatcataaatgaaatgtttgagaaaccataccaatcatcacagttttgctattgccaccaagagaatcctaaacaacagataattaccattagtttttctttttcataaccatatatttacaagggcatgtagttcaattgaaaatgtatttacgtgtataaacaaacacatagggaaccttgatacctgtagcaaacgagttaacttgctgtcacggtaaggaacgtgacctccttcctttctctttttctcatctccaagtgcacttataacatttccaagagctaatagacctttgttgatgtgaatacctgtgtaaatattgatgaaataaaccttatagtttagtcatagtctcttttaagaaaccagaaagaatatttatacaactttatacatcataaagataaacatgagatagataaccttcttttaaacgcatcccatcagctcctgttcgttttgcacgttctgaccccgctaggtcaaccaaatgaagctttgcacataatatatcttcacctccatcttcagttgttgtgcaagaaccaccggcaatcttcttttgttccagagtgattgtgaagattgcatgggaccgactaaaaaagcaagaaacaaacattacattagtatacttgtaagaactataatttcttaatattggtcatagaatatgatctaataatgaaattttatcttgatgcaaaagtactcataactctactagtggatcagccacattagctctttcaagtattgaagtagttataaagaaaacggaatgaaaacagtgcatttcaaattacaaattcaccttgactggctattcatgtttgtgctgcctgtagctcgagacaaagagcctcgtgctagaaacgagcccatctcctctttcgtcttgacttcagcctcagtaactccagccaatgttattcctccactggcagtttccctgatttgaattggagctcgtgagagagcagtgtgctttgcttgaacgccactgtcatttttaaggagggccgaagaatttgagtccagcaaatcaaaaacttcttccttaaaaatctgcatttaaaggtaaaaatcagcaagtgaaatatacaaatcaaatctcaaataacaaacacagaagctgtttctacctcaataaaagacactcgtatcaatagttcagatgaatctttggttgtctccactcttctaaatatatcctccataacgtttggtataacgccaccatttgtgcaatctccactataattagtacccatggtataggttttacctgaaccagtcttcaattacaacaaacaaacaatgaatttgatggatcaaaccaaaaaaaaaaacacgtagctaaagggaactgcagagtttagagaatttaaaaacaaacctggccataagctagaacagtggcattgtatcctttaaacaatgcatccacaagtggagcaacacagtgattgtaaatctccgaacacggatagccaccatttccgtagacgaaatcataagtaaatgtatgcgaaccaatatgtacctgtttcagttcataagaaattccaacaaaatgagttttatcaaagttcgaatctttaaacatattttcagcaaaaaaaaaaaaacattcacgcatcaattgatttcccgaattgaaccgaatcagttctatgtgaaaacaaatcccaaatgtttcaaaattcgaatcttacagcaaaactattaactgatgaagaataaacgttatttctcattcgcgcataaatttgatttcccgaatttaaccaatatataatcccacgaatcttatcaaaactgaaaaactctcagaagaaataaacgcagaaaaaacgaaaaacccttccaattgaattacctgtggctctttgggagccacggtgatgcaatctgtgcatccgttcaaaagctccggtgtaattaacggacggatgttgacggcaaccctaacgcactctgtgctctccataaccgccgagcagaaacccagaaaacctctggttacggatctaatccagaaacgaaacctcaaatcaacaccacgaaaatgtagatccaatccagaaacggaggagctagggtaattttcgagaagaaaattctcaggaaatgcgatttttgagaattcaaattttgaagagagagagagaaagagagaagggggacttttgtttattttgagaggtcaacaattaaaaaacaagaaaggcaaaacttaaaaccattatggaaattaaaattataagcgccgctcaggtacgaattcaaattttctttgagaccgttacgcacgtgtcatgcacatgatcatcactaaaatatcataggcccattattttatatttcagcccatattttaatatcaaaggcccattagtttatatttcagcccatagttttaaatattggcccatgttgatctttgtttctgaagaggaggaggaagaagacgatggttgacacttgacagagtaagctcagaaatggcgactctggtttcgaattgaacttgtgaggaaggtttttagggttataaggtgataaagaaaatggggaatagtggagatttggagcaggctctgcaagatgggaatatctttagacagctcaatgctcttattgtagctcatctccgtcatcacaatctctcacaagtatgtttttgctatcgttcttcatctcactcagattccaattttgtatctttacatacgcacgccaatttggattgggatttctgggtctatctatttttggattgttttttgaaactttgaaattcatttatagatgaagtaagtgctaaaagtttggatttttcattactgttgaatggttaaaattttgatttttgagatcaaatgtttaggttgcaagtgcggttgcttcagcaacaatgacaccattgaatattgaggttcctccaaaccgtcttttggagcttgttgcaaaggttattgttttgcaccctctgaagtttctgtatatttttttggagtctgtgaagaaatgttttggttctgagatgagaacagggtcttgcagcggagaacaatgggacattgagaggtgtttcttcatcagtcttgttaccttcttcttatggatcaatcactactcctcgaacagcttctatcgactttaggtgatgtccctttctgcaataagttatgtttcttaagagatgaaatcaaaactgcttaccatctaaagaatgtttggaattgttcgaactagtgttaatcatgcgaagggctcatcaaagactatcccaaagcatgaatcaaagacgctatcagagcacaaggtatatatatttgcgttgtttatgtctcagtagacacaactttgtctaacccttaataatgtttttctccaagctattttattttattttggctgatatgtttatgaattttgtagagcgttgttaggtgtgcaagatttagtcctgatggaatgttttttgctactggtggtgcagacacatctattaagctctttgaggtaccaaacttttgtcatattcattgtaccaactttttttccttcaagcatcgtcaagagttgatagttctgtggatattccgtgttgtttctttgaggtgccaaaagttaaacagatgatttcaggagatactcaagctcgaccattaatacggactttttatgatcatgctgaagtaagcgtttctttcttcaaaatttttgccgttctgattttgtgtatctcttaaacaggctcttaaattagtgataatcatttgcagccgataaacgatcttgatttccaccctcggagcacaatcctaatatctagtgccaaagacaactgtataaagtatatatttacgttttccctacctaaaatgaattctcttggtgattacaagaaaagtttgtgttcaactcgtttttgtgtcatttcttgtgacgtggtaggttcttcgacttctccaaaaccacggctaaacgagcattcaaagtttttcaggtagagatcatggttgttatatcagtttctgtttagctacatgttgaaaacactgtatctcatccaatctttaactccaaattctgcaggatacccataacgtgcgctctatatcttttcatccgtcaggagagtttcttcttgcaggtgattttctattatagtttgaattcaaagagaaaaaggttctctttgaattcaaactatgattcagatgacaatcttttcatgatattgcgaaactgaaaacttggcctttgcaggaaccgatcatccaattccacatctgtacgatgtaaacacatatcagtgctttcttccttcaaacttccctgacagtggagtaagtggagccattaatcaggtacgtcacacgttatctgataaatgttaattgtgcgttctataaacatctcttaagatgatcaaggattcatggctgtgagattcatggtttttttaggtgagatattcttccacgggatccatctacattacagcctcaaaggatggagctattcgactctttgacggggttagcgcaaagtgtgttcgctccattggcaatgcacatggaaaatcagaggtcacaagcgcagtgttcactaaagatcaaaggtaaaatgcagactcaatcaattatctctgagaatcactagtttttcccaatagttcatggcagaacaattgattgatcatatggcttttgttaggtttgttctctcatccggtaaggattccacagttaagttatgggaaataggctcaggtcgaatggtaaaggaatatcttggagcaaagcgggtaaaactgcggtctcaggtgactcgttttctcaaccttttgagacaaaaatattcacttcgtcgactaattctaactggccttcactgttgtgttttgcaggcaatttttaacgacactgaagagtttgtaatctccatagatgaagcaagcaatgaggtcgttacatgggatgctagaaccgcagataaagtggcaaagtggccttctaaccataacggtgcaccacggtggatcgagcactcgccggttgaatcagtctttgttacttgtggaatagatagatcaattcggttctggaaggaatccgtttagatgagaatccaatcaatcaaagtagtgtattttattctcttaaaacataaaccatacatgaaaaaaaaaaaaaatccgttgttcatgttgctttgtagaagacgcaagtaatcttccaggtcactgcaaaagaacgaaatcaaagcaggtgagcttcaaaaccagaattacagatttgttgaggtttgtttctgttgtgaaacttactcagggctgtagtcactctccttctgtcggaggttataaacctactgagcttcgcatgcgggaggaacggggttcgatatcccgcacctccatcttctttactaaatcgagtttttattttattttgcattcaaaacaaaaaaaattagtgcatagagtcttcataaaattaatgcatattactgtatttcttacttaaatgttgttcgttttactcttgggagtttcaactctattcaaatttataaacggctaattaataaatgtttattaaaagaatccaaagacgttaatcaagataattaatactatagttttgttcctttccatttaaataggcaagtatcttattgatgttcataaatcaaccattaaacatatattttgctatactaaacaaagttttctttctttgcttcttctcaatatctcagtatgtctactaaaaatgtgatttcatttttaatggtcatatgcatcatagtctccgtaaatgcaagaccacttttttcgtctatttttactgatccatatccgtaccttaatagtttaccaggattttttcatgtattcagatgttattcatctgtgatgaaatttccaatatgcgttatacaaactactgaatccgtacgtaataagcgatgggaaatcagtccttattgttgcaaggcatatttacataccaaagattactgcttgccaaaaattccctacatgccaaaatttccttctttcataagaaatcattgtaaaaaagttgttcgcaagtaaaattttaatatatctatatatatgtgaatcttttaacaaaaataaagttattatattttaattaaagttattatattttaaataaagttgatttggtaaatgttgtactcaaaaactacaatgatacaaataatagcacttcaacatttacttttcaatgtttcatctttctttagttaataaactttactgaaagcatccacgctttgcaagacatataaacatatagttacaggtttaatctttaaaaagaattatgtatttataattacgaacatttgaaaattcaaatcagcaaacatggtgaatagaatatgtcttgatcatggaaatcacacattctaatacgtctgaccactcaagtctttgattttgtagccggtaacacactatggaagaaaataattaaaatagtgtattttattttcttaaaacataaaccatacatgataatacaaatccatataaactctggagaaagatttgcttatgataatgttcctttggagagttgcgttgttcatgttgctttgtggaagacgcaagtaatgttccaggtcactgcataagaacaaaaaaagaagcaggtgagtctcaaaatcagaattacagatttgtcgaggtttgtttttgttgtgaaacttacttagggctgcagttattctccttttgtcggcggttgtaaacctcgttggtctaacgttcttactcggtccacatatgtactgttgtttaggtgccgtgaacatgaagtttgccggcatccgagcagtcttaaccgagttaccagcgctaccaacagataactggaatgcactttctgaaccaggttttaagacaccgcttttgcagcaattagcgatctgctgattgaaaggagttccgggaagcaaatcgacaactgttggcttacgaacgcaggactgcgggatatttcctttgaacatggaacaacctccttgccctgtcgtttttgcacccaacatgttccagatcacttctttcttggtccctctccagctcattttccatcctggaatcgaacgttgcttctggtaattgtaggctgtaaccactgcctgagatagagtcaattttgaagttaaagcagactctgagattttgtgagacacgaagaagaagaacttacaacgtagccatcaggcgtccagttcaagagatcccatttgactgtgatgtttccatagttgctggtgagagcttctgcagattaaagaacataaaagacttttgaagttttagaaaagacaaatgcaggtgattgtgtacaaggaaatttacctgtagaaatgagacaggaaaaagaaaccaagagcaggacaatcatcgtggagaagagagactccattcttgtggttccgatgtgaacagagacagagagagactttgtaagaatatagatcaaggcgacgactttgactagtatacatttgcacgttgatatgcctttatacacgggatcttgttttaactttaatatattagataattaacaaagattagctgacttgatccgttataattaaactcaacttggatgtacaagagaagcattcaattaaccaagaaacctaattttacctccgattcttgagccaagcatgaactcttagtaaacgttacactgagacaaaacaaaagattattgggacaatttgctcatgatcaagcaaaatgatgagtactcttgacaatatcttaaaaaggaaagaacaaagacaataatctttagaaaattctatcagatgttgaagattcatcagcatcacattctccgtctcatcttattgtgcggtttcttaacaaaactcatattgatctgcttgagccgtttcttcttcctcgcggttttctcaggcaaagtctccctcttcttaacattgctatccacttccttggtcttctttttcataaaccgtggatctactctgtattccttagggctaacagcgattcctttcttagccgcttctttatacaaaccattagctctagtcagctggttattcgcacacattttccccatcaacaaatcataagtcttgatcccaggtttgcatccattagctttcatgctcttaaacacactcatcgcatgctcaagcctctcaatcccacacaatatcttgagaaacccgtaatactctttcttattcaaaagctcaccatatcccgctgatttcatcttatcgatcatttcgtccccttcaccgatcctcgctgcttgatacaaactcctaatcagaacaagataagtctcagcatctggttgacaaccccattcacccatcctaccaaacaatgtcattgcttcttcagttctcctgattttacaaagattgttaatcaacacattgaaagtctctgtgtttctaggtacaccacgaaactccatctccagcaaaaccttctctacttcaggttgaagcttaaaaggatctttcttcctacaaagcttacaaacacaatcaagcatcatgttatacgctttggttcctatctcaaatcctcctctagacatttcaccagctaacctagttgcttcatcgagtttctcagcaatacaccatccactaatcaacaaatcacatatattctcatcaggaaatatttcattagcagtgttcttcaccatcttctctgcgatactcgcgtgtcctttctcacaaagcttcttcacaaccaaggtaagtgattctttatcacgtttcaaaccataatcattctccattttctcgaagaaatcagtgacctgcttaggtctaccagctctaacaagcctatcaatcgccgattctagtgttttacctccggcgatacctttgtatttcgagatgatctctagcattcctttgaaatctttccgacggccaaagtaatcgacgaaaaacgaaactgtttcatcggtgtgagagaagttagagttcgaatctaaccactcgttaaaacctagagccgcgcgaccagcttccggtgagagattaagagtttggagaatcaaatcgggattaggcgtgatgtgggagaagctgagattgaatctctgcgaaatggtttgagactcggcgtctggattcccggtgagctccttcgagaaagagagagcgatctcattcgaatccaaagattccgattccgcattcgtttcagatgagaagaatctagaaggaaatgttgagaatatagaggaacgggaagggggaagaggagaaaacaacggcttggaagaaatgatacggggctgagattgaagagtattgacggaggaggaggaaatgaagctacggaggagaagccgtcggagttgcagagacggtaacgacggcggcatttctgatttagtgagagaaaattggtaactagagagttagtgagaaagggaaatagaataaaaccctagttcaggatttaggaacatcttgagtaattgggcttcgtttcgggccttgatttgcttaagccccttttgattgtttaatttgaatttattatgtatctgtttcatttttactcaaaatgggggtgtagctcatatggtagagcgctcgcttcgcatgcgagaggcacggggttcgattccccgcacctccacctactctaataataatcatgttataattttattattcattttttttttaatttaattaatacatagagtcctcatagaattaacatattcctatatttgttacttaaatgttgttcgtttctagaagttttaacactattcaattttataaactgctaattaataagtgctattaaaagagttcaaagacgttaatcaagataattaataccatagttttgttcccttccatttaaataggcaaggattttattgttgttcatcaatcaactactaaacatatattttgttatactaacaaagttttttttctttattttttctcaatatctcagtatgtctattaaaaatgtgatttcacttttaatggtcatatgcattatagtctccgtaaatgcaaggccaccattttcgtctatttttactgatccatatccgttacttaatagttttccagtattttctcgtatattcaaatgttattcatctgtgatgaaatttccaatatgcgttatagaaactactcaatccgtatctaataggcgatgggtgattagtccttattgttgcaaggcatatttacataccagagattactgcttgccaaaaattccatacatgccacattttccttctttcataagaaatcattgtttaaaagttgttagaaaatagaattttaatatatatatatatatatatatatatatatatatataagtcttttaacaaaaataaagttgatttgctaaatgttgtactcaaaaactacaattatacaataatagcattacaacattcacttttctgtgtttcatctttatttagttgacaatatgatactttacatggacatagacatataaacaaatagttacaaggttaatcttcttaaaaaatttatgtatttataattacgaatattgaaattcaaatcagcaaacatggtgaacagattatgtctggatgatggaaatcacacattctaatacgtctgaactctcaagttttttattttatagccggtaacactataggagaaaataataacatattaataatatctatatttttgaaaagataacaatcatgactcatgaaaccgtgtctccctggcctccagagacctccgtagcaaaagtaaaaaattattttgaaatttgtgagtcttcttctaacttgatcattttctttggttgcatgtgagtcttatatatcgtgatgaagtcacaaaggttcttttcataatatttatcttcatgtgaacatcagcacatgaatattatgagtcttatacatcagtacatgaagaaccctgaacccatcacttaagcttttagtttatcgtcacgcagtagttggaaaatatggaaaacgaaccgaattatatattaaaaatacctttataatttcggatgcctccgtagcatagtggtattgcgttcgcttcgtaagcgaaaggccgcgagttcgatcctcgccgggggctcatattgattttgtcttctttagaaaatttgtgagctctttctcctttatttttacagcccaatagcgtgttccctttgtgcgcttatgtcccggtcctccacataatttgcttacgaatatatctcacgtcgtcatcattttgggttagtcagatgctcagcataggctatgagaatgtcggttcctaacaagcttccaaatacatatatcgtcagggatgtgtgctaaactaatctcctaatacatatatttcgaacctaatctcctaattacttgtttggagttaggagaatgatcgttatttgtatccaacactcaagaaatgacataaaaggcattaatatttatatcgacatcaaactaaacatgtagactatatggaaattacaacaactccaattaactaactataactagaaaacaaaattatttcgtaccgtgaaaaatctagcaaaactgtatatatattatacagtctatattgagaaatgaggttcagatagatctccatgtcgatataaatgtagaattggtaaaatgtttatttgaaatttttttattacggtttttatactggcctacataaaatatgattaaaaaatgtagcatacataataatttttgcgggaaaagaaaaaatattgaaaaagaaaaaggataaaacaaaaagaattgcatgcctaagtgagtgaattatgtgaaaatgaaataaagtgggcctgtttttttttttcttcatctcttaacttgaagcatgccggtgatgaaaaagaagtttataatcatatggaccatgtatattatcccattttaagataaattatctcttgccactaaaagattctacaaaacgtacatattctcttgagcaactacaattctcctctaattaactaagatatatatatatatatatacatatataatgtaatccacacatgtaagataagataaccgcttatcattataggccccttgtaagtttttttctttcaaaaaatcgcatgctcttacagtgagtctcactgcaataacaaaatattagtatttaattatctttagagaattataaaggtttttttcaataacacggttcttagagaatgtataactttcgaattccaaccatttttttaattgatacaaactgtaaacccaatctcgcgaactaaaagacttatttaagtatgagaatataaattttaactattagaagagatgtggtgtacgaatttatagatcatcttggttgaaaaggaaaaaaaatggcgaatctttgaattttcttgacaagtgtgtgcccatctatatctaaacacatgatttagaaaagatcaaaaggaccaccaaaaaggaaaaataagttatgttttcaaaaccaataatttaccaatggaaggttaatgaccctacaacttggagaagatgatagagagaagagagagagttattgaaaaagaaagagagagagagagagggatatgactaatattggaagatagggatcagtgcttgactgcaattcagttgctgtcttaactgcttctcttctttccctttccttctctgaccctccaatcccaatactcaccatcatctacttaattctcctttttctttacatatttattcttatttatttgattttggtggtattacgaatttactaccacgacctcaaggttataaggaggttccactattatatatatcatgtgtcaacattatatatccaattatttagtagaataaggaaatatatagggagataatctatatatagtctacactagagttatatacgaataagaagcatattattgacaatttttttttttttttactttcttacaataatatgtgatatgaatcataggacccaatagattaataaatgaaggattatttttgtagtataatttttaaaagactgtataagtttgtgaaaaaagttaagtgtggatacatgcataacagaaaaaaaaaaaaaaaaaaaaaggaagagaataaccaataataagttataagaatcaatttggagtaactaagttagatttttctcatgtttaaagtcaagtttgtttgatagctttgttattatttcaaaaaataactaaacggtggaatagatatgtgtaagaaaaaatcttaaaattgtgtgaaaaaacatagaacttagtttgaaacaaaatgaatacagtatttaattaaagtgaggaattattaagaatataacgaaaacgttgagaactgtaaataagcatgttgatccgtatgatcactcttttacatgcatatatctctgcattgctttcgccctaaatataatctctctcccgcctcaaacacgtgaatgtgaatgaacttatgaatataatcatatcacattttattagctctcttgttgaaatcagttgtgtgttgactaaagactaccagcgattatttttgaactttgatatttgagaaattgatgatcaaaagtcagcaaatacggagatgaggaaaccgctagctattacaactaatttgccttacatacgtactattattatatctatattcacagtttttttggtaaccatcactttcttaattagtacatatatactcacatatgtatacataggttatatatgcatgattgtgggagtgactcatatatacacacgagtctagggttttggcatgcattacataatacatattgccgtgcttctaggcattgtgaacagtaacctatctatacttctaagttcgtatctctatatataaagaatatataatatatatgcatggatatatatttatgttcttatgaatacatttcataattaatatgcccgtacaaatatacgtagttataagaaaatgaatgattgtggacataaaattatttgaaacttattggtgtttttctgacacatgacaagcaacgaccccttcgatttctttcatttgcattgtgaacaaacatgacttttctatatacattattacattggcggtaaaaatttgtacttttgtagttaattatagatatatatatcaaaattaatttgtagatacgattatatccaattcaagtcctgactatgtaatcattgcataatgatgattaagatagatcatatcatattttgattaaaaaaattacataatgttttttcttagcaacattgtgatgcctatatatatatatataatggtgattggtgaaatgctttgaatctggtcatacgatggtagaatagcatatgggtttcgatggacctatttggtttaaagttgaattagggttatgttaatactctttttttctttttctttttctgaatctgtttttcctccatcctattttgaaaagtattattgttctttgcgtttttattcactttctcacattcgtgataacaataaaaaattccatatatgtaaaacctaaatcctaacatatgaaatatgattaactaatctagattatggattaggatgaaagtgctagctagttatgagatacctatattgtacaattcatttattcgagtgtatatattcataaatgaatagagaaagacattcaagtagaattcatataatttcttaaggaagcaaaaactaccttcaaaactaaaacatatatagaaataacaaccatcctcgcattatgaatgtctttgttcgaatctaaatccgagactattaaaaagtgtatacatacacgaagaagatacataaaccaatccaacaatacgcatatatatcaaaatatagaagaatacgtatacatataacattttcaatgtatagtgtagatatataaaatcattcaagaatctgattcattatcgctactatgatgatccgtatcatgattcgagctcatcaaatgatgaaatggtctaatcaaactcgtattacccggcatcatgtgttgctgcgatgcggtatttgaattcgagctaaagagctgaagatgaccggctccatcgacgacatgatgatgatgagaagctccaagaaacgaagggtatgtcgggaatagagagctcattgccggaggagtaggaccgaaaaaaagctgagatccatctccggcagacgaggaaggaggatgcaaattgagattattgttattattagcagcaacattagatattgcgacagtaacgttattaccagattggtctaacgattgttgaagatgtccaaggttgtaataagctgaagtgttgttgtacggattggtcagaggaaattgttgttgatgattggtgttaaacccttgatgatcttgattactattctcgtcgtttttgatccattttcctttatcaagatcaaaactttctctttgggtcgtagttgtatcggttaatcttgctcttgttcttgaagaaccaccaagatcccaattttccaagaacccgagattggttcctggaaacgttgttgatgtagttgaagatggagattctccaaacccggagtttccgaagatgagatttggatacatctggttaaatccatgtgggaattgtagaggaggtagcttgtctacgtcatcttttgctgcttcgagtaaccaatcaatgactttgcttggctgactcagccctaatcgatcttgaaggtcgtagagttgaatagctgtaggtacggacaaccttatcctccggtctcgaagaccacggactgtacatactttgctgtgtctgtctttgccaccgaatgttcttgagactcgaacgattcttggattcctaaaagctgaagtccattgccttgaagatgataccgaactcggctgttgttgttgcaacatgtggtttaagtttacttgatgattttgattttgatctctttcttgctttgcttgaatctcctcttcatcacattctcctgatctcatctctttaattcactcaacaagatcttcagtactcaatttggtgtaaagaacagatctgaaacaagaagggaataaattgaccaatttaatagaaaataaatcaagaagacaagaattagttgttgttagctttcaattgaatgaaattgttgattttaaatatgtttttggagcgagattcacatgaaaacaaagcaataatatctctttcttgagtttgcatcaaagaaaagaaagctcataagaatttgaaattcaaacatgttgaaggttatatgttcttacgttgattgaatactggtaagcttgagtcctatttcaagatccagcttgatagagaagtagaagaaggaggaagaagaagaataagaaagagataaggaggcagaggaatgtgtagtatttctttttttggaaactagaattacatatgtatattataatgattggggaagttaaataataaatgaattagatatatttttaagtattatattccgatccctagggcttttttttttcggtatgaaaggaatttatgcagaaggacaaaagaggagcaatttatgtagtgtattgatactgtgatgggaatgtgcatgtttcgttacactcacagtcacataaatcttatatatataaaactttacaatagttgacaaaaaaaaaacctttacaataaattttaatatattttagtattcaagttttggttccctttccttggtgttagacattcattttgaattttatatgatttaatttttacccaagtttgtgatctatgttgtcttcttatcttaaacaaaaatataaacatacggttaaggtcatttaagagaaagtgtacggttgacaaattaatagttataaatggtaacaagagcttttaaagtgaaaaaaaaatatagtacatgtatagtaaattaataatggtaaaagtggtttgaactttgaactgtgaaacatatatatatacaagatcgagtttgaaagttttatgaaaccaaattttagtaaattcaaaaaaattcataatataaacaaatggaaagaccaatttatttacagtcgtcgctcatttcatttgagtttctgtcgttttggaaaatgaaaagttttatttgtagataaattgttgaatttcattattaacgaagcaacttgttgaaaccctaaatttagtgataatgaaatgtagacttgttaaaatcaaactgttgggaatactgcttttatttctaattaactacttgtgggttatatttttaagcatatatagaaaatatccatatatataaattttttgttttaatatcaacatatataagtaaatataatagagattgacagctagaggaggtaagggtctgtctctgagatagagaatggaccaacgagtataggtttttctttaaagcatctaatgcctaaatactcacaaagagatttgtggtccacttctcttctaagtgtctttgccactgagatttttgcccacaatcacaaaccattttctttcctctttgtatccaacttgatcactactatatataaagtcttctgtaattgaccgcgcctttaacccacactggttgtttacgaagaatattgagttactgcatatatagtactgtacggtttcaaattaagaactctggttttgattatgtaatcttgagatgaaattgactgtaacaaagttacatttgtaattttgcaagaaaaagttttgtatcagttttttggtcctcacttaaatatggggaaaatattaaataaatatgaaccacttatatatcgtataattttaatgatcatataaattgtggtaactgttcatctcaaatcaaaggttccatggatttctttttccacatcggttccgtagattatccaacacaattttaaggcattttaagatgatcacaacacaatgtcacagattattttaagaaggcgattggaagccttcattaaaggcatttccaaggatctttccggatatggtggtatattttaaacacaaattattcttagagcgagatagacttgtacatttcatttttttggtactgtgatagacatgtactaacttttatatagatggtgtcagtggtatattggtctaactaatatatgctgcaacaatattaattatgatgtatgttcataaaacttgtggtgaaatttatcacaacaatttttttgtcccaacaaagaagcttgccaaacctacccgtcgtctaaagcagcccactaccaaagccgcctttagtcattgcttggttggtaacgtctgtcaaagccaaaaccttaatttctttcaaaattgatttaacgtaaattcaagcttaaggaataagctagaaactattaacaagatcatattttagggaattttgggaatgtatgacaggatttggcaacgaattatgtgaatacaattaaattgttcctgccttttatatatatacacataatttaacttaatcatcatgttgacaaaaaaacaaccgaatcatatatagggatggatgatgatgacgacgacgacgacgtgacttgagcttcttggcttaatttcctccgacttttggatcatatatatataggatcttgtgatcattagttgtacagaaaataccaaatacgttaaaattgtatgtttgtatacatgtaacatgtatgtatatgttcgacacttctgactttaggctgaatttatttcaaaactctgccaaattgaaatttcagtctgttcaaataagttctccatctgcttaaaaaaatataaaaaatgaataaccaggttgtttttcctaaatagatctagctaggcaatagaagccctaactcacggctcacgctgtagattaattacgtcctaattttaagaatgtttacatgtcctatacttttcttcaacataattacgatttctctttcttacagcggaatttaaattgaatattaacgacttgtaagggaaaatgttgtagatgtaaaaaaaaaaaaaaaaaaatgttgtagatgtaggagaagaaaactggtagtaattagcatcatatcaccgaataataaaaataaggtttctcgcagttgactatccgtaagaattagaaatacttactaatttgtttattcctaccaaattttcatttgcaaccaaaaatatttgtatatatgtgattgatccaaatttcagttttttagttagggaattggacatttttgtcttttgatgtgggaacacagtttcttgcatccaaactcacaacatgttgttttctttaaatctttaaccatcaaagacattttaggtcaataaaagcatctttgttttctaatgtaaattcattcattatatactttatcaaggttgaataaaaaatcttaagaaaatatagctaactagtccagtactcctcctaaacttttttttgttgttgccaaatttactggattatgtgatctaataatatgaaacactctaaacaacagaatctcaataatatttatcaaaacgaaaatgatggaactgtgtgtatttttccacagaaataaaagaaaataagacaagttcgtggtcttaagctatcgccatcagaacgtgtacagagtcacacaaatcggtctatataccagaattctaacaaatgatcaaaaatatccaaacttgcatacttgcgttatgtgatatcaacgaatcataacatccacatctctcttttattaattcaactacaagagagaatcaaaacaaaagaacgaaaacggtgtcgttcattatctaacagtgaacactacacgatagcctaagaaggtcttcttctttttttgtcttttggtactgagccgtcgttttcgggtctgaacgtcagtaaatgcagaaggctcatgctgagacagacagcgatatgtccttgtaagagacaacaccaaaaggagtaaaaaccaccaaaaaaagtaaattatttaaccacataaatacactacacacacatccatatatttctatacttatatacatgctgatgctgacattatgacttacatacataactgcttctcttttttgtattattgacgtagtaaaggtgtctccagagtttgctgcactgaaactactcgtttctctctgtgtttttactgttaacaatatcaaaccaactctctattgatctcttcatatttggaaaagaatatttaataatattaataaatcacgagttcatatataagacaaacatatatataaataatataaggttttagatgccaagacaagtattggcttttatggataaatggatatgaaagtaaaggacgtatacccataacgttagacaaattgactctgtttgttgaactttgttttgtaatagtattcatttagattcctttctttgtcggtaagccaaatagcctcgagggattgagaggagacaaaggggaagatatgaacctgcaaaggatgagaaaatgcagtaagaaagttactgtagagtagtgaagtgcctttaatgtctgggggagcaataaacaaaggagacaattcacaaaataaattattatttcagataatggttttttttttcgagcttggacctagaaaagtaaatcaatcccatgactcaaaaactgtgtatactccatgtattgaacttacaaatgctgtgaaacatttatgcagtataaatgtataatggttgtgactggctttttagtatcagaaaacatttatagaaaacatgtgagttcataatttaaaaaacattgagctagctagtgtgtgaagaagaactcagagagaaggagatgaacaaaacagctagtcagagtcagctatctccaaattaatcatgatttatattcacaagtttttctatttttctaattttacatcaataccttaattctatatatgtgtaaaaatattcagcaaagtaattaaagggacaatatgatttttagggttttatggatcaataaaataagaaaatttgtcttgattgacctgaaataagaattcctcaacccattggataaactttaaaaagtcaagatttctcaaatagatccaattagttttactgacttattgaacattattaatgtactgattaagaagtagttcccgcactaaagtataggctatatgcaatactaagactgataaattggtagacaaaaaaggtaaacaaaaaatgcaacaaattgtcaccttaacacaattttgtactaagcttttacttttacgactctccgtcacacgcgttctcattctcttgaagttggacctcttctacgggttttctagttaagccatctcttcttcttcaacatcagaactacattttccggattcaaagtgtttatttcaatcggcggcgttgaatatacgagatggtacgttgtctccggatgtaagagagccttttttaaacgagttaagaggaatgaatataatcaaatcaaactgaaggattaataattggttaaattatgagctattccggtttggttaagtcccaccgttatattcatctcctctgaattaatcaaatagtcaattattctaattactgttgattgtctcattaacttggaatagaggaggtttggactctatttcagttttaaaaaactgctaattaaaccagattaaaaaacgaaactactaattaaatacagtaaaatttcgaagacgtttcaatacacaattaataccatagctcaatttcttcccctataaaaacagccaaggatcttactattattcatcattcaaagacaaactcgagaaaaataaactttgaaacttttttttttgtgttttcatcatggctatcaaaaacttgatttttattatagcggttatgtgcgtttttgtctccgtaaatgctcaactaccacaatttccttttccattttcattctaaccgatttctggtatgccaggattacctgatattacaaaatgtttgtcatccgtgatggatattccgggatgcattgcagagatttctcaatctattttcacaagaaaatttggtaacttaggtccggcttgttgcaaagcatttttggatgtcgaatccaattgcatgccaaaaattccattcattccgttatttccgccgatgctaaaagaacaatgttcaagaattgccggtgctactcctcctacaccaaaatagagtcttagtttatttttaaaacatataaaatatgaattttttgtcttttcaacttctttcttaaattttataattctcagattactcaacatgttttacttaaaaaaaaacgatgatacattaataacatttgagaagtcgtatttgtgtttaatttttagtcgttctttatttctaatgaataataccttcaaacatcgagtagataattaatttaatattgcaatatttcagaatttgttgttttcataaatcttttagatacgtcgtatagtaacacaaaatctgtcaacggtttataactttttatatacgacccaaaaccattctcaagatcaacacaagtaaatcctatttttgtaagtttctaataaggaaatgaacaagaaagacccaataattcaagaatgatgaagcccaaagtatgagtcttcttgcttcttgggccgaaccgaactgaactgaactgaactgaactaaagctaaactaaaactaaagttggtacggttccttctcttctctctctctctttctccgtctgtcgctgtctctctcgtcctctcctctgtttcgtagcttctgcagcagatctctctttgtccttctctctccctcagatcactgtaagtacacgacacttcacttcatttcctaattcgatctgtttcttttactctttctcgatttgcttccaatcttgatctcttttctctttctatatcgagcttgatctgactcattctttattatatacttctcttctcgattccttttttgtgaaaaaaacatctttaaaatttcatttttgttagttgcttcgtgtcttgattagtgttgttcttgtaataaatgttgtgatcttatattcattctagggttttgtgtgtgtgtgtatgagcttaatttcatacagaacagtgaaatcttagactttcgattagatcgttgacttttatctgaattattggaatttaggttattgaatcagtctttaggttattgatcaaaatgatttacttcagagaagattgtctcaataattactaacacagtggttgattattgataatgttattaatcctgagctatgtaaattttgattctcaccgtatatatatatattgagtgtagatggcacagcaggaagctagtccttcccctggtgctgaggttgttggtcgtgcctttgtggagcaatactatcatattcttcaccaatctcccggtttagttcatcggttttatcaagattcgagctttttaacccgacctgatgttaccggtgctgtgactactgtcacaactatgcaagtgagattatcattaagtctattactttaacaagattgctatgatgttctcttttgatttatattaacttggtttcgctatggatttcaggcgatcaacgacaagattctgtcgttgaaatatgaagactacacggctgagatagaaactgctgatgctcaggagtctcatgagagaggtgttattgtgctggttacaggacgcttaaccgggaacgataatgttaggaagaagtttagtcaatcttttttcttggctccacaagacaaaggatactttgtcttaaacgacgtgtttcgattccttgaggagaaagaggtgactgcacaagcccgctctgtccccatcaatggaaccactagggatgttcaggctcctattgaaccaggtaggatgaaagttccatgtttttttttttttgtttcctaccacacatagcacttatttatttcaagttagaatattaacatcggcttacttcttgtcagaacgtgttgttgttagtcacgagcccgaggtagaacccgagccagttgcttctatcgaggaagaagatcttgacaatgtggcggaagtgtatgatccttctgataaagatgaaggagttgttgttgacgttgagcctattgaacctcccactcaaataagtcataatgaaatcttatcagtgcctcaaggagatgctcctaagcattcttatgcttcaatcgtgagttgaaaccgctcactaacttaattcttttgttgtttctcaagattgtttttctgttgttagtaaaacttatgaagtcatttgtgtgcctcaacagctcaagcagatgaaaagcagtccagcaccaacaacacacgttgctagaaacaagccaagaccagctccagtcaaccagaagctgaccgcgcctcctgctgagcctgcagcaagacccgaggcttcagctcatgagaatgttccgaatagtagccatgttgatgtggaaggtctgtaaattcttttcattttgctgtttgaatacgcgcatttcccttggttattgatttttgttttgtctatttgttgttacagatgatggtcattcgatttatgttcgaaatttgccgtttgactccacaccaacacaacttgaagaggtgttcaagaactttggtgcaatcaagcatgaggggattcaagtcagaagcaacaaggtttgatatataaatctacaatctcctccaaaaaccctttgcttattggtcccttacacgtatttgtgactcgcagcagcaaggtttctgttttggttttgtggaatttgaaacatctagcggaaagcaaagtgccctcgaggtaaaaccatatatagccttgaaaattctcctaagtcttttcgagctcaggtgtctggtatatgtttcggttgaattagaaagtctgactctttgtgttggtacatgtaggcctcaccagttacaattggagatcgtcaagctgttgtagaggagaagaaaacaaatagtcgaggtaacaaacatgagagacctcatcaagaatcaagaaaaagatggttgatgaagagtttttgtgtatttaagatgtggctaatctttttttttgcaggaggaggcaacaatggaggtagcaggggaaggtacttttccggaagaggaagtttccgaaatgaaagcttcaaaggaggacgcggtggtgggggaagaggaggctatggaagaggaggaggtgagttttctggtagaccaaagagctcaaacccacgaaatggaggagaaggttaccaaagggttcctcaaaacggaggaggtggaagaggaggccgcggagaaggaggtcgtggtggagctcgaggtggtggttcatcttgactttgcttttaacgctcctctacaagagagtagttttaatttttgttttgcgtctttctttttgcctactacttgagttgatgtggtattggcttttttgtcggtctagtttttcaatattcttgctttttttcctctcttttttgtttttcatctttcaatctttctttggggtaatgtactcttcataaacaaacattcaatttcataaggaatccattatagagttgtgttctttacgcagagatgttcttactcttcgttttgaagttaaagtgagcagaagtgaacatgaccagtttatctaattcgttgaatgcattagggaactcgaaagcatagaactgtaaattagagataaaacaaagagctgcaggagccaccaagaacagacaccagagcttttaaacatctttcaacttaaattgtataatctgtcattgagaaacaaagcaaaaagaaaagaacatacaaattacgagtacaaaatggattaaatttccctagttcatatggaaaacttcaattcaaaactttggtgagttatcggaaaacagtaaaaacagagctattttatcgtttgaacttcttagaagacttcttgtctttgttaccacctctttccttgttgcctctgtccttgttacctcccaagaacctctcactttcttcatcatcttctccccttctcttcctacctcctgattctttcatattctaaacaaaaattgccagaaaacatatttcagttctctataaatcaaagttatacgcaaaaacgaataaacctagaactacaaatgcagagtaaaaataccattgcagatagctttttcgcttctgcaactctctccaacaatgacaagacttcatcttcctcagcgggatattcaggtagtttcttgcctgaatgtcaacaaatagtcatgtctgtctccatgatagaatcaaacaataaaaatgtatccaatagtttttttacttaccaatgagtttttctatttgtatataccattcgagctcatactggtttacaagtgatatcccaacaccagaacgtccagcacgagcggttcttcctactctatggatgtaatcctataagccagatttggaaaatcaatgccggttctcaagatcatggattcatgagacacaagatacaaaaaaactattcatctgaagacagaacaagggctaacctttgaatttgtgggaatatcataattgataaccacatcaactgatgggatatcgagccctctactagccacatcggtacaaaccaagatattacattcccctgctttgaacttatttaaagctcccagtctctttgactgtgaacatttaaaaaaaaatgagaaaattttgagagaaaaggtcgagcaatgttcagagataggagcatatcatttacctgagtcatttgaccactgataggaatagctctaaaaccaaggctccgaagcaccaaagccagaaagcgagtaccatcacatgttcgggtgaaaatcatagatgttgattcaggcatttcactcagaatgtataccagatagcaatcctgtcacagtgatgaaattagggccattatagtcaaaaaagataaaactctcttatgtgattgctactatctatctaccccgctctgtgatgtaaataaggtaccttgtatttagcggcaacaaaccgatactgctgcttaagagtatcgacagtggaatatttggaggcagcttcaatctgaagaaaaccaacaaattaacaacggttataacctcaaaatatgatagctgtgacaagaataattccagtcatttagtgtctccataccttcacaggattcctcaaacatgccctttgaagttttcgaacctaaaaagccaaaacaaattcagtgagattaacccgttgttcctttttaatcttccactccaaaagattatagagtgacactttgatcgatcaaaatgacaacactctcaagcaaggttcctacctttttagtcatagtcgctgaaaaaagaaatgttttccgctcaagagggatctcttccaaaatctggttaagagatttctcaaaatcttcattcaacagtctatctgcttcatcaagaacctgttaaataatgtaaagtaaataccaaaatgatacgaactaagaacacattacaccgaaacgtagaagaccaacaaatataagcataaatttaccagatatttcaatgatttcagagaaaagccttttgtatcagacatatgatcccaaagacgaccaggtgttgcaacctatgaaacaacataccatacttagtactagattcggataagtgctgaggctgaggctaaaacaattagaacagaaagcgtacaataacatgaggccgtttcccaagagcaatagtttgttgcatcctgtctatacctccaacaagctggcacaaaaattaggtaacattttcggtttaaatccatacaatacttgttagcaggaagacataaattgctgtaaacatgagcttaccacagcacacctaagacttatatcagcaccaagagcttcaaactgttcagcaatctggattgcaagttctctggagatagaatcaaacagaagaatcgaaaccaataataagaatgagcaaacaaagtaaacactagaagaaactagataagcgaatcataccgagttggagataaaacacaagcgaagaaagcaggatccggtctacgtcctttcttaggctcagaatcataaacatactcaagtagtgcttgcaatataggaattgcaaaagctccggttttaccagaaccggtttgcgcaagtccaattacatctttccctgaaacacattagatttttccaattaattgcaatgataaaccctaacaatcaaaaagttgcaacctttacaatctcgcaaacacttaaactcagaactaagaacctctaaaacgatttaatcgtaaggaatttaccttcaagagcaaaaggaagggcttcggcttgaattttggaagggttcttccatcccaatctctcgcaagctttaacaagctcctcacgcacaccaagctctgcaaacgtcttcactacttcgttctcttcctccatttttcagtactcaccaacaaatttgctatctcctggacctcaaaggccgtaagggaatcaaacggcgttaaggaaaaatcgcgactttaagaattccggcgaggttcacggctttagataagtcgagtaaacgttagggtacaaatcagaagagactagtgtttgttggctgagaaaagagagcgagttctagctatcaagggttttagttatgttgttattttaataacctaattgggccaaatatgggcctgccttcttaaagtttggactagatatcacaaattacagtggtcgatgaaaagttatcttcacaaattacacaactctctatgactctacagctgtaaacacaaaatagatcgcttgtttttatttgttaatgataccgaaatggatggcttgtaaacaatgtaaagaacaaattttaagcaaaaccctaattttataaattgcagaaaggcttatattatacaaggaaaagttttgagacttttttaggccaatagagaaaaaaaaagaagtaaaagctactactgagatgttttgttcttgttggagatgtcttgaagcaacaatcttgtttcagcagcaaaatcaagaggagctactccttttacagttaccctctgtctcttctcaccgttatactcattctgtgtgacactaacccggaagacatgagatgaccatgttgcctctttcagttttgtctgatattcatttacttcaccttcctgtaaacaaatgtaaacatcaaaatgatgactatacttcttaagttctgacaattaataaaagctcatgtagggttttgtttccttacctctgattttagtttgttgagctcatcagctgaacatccaagaatcttctctgcttcatcgttgaatgacgaaatccaagtttctccagatgagtcggtgactttcaccgccattatgtacctagcgacaaccaaagtggacagatttgtaagatgtcggagaaaggaagtaaagattataaccaagtttgattatgaatcaaaagagtatctctcttaccttaagctgcattcttcatactttctctggcatccttcacaccagtaaccagagtcaagtgcttctgtcactttcttgttacaagtcttacaagcttggtaccacattgtttggtctggtttgatgaagcttatgtaagccctagtgctgaaaaatacaggctgatccagaaaatccaagttcataataagttcataactctataattaagcacttttggttcaggatttgaatttcagtgtttagtaccttttcttcgaataaagatggattgcttgtgatgtgagagagaagcactcggtcagtatacaaagaccgagatccatttttggcagaagggctcatccctgagccaatagaagacatggatatttccttgccttcagaatcaaacctgccaatgtcaaagagaatggtaattgaataacagagacaagtttcatcattttattttatcagctggctcaatccaaaaggcataccaagatttcaactttttagcttctggtgattccgggttaataaccacattgcttctgctgatggtagacaacgaaacacctggagagattggattctatgagcaaaaggttcaaacaagtgtgatttatccatactgttcaataataccaaatacatcataccttgaaaatctccaactttgagagacttgattgcaatcacaggtgactgatcagccatgtctagtagctcctgacctatgccagttgcaagatcattccacagggacaccacaacagttttccttgactcatcagccaaagttatatccctcttaggaatcatctcattgtcagttctccttctaatactcatggtaggagatacactttgaacaactccaataa

SEQ ID NO: 939 - DNA, 78379 bp, Arabidopsis thaliana
gatctgaaatagcataacaattaagttattatcacaaccaatgtataatttacctggaaaaagaatgttcaatgacaataaggctcttaccaataagttccttctgattaacatacagacccaactcttcaatgggtacgaagttgaattttgtctcagggatgaacatttcttcgctactagcttcctcaacctctgaattttcattcagtgtcatctcataatcattctgaactgttttgaactgcttgttagcgagttttagtgacccccttgatatataataaacctttcccaactggaatctgtcaaaaaacttccttgcagcatcattaaacatcgttgcttgaatttgtgttccctggataacagccaaataaacaaaatgagaaaccgcataaaggttgtctataccaagtttgagagatagtaaggagctttcttacttcttcatctgttagttcaacattgaagacacatccttcacccctagcgtttttgtaatttctcatcactcccttgtttgtaactcggactttgatggtccagtttccttgatatggatttaatgacacaagtggatgaacccttctagtcatggccattcttgcagctggtgcagcactgtcaaaatccaaacgaatttaagcaaaacactaataaaataaccatttgacagagacagtaatgaaacattgaagatcaaaaaagataatttgcttactttcccctttgttcactcattatctgagaagctgatttggctacaaattcctgcttcggtttcaatgtgataccagtagaaacaacatcattcagaggactgacaggagaatgctctagtttctgcttcttgggctcacgagcctcctcctctccgctcttactgtccaagttaatctcagaatcaagcacagaaccaacagcctcacatttagtcacaaggaaatatctgacacagagacaatagagaaacacacatgttagtaactgttgatttcaagaatcgaaccagagtgattatccatgtaaagaagaagcaaaagagaagtcttactttgtagatttgcttgaaatgtcgttaacagtgaaatcaatgagacgaattagacccaagttctggatcttcccagaaatgatttcaggtgtgagtgaagcagtaaacattgctttgactttcgtctttccgtcatttgcactaaatctgtcaaccaaaatcaaaacagatccatcagaacaaaatcggtaactaaaacccaaaactaggcaatatacaaactattatcaacaaacccagatctcttctatcatagagtcatcaaagtcgttgcatatcataatctagctatacaattgtgattgagagaatataacactgacctaaagctggaacaagcgagatttaagaaatcaagtaaaacccagatcatgaaaagccaaggaaacttacgtatagcgattgccgataggtttaagatccacaacttgaacaacgatctcagatcgatcggaagacgaatcaaaggatgggtttgacaaaacggtggagatggcatctggggtcaccgaagtctgcatctttctctctagatattgaaaaatgaaacgtttggtttctctttaatcagaatggtgaaaactaaaagccgtgagatagtgagaagaatgagagagaggtacgagggtttttgtaaaggagagagctttaagcgggagctattaaattcgattaattgttcccccgccgatttcaatttctatttttttggcaaaaaactcttaccgcttcttttcagtatctttccatttttttggcgcattttgttttgtttgataatggactttgtatgcgaaagaaactgtgttacaaaagcctttcacttcaggcccatagtttatggttttgtttttatgtgtgggtcttgaatccaccgtatcacacgttatgattcataaatatctaaaatttatttccaacaaatacaatttttttgtttcttaaagaacacatacgatattattatttcagaaaaagattaaatacaaaatccccaggatcaaaatcaaacaccaattccagattaaacaatatcaacaatctttaatgtttttgacttttttttttctctgaatgtttttgacaattgaaaaaaataattctacgcattgcgtgaggcaaacatttaaaattttaatttatataaagagaaaatttatacttcttgacttgggaaaaaaaaacttgctgaggtccttacttgatatgagctgtcaactactagtgtgagccgtacaaatataatcggacggttcagatcaatacattgcgagccagtcaaacttcaagtattgactaatcaacatcaacgtttattacactaatttattattgtaccccttattttccaaaaacataatacttttatccctattgtatccaatagctctaaaaaaatccaccataaaatgtgtttaatgaaattcgattatctctgacgacaacattatcaaaaatcaagacaagagatagaacataaaatgttcaaattcgtaaaagtaattgaaacaaattaaattcatttcgaagtttattaattacattttgacccccaaatttaagttaattagacttaccatccccatggttttcgtcccgccatatggggaagtcaatggacgaatcaatctcaattagattcggggcggcccaaaaatttatcattttctaaacctttcgtaatctacgaaattacgggatcgccttcgttggaatactaattccatttttcaactttgtttttataaatacagtttacgtgcaccacaacttttcttctttcccttcttcttccccaataatctcgctgaaactctcttgctcttgcttctaaaaatctgttctttgagactttgatcacacagttatcaaaatcataatctcttctttcctggtttttttttttttcttcttcttcttcccgtttcacggtacgtttactctgttcgatcaccgagtgtatgataaaatgtttctgtgaaatcaaataacatatcactttctaataaacatcaaaatttctccttttttacagaaacaagaagtttttttgggaaagccgttgacttgactttttctttggggtgttgtgtgggagcttatagtatggtaccataagtgggagcttatagtttggggtgttgtgtgggagcttatagtatgaggaaaaatgttagatttgaagaatgcttcactgattttttaccataagtatgtcaactggattaagcttaagtagtaatggtttttactatgttcatgtggggatttctcttcctctctgtttacttcattccgagatgacttgagattttttcaaagtatagttcttggagttaagcttacctagtaatcactttatataacatcccttcgtttacatttgtgctttcacctggaaacactttagacttttctctcttctgccgtgtgtatttagttgtctagtcaaatttaagttgagtttaggctctagtctttggttttggttatggcagagtttgattccaaggttcctgtttccggaatgaacaatcatgtctttgaggcatgtcaccatgttgttaaggcactgagggcatctgataacaacctggatgccaatttgagaaagctcctaagtgacctagagatgcatttgtcaacatttgggattgctgataccaaagttgaagatgcaggattctctgagatcaagaagagattcaaagaagctgtgaagagaatccgcagttgggagacaaaccagtcgacgatgtttgaagctggtctgtctgaagctgatcagttctttcaagccctgtatgacgttcaaacagttcttgtgggtttcaaagctttgcccatgaaaactaaccagatggagaaagatgtttacaaccaagctacggttgctcttgacatcgcgatgttgaggcttgagaaagagctctgtgatgttctgcatcagcacaaacggcatgtacagcctgattacttggctgttagttcccgtagaaaagatattgtgtacgacgagtcctttgtctccctagatgatgaagttattgtcgaagcttcttcacatgaagatgatgaacagatatcggacttttataattctgatttggttgatcccatcgtacttcctcacatcaaagctattgcaaacgccatgtttgcttgcgagtatgatcaaccattctgtgaagctttcatcggcgttcaaagagaagctctggaggagtatatggttactctcgaaatggaaagattcagctgcgttgatgttctcagaatggactgggaggatttgaatggtgcaatgagaaaatggacaaaggttgttaagatcattactcaggtctatctcgccagtgaaaaacagctatgtgatcagattttgggagactttgagtcaatttctacagcttgcttcattgaaatctcaaaagatgcaattctatcactcctcaactttggagaagctgtggtgctgagatcttgcaagccagaaatgcttgagcgcttccttagtatgtatgaggtttcagcagagattctcgtggatgtcgataacctcttccccgatgaaacaggctcgtctttaagaattgcatttcacaacctgtcaaaaaaactagctgatcatacaaccacaaccttcttaaagttcaaagacgcaatagcctcagatgaatccacacgcccctttcatggaggcgggattcatcacctgaccaggtatgtaatgaactacttgaagcttctcccggagtataccgactcactaaactcactgcttcagaacatacacgttgacgactccatccccgagaaaacaggagaagatgtcctcccttcgacattctctccaatggctagacacctcaggtcaatcgtcacaactctagaatccagccttgagcgaaaagctcagctgtacgcagacgaagcactgaaatccattttcctgatgaacaacttccgttacatggtccagaaggtaaagggatcagagctgagacgcttgtttggagacgaatggatcaggaagcacattgcaagctaccaatgcaatgtcactaactacgagagatccacatggagctccatactcgctttgctcagagacaacaacgactctgtaagaaccctgagagaaagatgcagacttttcagccttgcatttgatgatgtttacaagaaccaaacccgttggtcagtccctgattcagagctccgcgatgatcttcacatctcgacctctgtcaaggttgttcagtcttacagaggatttcttggaagaaatgcagttcgcataggcgaaaaacacatccgatacacttgtgaagacattgagaatatgctccttgatctctttgaatgtttgccatctccaagatcactgcgcagctctcgtaagagatgatgatgatgatgacttgagcctaatggactccatctttgttcttttgatcttttgttatttactcacttatgcaatgttttgtgattgcttacatgcaaataaagttgtagaatttttatactccattgtggggatgtaatagtaattggctatcttgtcactatgtcatctttgacatgcttaatacaaattcaatgtttaagtcggatttaacatttataatgacgatggttttttggttaactctatggactcatctgatttaactgaggtatggacttgggctatttgactaggagatatctttggtgacttcttactactactcacctctgtattctctgctggattttggcatatgcaacagcaaagtgttgttgatggaacaagtgaaggaagtgagctagcagtggaaagaagactgggctgattatgaatgtcagtaatgacgtctctccccagtcaagaagataactagagaattatgcttagaagatttgatggtagccttgctattctccatctattctcatcttcggaaaattgtctaaactatagtacccttatgtccaaaaacctacaatcttctgtcaaaatatgagaaggaactttttttggaccgtttgattcctgcattcgagtatgaagcagatgccaaatgtttctcttacttgtcttgcctgaaaagttatataaaactgaataagctgattcaataccaatcttttacccatatcctcatatgttggaccattactaaagggatagagaataactgcaagatgatgaatgctcatgccaaaacttcatctactaagccactaccctctcaactcggttccaaaaaaaaaaaaaaaaaagtctgcaaattcaggaatggaaacaaaactagagaaacgctctaaatagcctaaaacagcccacccagttcccacttaaaaccaaaggttggttcagcaggcagtagcaacagcatttttctccacaggtaactcggtctctttcaccactttcgattctttagtcacttcagccgcaactcctagtgctgctgcatcttctgaggctgtagtagactcttgaggtttcacaagattaatttttgacattacacctttgtctgcattggccaccaatgtctgcttggaaacaataccaaaatttgtaagatattcctgttatataattatatatatcaatgaattgttggtttcagagaggattgttgcctgttttttgatctgcaggtgtttgcttttcctttcttggataatcttttgacgattctcatagaactcaaaatcatcgaggatgcatgtcttgcttgcgtggtccttgaaaatcttgatgactttaatgccttgctcgagctttacctgcagacaaaaaaatggtaagaaaataaatgacagctcaattattagaatacaaaagatgataaataacacagtgagcggacatacttcctgtgtgtctctgctattagtaaccggcttgttctcattgttctccagagttatatgcctcaaggagctattagggatatctttaacgaaatgccacttaacagggaagcaaccaatccatttgtcctgttgccagtattcaacagtcttattgaaatcaacagggcctaccatctcggctaaaccaacaaattgtccactagtgtttacctgcatcaatgaaaacataagaactctacaactaaaactgaaatacacagcagaggttgataacatattcaaaaaaaattattcactcacagagaaaagtagaaacacgggacagccatctgacttctgttttgcctcgttatatgaggcatccagcttcttgttaccattaggagtgctggaccaaacactgtatttgatacttttatgaatatcatcttcactgtacgatttgattacataaaactttgcttctgtgtaggtctcagggaaatctatcttattgtagtccttgggatctaaaagagacacatcttcactgagtttctcagtctcagtcactctctgctccttcaaagacacagccatcaccttggaaccatcttggctgttgaaacccttagctcgtggacctctattcatctcatttaacccctcaatgttttctttgccatatccatgatacccgtttcttggcttgtaggtattgttaaccgcataccaattgggcatgtatttccatgagtcataaccgtaagagccatacccatagccattcgtgtaaggtccacacatcccataattggagtaaatgttgtccatgtatcctccataagattgaccattaccagctgatcttccctgctgagtctgcaaaataagatgataataaattaaacgaataaacaagtcaagattacataccaagtgattataactacagctcaatgaatgaaataagaacataccaggtactgatactgaagattggttttccctgaagcatagctcccagtgtaaccatgtcttgggtactgatatgctgggggatagtacccataagcataggcacccttcccatatgaaccctttgcgttataagctgcactttggtacccgagtttcttaaggttggatcccttgtctttggtcacacctccatctttagacaaaagactaggtttaccaattttggtagcctccactaactcatcattgagcaagaagtcattaccgtttccgccataagccccctgcaactaaaatggacactagcctttataagttcactctgaaaattactcttattgaaaccaaaaggcatgttttctgaatcactaaacaaaaggtgaacactaaaccacagaaaaatacctttgtttcagaatcaggagctaaagccttggttgttggatcaatcgacaaattatgtagcacatctgaaacatctatagaaaaaaacaatgaaggaataacaaaatttatgattttttcacgagtcaaaacatcagatcaacaaggaagaaccacgataattcttcataaaccctaaaagttaagaatttatgaacgatttacaaaaaaataaaaacaaagaagaagatctaaatccatcgtagaaaaacaagagtgtcaaaagaactaacaacagatccagctagaatgaagaaatcagcttatatttaaaaccctctgaacaaaaagaatcttcttagaagaaagctttgacaaaaactcataaagcaaatacaaatagacacagataatgaaggatacggtcaggatttgccatggctgcgtagtgagtggcttagcggcggaaacttgttgtaggagagaatgagaaaatgtgagagagagagagagtaaacgcctgactagcggagaccacaaaaccctaaaagcaacaactttttgagtatttcatgtttcgggtttaacccattcactttcgggtcaaaataatgtgattcgggttgcattttcagcaaatcaaatgggctgaaataacaaaagagaataaggcccagttacaaaagagaataaagttttgttaagggttaacttttttttttgttttccttttatcttttaatacttctatattataattttattgcaacaatattcaaactagaagtttaatgtataggattcaattacaaaaattatacgtagttttaccaaacttctaagaaaaaagtttaatttcgaaatatctttctaagttaagttaatcttcgaattcttcctttttattttcgtttaaaaaccaaaatagagagattaaatcgttataggcttagagctactgggctgtcacataaacgaatgacttacccaatgaaaaccccgtacgtgtctaatatgattttccaaaatcattttagattcaacggtcacgattgactcagatcttgcaacttcgctacataaaccctttctgggagaagtagggttttaagttttaacggacgcgagaaatcacagaggaagcgaagtcagtgtagaggtacttcactcttcacgctcatttcactctcagctttgaatctcgttagctgttttgaaggttctttcttttctgattttgagtgttctctgttatttcttcgcttttcattttcatggatttaggttccgatctttgtgttacggtattgaattcactttttggttccttagtagttcatgtatttgcagagtacgagttaaaaaagctttgattgtcgtttttaagattcccttcttcttaagggggaaaaagtatgaaacttgctaatttcttgatagaaaataggaaatgatatcatcattactttgaaattgactatctggtggctgaagtatttgtctttttcatgctagatatctaattgcgatggcttttttgagtaaattcgggaacatattgaagcagaccacaaacaagcaactcaatgctcaggtttctttatcaagcccttcgctttttcaagcaataaggtgtatgtcatcttctaagctctttattggaggtgagtctagttctataggcttttcatctgtttacttgtttatgctgttatgttactaactttatgattttgttttctcttttcttgttgtaaggtatggcttatagcatggatgaggatagcttaagagaagctttcaccaaatacggtgaagttgtcgatagtaagttactgatctatttagtattcttgtcaaaatgctattgcagtgtcttagtgaataaattaggcacttgtttcttgagtatggtttgtttagttgccttctgctaaccaagcctttgtgtttttacacagctagagttattttggatcgtgaaactggtaggtcaaggggatttggatttgttacattcacctcttcagaagcggcatctagtgctatccaggctttggatggccgggtaagttccattgctaatctatgaaacctttgaaagagttataatgtctgttaactttctcgtgtctcgttgggtttaactttcattgatactctccctgatccattaccttaatcctccctcaggatctccatggccgggttgttaaagtaaactatgcaaatgatagaacaagtggtggtggttttggaggtggtggctatggaggcggtggtggtggttatggtggtagtggtggctacggaggaggtgctggtggctacggaggaagtggtggctatggaggcggtgctggtggctacggaggtaattctggtggtggctacggaggtaatgctgctggtggatatggaggcagtggtgctggtggctatggaggcgatgctactggtcacggaggtgctggtggaggttatggttcaagcggtggctttggatctagcggcaacacttatggggagggttcaagtgcaagcgcaggtgctgttggtgactataatggaagtagtggttatggtagcgccaatacttatggtagcagcaatggtggattcgctggagacagccagtttggaggaagccctgttggcaacagctctcagttcggtggtgacaatacccagtttactgctggtggccaatttggcggtgaggatcaatttggaagcatggagaaaagtgaaacgaagatggaagatggaccaataggtggagaattcgaagatgttgccaaaagagcttgaaggaactagcaaaaaatgttgtcaagactgtcttttcatattaaatcctatgattagtagtagctagctattctacattgcttcctgaattaaacactttatcaagaaacaatctgcttttgctatctttgaaaataatttgtagcttgaaattgttttgtaaggtataatttgaactttaaccaaaaaagtgagctctgtatcaactttgcttgtggcctacacactaaccagaccttaagaattccatccacgcaaaactctaatgctgcctaatgttacagattatgttcagtttcttccatgagaaatagcatcttctgtgcattcaacacaacaggagacccttgttttgttttctcaacaatctgctttatcagttgcttctccatttcattcacaaagtcactgcttttttcttcttcgtcttcaataccaataaggtctagcagctcctgctcctgcaccttgaaatcatccttgtgatggctccaaggtgagcttttgtttgttgaagataaatcttcttggtgaatcccgctatcttgcatctccaatggtgaatcaccatcatcatcttccgagtcatcgtttattttcatcaattcgtcgtaagactcattgaatgcatcaagtgcttccccagttaagttcataaccaggggttgcatctccgcaagattagtcttggtgtgctctatagcaactgggatttttgattcactcttataggtcatcacttcacgggtttcccataatcttgaccatgacttcttcttgctttctgattccatgactagctgctctaccttcctttggctctcttggagtgcagtctcgagctctccaatccgtttctcaagacgtgaattgataactttatgcaaccgcaagctcaattcgcgaggtgagacagcatagtttcctgactcaggtgtggagttaccacttgggtcttggttggactcagtttcatctaaacgcttccctttaacccgatcagctctcagttcaccctgtgcaaattctacctcacaatccggctccatctgcaacaaaaatcaaaattgaactttgaatatcttgtttgagtttttggtggtgattcaggcaaggcaaagtaaagagcatagttaaaagtgtagacaacacacctctattatatcagagagtcttgtctcaatgttggaggaattcatgttaatttctagcctttcaagttccgcttcaagctctgcttcaatattacttatagattctgaactctcagctgccttttcaatatctatctccttcactatcaacgtgtctttcatctcaagctcatcttctaaatcatgcaccaagttctctgtttgcttcagctcttgtttgactttgctcacttcggcttggcttgccataaatgaggacatgatgccaatcgagatcccgatttgtaacaacattgttgcatcacctagtcctgaaaaaaagaaacttaaatgccatggacagtctactcaatcatttagtataaataattacaagtcaaagattgcaacaactttaccatgttttctactcttgctcttctcatttcccactctctcaatcgaagactccactccggggactccacaacttaatgtagccttatcttcactgagaacaatatgttggctcagccacaaagaatctgcagcactcttgctaattactcgagtaccatcagtgacaagtaatggccttgaaactgaagcgtgaggtgatggaaatgggctagtcatgtaatcttctatggtcatttgttctctatgaaaccgagacattaagcagctatccatcgaactcaaaggtttgattaatcgcctgaaccgctggtttctcctaaatgaagaattcaactgtgtgtcacctacaagattaccactggttttccaagtccccagttccatctccgggaactcgggcatcaaaccgaacaaagtatctgaatggttagtttcgtaatatcctgagctttccccactcgtagatgcatctggattatccccatctgatagcattttctcatccccaaacttattttcattagcctttttgactcttactaatctgctaagcaagcaaccaggaggagattctggcttcacatcttcagaagaagattcaagaacgttatctttacctttggttacattctgcaactgcttagctatatatcccgtagcagcagtcgctgcgattaaccaaacatccatttcgtcctctcttgccttgaggaatcaagagagcaacccaaaaatacaacagtacaatctctccttcttcattccaattcaaacaccaatccaatgaaagaagttgaaagctcagggctttaaacaatccccactctatcgaaccagagttaacaggcactttcaggcagaaatgttatctgaaaattcccaaacgaattcaacctcaaggagagacctaaaaacgcaggaatcaggccacagagcaatgcccaaaacccttccactttgtaccaaaactatacggaaatcgaattactactgagcaaaacccagagaaagcttcgatttttccgtcagagataaggtgaggagctgtaacaacgtgtacccttttcctttgggcgaaatttgcaaagaaaaaagagagacttttgcttgaagaaatgatcgatgaaccaatggagaagctcaaggtctaagaaatcgaacaatcggaaaaggtggaatctttgtcggaagttggtacaatcgaatcagccaaacgaacggctctgtgttttaatttttattatcttcttagctgacaaaaaagacgacgatacggcaacttagtgagaatactgtaagcttatattattaaattcccaaaatatctgatcattaaataattaatcaaacggttgctgaaaaaaaataaaaaaaaattgtataatgaaattgacaaacaattaatatcagtttgcccaattttactaagaaattaatttccctctcttaagttttacatattttacaagagtactacacaataacagaacttaaaagttagttacaaaatagttataagaacaagaaaaatattctcaaatatgtttaaatgtttgcataatttttcttccatttctattttcgttcttatgccaaattttgtgaactgtaataatgttcattataatatcttaaaatataactaaattacatacagagagagtagagcaacctcaaagcacacaacacatcctctctttcaaaagacacaatcaaaagtctcacaatatttcttaacctgtgatttatttttctttttaatcctaattgaatacactagagaggtttagacgcagcattgtctatgtaagcctcagcttcttctatagagaatcttccccctttcacaagtccccttattaaagtgttggcataggcttttgcaggaggtcttatagggatctcacccgatttgaatttctcaacaacagaaagcgtgcaactgcaaaacacaaagttattgagaaaaaaatgaaagttgaaagagagcatccgcttagcagtttaagtactctgtttctgagctagcaaaggaataacgaatgatgaaatcttacgtcaatgtaagtataggaatgacgccttctttccccaagcagacaacattcccatacaaactatcctgtaaaaatatgtcaatataggggtcaagtgtgattactactacatgttcctattaaataaccatctgttatctgactaaccgaagcagtttgaagtgaaatggatccttccttctctgctaaccgcagagcagctagatcaaagaacggataatcagaatctacgttcaactcattttcttgaaacagaaggtcgttgaattgctcaagcctgatcacgaaaacaacaaccatataatgaataagtagaaaagatcagatatatgaaaagagaaaactcggaaacggagatgaagaaacttaacgtgattctgtacaaacacatgtgagtttgatcattgagattagtaaggggattggtgtaagcaactcctcctacaccccaaaacattgaagtttcacggccaaataacaatcgatgtggaaatgttttccacattatttcctttggtggacttttgtccattgaaccgacacatgcttttatcattccctcggcctgaaaataaacacaaacagccatagatgtgtcaattaagacacaagctcagactccaaaaagaaacgaaacaaggctacttacttgtcccccttgaatatagcaaataaacctcggtttccacatgttggatccgtaagaggcataccaaacgtcaacctttgcgagatcaattctccaggatgtagaagcggtatctacttgctccttttcaactagtgtaccttgctggcttttcccggcgactttaccgtcacagtttccatattttttgtcggccatggccatatgcgggagatgagagagtctatcgttcgacgagcagggagaaaaaagagaaatggtccaatctttgcttctgaagcttcaaagtatttttacgtttcaatttttatttatacatgttttccaatctcttttttttaaataggtttgtttgaccagaactcttcacagtgctgttaaatctttttttaaaataactcttcaaacttcaaagtaccattccgaagaataagaatgtttctctccggtcaatataaagcagtttggagggttctttaatacatttaccgaatacagcttcttggtaaagcctaaaacccgaagataactaaaatacattgagagtttgcttagggagcaagcacaacacagctaacagaggacacagtcctctctttcaaaagacaaattcaaaggtctcacaatattcctaaacttgtggtttttatcctaattgaataactcagaaacccgaagctccaaatcgtgttcaaacgggcggtttctgagtaaataattatacactagagaggtttagacacagccttgtctatgtaagcctcagcttcttctttagataatcttcctccttccacaagtccccttattaaagtgttggcataagcttttgcaggaggtcttatagggatctcaccggatttgaatttctcaacagcggaaagcgtgcaactgcaaacacaaagttattgagaaacctcaggaaaaaaaaaatgaaagctgtttaactcggtttatgagcagcaaaagaaaaagaatgatgaaaacttacgtcattgtaagtataggaatgtcgcgttcttttcccaagcagacaacatttccataccaactattctgtaaaaatgtcaataaacgagtataagtgtgattattacatgttttataagcgtatcaatcaacatttgttatctgactaaccaaaggagcttctaaaatggatcctttgttatctactaactgcaaagcagctagatcaaagaccggagaatctgaatccacattcaaaccattttcttgagacagaacgtcattgaactgctcaagcctgttcacaaaaataacatccatagtgaataagtagagaagatcaccaaatgaataaaatagggaaagtgaacggaaactgcgatgaagagtggtacacttaacgtgatacggtacaaacacatgtgagtttgatcaatgagattagcaagggggttggtgaaagcaactcctcctacaccccaaccaactgaagattcacggccaaagaacaatctatgtggaaatgtttcccacactgtttcctttggtggacttttatccattgagccaacacatacctttttcaatccatcgacctaaaaataaacacaaacagccatagatgtgtcaagttagaccaaagcccagactcgaccccgaaaacaaaacaaaacaggttacttacctgtcccccttgaatatagcaaagaaaccttggtttccacatgttggatccaaaagaggcataccaaacgtcaacctttgcgagatcagctctccaagatgtagatgcaggttctacttggtggttttcaagtagtgtaccttgagggttttcaatgctgagtttcgacatttgatccaggagtccttgggcgttgtcttcagtttcagagtcggagcttgagataaggatgatctatagtgaacaaataagaaagaaattatgtgataagaaataccgagtctgtcgcctaaaaagaagatcaagcaaaggaaaatttgtatagagacaaagaagttaagaagtggttgctaaaaatagtgaggtttttctaaatccgatctggcaaggaaacgctctctgatgaacaatgaacaactgaaatggtagacaaaaagaagggtgctcaactggagtaggagttttctgattaattagcttccacgataattcatctgcaagtgaaggccaatatgtgcatagcctcttgcgcacctaaacccacaagaaacagatgagttttggtcaactagtaacatgaggactacagcccatttatggaaggttgtttcagattgtgaaataagaaagttaaaagataggatgatatagagccataccgcttgtatgacacgccatgtcgactcgaatgggtatgcttccggaggtccttgaatttgtttgtcttcaagcaaaacttggacacatgcaagtgaagactttgcaattgagtcaagattgtaccctccctctaacgccagcactatctttccttgtgcaaactccatcagctgagagaacattggagaaacagaatgatattaaatgcaagtttctattatttagctcagggacaaacaaccagctaaagcaagaagtgctattttcaatgatggagacccctggagcgcaaatacaaatgatggacaaaagagggagttcacttcaacaccaaccttcttcaacataactgaatatccatatggggtcacacaacaaccccctagcggatcattaatagctgttaagaggagtttgaaaaggttacacacctctgaacaagacatagcttaaaaaaatgcttaaaccatgtttacctgcatcaaatccagctgaaagaaaaataacatccgggttaaattccctcgccacaggaatcaagatatggtcccatgcagcaagataatctgcatctccacatcgtccttgatcccatggaacatttatgttaaacccttcacctggaccttccccaaccatgttataatcgccatcatcacccgctggatagaaacccccatactcatgcctaaccaaaaatgcatttccagttactttccaagcgtaaaaatcaagcaaaggggtaatagagtaaaaagtaggctccttaaatcatgacaagcgacatcataagaagagtaaacaatggtcacaattacatacctatgaacagagaaaaatagtacacgaggatctttccaaaacatcttctgggtaccatttccgtgatggacatcccaatcaacgatcagaattttcttgacccctagatccggctgcattcaggaaaagcaaagaagttgggaacacgcactccaaaggaatgtgaccaaagaatttgacagtaattaaaagcaaacagtacaagtccttactctttcgtttagtaaaaaactagcagcaacggcaacattgttgaataaacaaaaacccatggcttcatctgcctcagcatggtgccctgggggcctgacaatagcaaaaccacaatctaactctccttctgcaactttttctgccaactgtcaagttgaaagaaaaatgttgttaccccatattcaatcaaatcattctaacagtttctaatgtatcctcctattgtaaaaagaaacaaatcaactagtattattacctttacaacagaaccagctgcaagatatgcggcttcagatgaacctccattcagataaatcgaattcaactgtgaagcaatcctgtttctccgataatctttctgttttgtgctaatactcttaactaaattaacatggtcctttgtgtgaaccaattggagatgcttatcttctgctttgctactaccaagaaccacacatctgcaaaagaaaagaccaagatcgtcaatacatagcaggccaattcatccgaatcgaaaaacaaatcgtgatggatacacacctcaaagactagattccaccttccctaactaatgtgctgccacattactctaattaataatgttatgagtgaaattcaaacaaatatgaaaaatataaaattgatatcagagagggttataaaacagacatggaggaaataactcgaacacaagaccgaacataacgaaaaggtagcaaatttatgaagggttaccgttaaaattgagcagcatacaaaccttttgattctatgaaatgcacaattcaaattgagaaaagtaaatttcataccgaacaaggaagaacaaattgagaccagtttctcagctgacaggatcagaaagtacccaatttgactaaatttgagcattttctagggcttatattatcaaacaaacaacaaagccgcacgaagaagagagaaagtatgaacctttgagaaactccggcgagctgaagcttctcccagataactctgatgcggtcgggacactcagggtgatcctcgccgtcaggtgtgtcgtgtttgcacatcgtctcgtcgtaaataagacccacctttcgctgtctgttccccgcgactttaccgtcacagtctccaatttttttgccggaagattctccggccatagccataactgggagatgcgacggccttattgttcgacgatcagtgagaaggaagtgaaaaaggtcaagtctttgctctcagcttctaaagcttccaagtattttttacttttcaattctttctttttttcattctctccttttttttttttaggtttgagagtttgaccaatttggagattctttggagggaaattgggaaaccaagtatcgcaaccaatcaaagtctgacacgacacagttggtttacaatcacaaaaaggttctgtggttacaatgaaacaccattgtactttctaagaagggtatatgttgctcttcccgagcttatcaaccatctcgcgaaacttgtggtagtcttctgctacggcctcaagctcccaacctaaagtaccctggctctctcactggcgataaacttgatacactccatatcttttatgaacttcttgtgggaacgctccatgtttttcttgatgacctgaaacggttcaagctcttccgagtccatgtcttcattgaactccggagacagaggttcgagctcgtctaagtccatgtcttcatagaactcctgagaaaaggcaaaagatccattcccaactcggcttcttgacctatcctcttggagttccttatctatgcgttcagcttttgctacggcctcatctcgctcctgctgcaacctctctattttggcatgaattttatcctcccgagcgtgaaccaacattagccgcgcttctagctccttctctttcgcttctaggtccttatttttggccatgatggcaagctccttctccctccttaacgtactcaagcaaaactctgtgtcttctttgaactcctggcttcttgccctatcctcttggagttccttatctatgcgttcagctttcgctaccgcctcatctcgctcctgctgcaaactctctatttttgcatgaagaccacagattacatcctcccgagcgcgaatcaacattagtcccgcttctagctccttctcgttcgcttctagctccttatttttggcctttaactcttttctccttgcctccagttctccatctcgggcagccattagagactttaactcttccacttcacgaaggagggcgtcagcggagtttctttctgcacttgggttctttaaattctcattagacgccattgacgcgtcaagtgaaggccaatatgtgcatagtctctcgcgtacctaaacccacaagaaacagatgagctttgtcaattagtaacataggcgatatacaatatttatgacacaagaactgagctgaaaagagaaatcgtagccaattcatacaaaatttcagactgttagggttatatagagccataccgcttgtatgacacgccgtgtagattctaatgggtatgtttcagatgaaccatgaatttgtttgtcttcaagcaaaacttggacacatgcgagtgaagactttcccaatgactcaagattgtatcctccctctaatgccagcactatctttccatgtgcaaactccatcagctgagagaaaccaattaaatgatgtcatatccaagtaaaattatgtagctttgttattttcaatggtagagaagccatggtacgcataatagaaacaatggagaaaagaggcagttcacttcaacaccaaccttcttcaacataactgaatatccatatggggtaacacaacaacccccaagcggatcaccaatagctgttaagaagaagttgaaaagattacacacagcttaccgtcacaaagccttgaaacaaatggttagaccatacaaacctgcatcaaatccagctgaaagcaaaataatatctggtttgaattccttggtcacagggatcaagatgtggttccatacggcaagatagtctgcatctccacatcctccttgctcccatggaacgttaatgttaaacccttcacctggaccttcgccaaccatgttaaagtctccatcatcgccaaatggatagaaacttccgtgatcatgcctagtcacaaatgcatttccagtcactttaaacctcaacaaagatcatgtgaaaaagtagtttggaaagaagaatagacagaggttgcaaatacatacctatgaacagagaatattagtacgcgagaatctttccagaacatcttctgtgtaccatttccgtgatggatatcccaatcgacaatcagaattttcttgacatctagatcaggctgcattcgattaatgccgcataacatgagaacaaacgtacgcaccaaaggaatgtgaccaaagaaatttgagagcaagtaagagatactaaaagcatcacaaaagtcaaaagaagtcattactctttcgtttagtaaaaaactagcagcaacggcaacattgttgaataaacaaaaacccatggcttcatctgactcggcatggtgtcctgggggcctgacaatagcaaagccacaatctaactctccttctgcaactttctctgccacctaccaagttgctaatttgttttgttactaatcgtcaaacaaatcattctaacagtttgctatcctcctgtgtgagagagacaatttgtatgaatctaatattacctttacaacagatccagctgcaagatatgcagcttcagatgaacctccattcagataaatcgaatccaactgtgaagcaatcttgtttctccgagaatctttcttttttgtgctaatactcttcactaaattaacatgtttctttgtgtgaaccaatttgagatgcttatcttcagctttactaccaccaagaaccacacatctgcaaaaaaggaaagaccaacattgttaacaatttatgaaacacctatataggataacgaaacagttaaccaagctaggaaacacctatataggataaagaaacagttaaccaagctaggaaacacctatataggataaaatcagcagaatctttccaatctatgaattacacaattcagattgagaaagtcaaacgtcaagtcaaataaggaaaaacaaaacgagacctgttttctcagaggagataatcatcaaaacacccaattagcctaaaatttcagccttttctagggctttatcgcccaaaaaagacaacaaaggcgcacgagaagaggaaagtatgaacctttgagtgactccggcgagctgaagcttctcccagataactctgatacgatcgggacactctacgtcaaccttaccgttaggtgtgtcgtgtttgcacatggtctcgtcataaacaagacccacctttcgctggcttttaccggcgactttgccgtcaccctctccgcatttcttgccggaagattcgctggtcattgtcatatccgggagatgtgacagtcttatctttcgaagaacagtgagagaaactgaagggtcaactagtctcaactctgaagaagcttcaaacttcaaaagcatttttcttttcaaaatatatttttctttatcttatttacgattaaatatatatttgttggaccattaaagagcttctttggagggaaaatgaaaaacctagcatctcaaccaatcaaaggcggacacctcaaactcatttagaaccaatgaccggttgaacctcataaaccaatttaaaattggtgaaccgaattttctgcaaacggcgaatttatcgtttaatagtaattttttttttttttttttttgtgaattgttaagactgtgcctaaacgaaagatgaagaggagcaacactgaatctggagggaaaatctacagttatttcgattcttcacttcacaaaaacgtctgtgttcttgaactgtggctacaatgagactccactgtacttacgactacgcaaggatgtcacattaacactccaaacatctcttcttctactagtattttcaaaaggtcagactacttaatcgagatatgtacctctaagctgctcactgggactgtacctcaaacctgaagaagctctacatagctgcaaggcggtctttctccagaaaatccataaggcctcgaggagggtattcaaagaaaactaattcttgaggctgttcttctgatctctttgctaaccattctgcacatgagttctgttctttggagatatggtaaatgtcacactcccactccttcaatatcatgtccttgcacgctcctagaagcgttttacttttacaaaacagggacgattttgttgttagagcattgatgatctcaaagcttgttgtctccaagtggattcttcggaaaccgctgtcccagagatatttgaggccttggtatatagccaaaagcccagctacgacttcagggatgctcttatggcacctgatgtacccaaacacccacttccctgattggtcacgcactattccagccgatctggttagatcagacagagggtttgatgttccttgtatattaagtttcaccaagggtggtgtccatatcttctcgaaaccaggaggtacacttgcttctcccttcaccttctccggtgatcttgagggagttttttgtgattctgtaataagcttcagagccacacgcggggtcaggcattcattgtctaagtccatgtcaacaacacccccatcatcaaaatcattatcaatttgagaagcagtttctggaacaagtcctagtgagttcttggtctggagaaaaaaaccccaaaggaagttttctgttttcttctgcgtattgatgagaactgctgaacacaaaacggatgttatccatcgaaaatctatgcacaaactaaaagctctgcagaaattcagaatgcatacatacattgggaggtcttgtccaatagttttgaggagaatattaacaattcagtgccgtttatattagctttggccatgactttgcgagttaccattgccttgaacagagtagcatgttcccctgtaaacctaaaagaatgagtgtacatgccctgagatgataagttttctgataacagagatacaacaagaataagaagcttgtccttcatagaaaggggttttgagtacctttctgttttcttctcatctgggaaaaggtacatttcgacattcaatagagttgggcttctgccagacacatcatttagaatgtggcatgtaggaagcagttcgaccttgagtaacgcaggcattgcctttgaacgtctgagggccttcctcctgatattggatgccggtttagaccaaaactcgcagtcaaactcaggcggcgaggcagaatccataatgcgtccgctggttcagtagttaaaaggaaaatttcatcatataacttgtgaaggtcaaaagatcaaaggaatcaaaaaaggagaaaagtgcaatattggcatcagtgaatcttattatggtcatgctctcgaaatcccagcacgtttctatatttgcacatctccagtttcaacaatgtagcatatgcctaaactgtgaaagagattagggactgttttacattctggcaagtaagagccactagatttccttgaaaaaaatgcaaataaggctaagagctacatgaaaaaggtagtcacacaacattccctaagttgtaaaactgggaaagagtgatggcaacaatttagcatatagcgtgatctgattgacgcttctaacaaaacacatgtttagctcaaaaaagattatgaagtgttaagaaactcacttccaagtaggattctgagctggtagatattgaagtaattccgataattcttcctcagagactgatcgacgtatctcgttggaaccatgatctttagctttatccccaacttccactatcgcccctagagaaaccaagaaaaatcaatagtttttttagcgatccgatcaaaacaagtttaggatctttggctttcagaaagaaaagagaaacaaaagataacaccttgttgaatttttgttgcatttgctgcttgttgcttaactcttgaacgaatttgcaacgcacgtggacttggaggctcaactttcttagatttaaggagacttggagtggttctctgtctcactggtgtagtagtcatactcaaagctcgaagactgcaaacgagttctcttctaatacctgctgcaggattagccaacacaggttttgatgcttcagaagttagacaagccgagacagggcttggtgctacagaagttggatgaaccgagacagggcttggtactacagaagttggatgagccgagacagggctgggtgctgtagaagtaggacgagtcgggacaagtgtttgtacttcagaaattggacgagctgggacaggtcttggtatttcaggggttggacgagctgtgacaggtcttggtgtttcaggggttggacgagctgggacaggtcttggtatttcaggaattggacaagccgggacagatcttggtgcttcaggagttcgactcggcgggacacgttttggtacttgagaagttgcacgagcaggcttaactggagaaaccgccactccattgcctccagatgtaagtttcatagcttcctccggcgaaagcagcttcacctttgaagctctaggtgttggattccctctggcaactggatttgaagattcaactctcagcttactcctgccaggaactactttgatcgaatctgaaggcaactgaccaggactcatcgtgattgatgagaaattctcaaccttgaaccaaaacaaaaacaaaatcggagactataaatacattatcggcaaacacgaataatctcttctcacaatctgattcagataacaaagcacaaactccattgatgacgattattccactagaaacttaaaaccaagctaaaaccaactattctcaacaaaaaccatgtttactgcagataagttccgtaatcgtaaccttagattaaagaacctacaaaaccctaacgaaacccattttcaggtgaacagtacggaacgtgtgacaacgaatgcagataaaccgaaacacagaatcaacaagttttttcttcaaaaaaagagcaaaaatttcagaaaatcatcaaggagaaagtatccacaactttttttttgcttgcgtggtacggaatttaaagagagaaaatgatcagtaaactggagaatgcacgacgaacgcaggggagatgaaaaaaaaaacagaatgttgtttcagatagcaaacgattcaacttcttaccgtgaaatcgaaaaccgccggcgagtttttgacgtggaaaaggaagagacactgtagagagagaaagcaataaaagaaagagagtggaaggtgaacgaagagaggggaacgaggaagacgacaataactttttctgagtctctgagaatattgatattggcgatatcgccccatatcttttacttaatttcaaaagaccccttatagtctatcgttattaaaaaaggtgccaacgtttcttaagtttgcaagaaagcccatgtgctagtgagaagataattattcagacatttgagcttttatggtaatgttttagagcttttatggtaatgttttagttattggaaaattcaaccataatatggttaatggttgatcaatgatcatgattcattcatggcatttgtgagttgtgaccatttctatactaatcttgattctttggtgtcactcttgattttcaacatgttttatagcgtttaaaacttcataaaatgtttgaaaatttatgcaacttgggtaagtgaaatttattacataaacatgtcgaatttgaaatgcagggctattaacaaaacgagaaaataaatgaagttttcattacgggtcaatgtcaaatacagaaaaagctagctagaagaaggtttgctataattggtaacatcgaataatgagtccatatattgtcatcatagcacctctatcatctttctaggaaacttcgtgttcatggcctatttttcataaatgggtcttcacaaaaaaaaacagattcgtcttcacaaaaaaaaacagattcgtacgattttgggaagagccataaacaaaaactttaaactttatggaaaaaaaaagaaaaaggttatgataccttttttactcatagctttaataatttagttatgtacataagtcatatagtatatgactccaaatgatgatcaaactagtctaatctcacttagctagcaaaatgacttgtgacacaagaaaaagttaaagcaaatgtctttttaaaaaccctaaaccctgacacgaatctctctcaaatgaggcatttactcttcagattcggaatcagaggacagatcaatgtaatgtgatggtcgtttgactggaaatctttcccacatggacttgaacactgaaacattgatgagtcaaaaagagattttcttcaatttttcatcaacggagggagagaaagtgaaggatacttgaagtgaaagagattggtttcatcatctagcgaacatggagacaccggagaggatgattcgtctgtagtaaactcatgaatacgaggagcaacaggcacaacttgattagatcttaatgatggagcagcttcaatccaatctttgttatcaacaacttgattacttcttgatgatggagcagcttcaatcaaattttcattatccacaacttgaatagttgtcgatgatggatcagtttgatcaataggaggatcttggtggttatccacaacttgattagttcttggtgatggaacagtttgatcaatacgaacttgtttaaccacaacttgttccacttgaatagttcttgatgattgagcattagcagttttgttggcgacagatgagaaatcacggcactcttcacaaatccacaaacgaggcacacgttgaaacatcaccctcgcgcaataactgacacacacacacaagaaaactaaaggaggattaaagatcattgagtgttaaaacagtaattaaagaaaactaattgagtagtgttgcttaatttcttacgtatgctccctagtatctctgcacatgaagcaagtcatcatcaaaagctcattggcatcacttccgcatacttcacaaggcttcttcttctatatatacacatcgaagcatattaaagatcagtataaaaagaaattcgcatcttgctaatcacaagaccattaaaaaaagcctaaaagaacatttaaaaaaaaataaagaaaaactcaaaaatcaagaaaccctaaaagaacacacattaatttctgattacaaagagtcaagattcaagaaaaatcaagtaaagatgcaatttttactcatgaaatcgaaaacccatatcaataaactgcaagcgaagatgtgatttaccagttttacaagagaatctgaaaggcttaaatctgaactaaatgtcggattttctggtccaggcttgttcccactttcgtagaccattgttatcaatcaaaaggttcttcaatggcatcgactgtaaccaaattttcgatcttttttcttgaaatcgaagaatcagttttttttttggtcttgtgttcttgaagagccaagacgaatttttattaacactccccaatccccaatcttgattcttgaatattgatttttctttttaatatacgaaatcgaatttttcaaattctcttatttaaatattgggaattaacttcacgtttatttataaaaagaagctttagcaaaatttgtttatcgccgagatctatggaatatccaacgtggcattttgttaaccatgtattgttttcttaaacattgagaatctttttttttttttcaaaacaaacacactattagtatctaataaaaaaatgagattcacatggcacaaaattgagaaaatttatttcaaaaactgtcacacggtaaaaaaaaaaacagagcactcccctaattacagcttggaaatagcatccatatccataaactgtctccaaagcatatatccaatttttggtaacaacaaaaaaggttcaaagtagcaaatgactcaaacaatgagagaagataatgcacaaagagtgatgagtcaaatcaggatcaaagagaagtccaaccaaaatgacttttgacccaagaaagaaaaaacaacccaaaaaaaaaatccatatctctctgtcaatggttaagctaaagcttacaccaaaacctctctgataaaaagcagttttagattgcagattccgaatcagagggtggctgctgattatcgcttgaagatgtatccattggcacagctacataatatccataaacaaagtaaaataatacatcagtttcttgatgttatatcaatagcagggaagagaaactgagtgatacttaagctaaaagagaatgtttttcattacctactggacttgcatgtgcctgtggaggttgttgatgagtcgctgagatttgattaccagagtcgcttgaagtcatagtctgattaacaacttcactatcagcaacttgataagtaattcttgatgatgatgcagcagcttcttgatcaacaggagctacgttattcacaacaactggattcattctgcactcttcacatatccacattcgaggaacagatcgtagatgcaccctcgcgcaataactgaagcatatactttcgaaacttaagatcctttttaaacagtaatcaattcttaagtaattgagtaaaggaggaacaaattatcttacatatgttctcgtgtatctctgcataaaaagcatgtcattatcgcatgatcattggcattacttccgcaaacttcacaaggcttctttacctttacgtagcaatttaaagattatgattagattaaacagtttctctgctacttcaagaattgtcatcgaatcttgcaaccgaagaaaatacaaatcccagaaagatagacgaagaagtgttctataatctacaactatagaagacgcacaatgatttctgattacaagaagataaaccataaccaaaagtagtcgtaaatgcaaatcggatcaacagattttacctcgacaaagcttatctctgaagaaggtagtgaagcgtctgatccagcgtctgatccagcgtcgtatccactctcatcggccattgttatcgatcaaagggtcttcttcaatggcgttgaatgaaacctgcagggttttgatcgttttcttgagatggaagaaacagtttttttgttttgttttttgtctcaagagcgaagggaaattttatctgcttctctcgaaacccaaacttgaatcttcgctttatttatagacgaaagccaagttcaaattcgtttgcagtgtttctttcttttctttcacataaaacgaagccatttccaaaaatgttttaaatactctagtcttgcctattggatacaaatttcatacttttgattatcccttatttatataaacaatctaacctttatttaataccccataaaaatctacaagcaatcaggaggtaaaaagtaacacaagggttaaattttttacttcttacaccaatatagaacagtacaatcagagattagtagcactaatctatatagcaatttccttgagacaacataagccactccccatttgatcaatccctctgaccataatgtctctgcaattgcttcccacaattccggtggtatcgtctgaagaaaggctgattccaccagaggcaatgaaaaacaagcgaaacacattacatcagagacaagaacaaccacttgatgaagggtctttgatttagaaaaagaaggaattagcctacttcagtgtcattgtcaactacatatccatcatcaaaatgttggggagtttgattcgatgttcctggaagaagtgctaaagactttttcgtcaggagaaaaatcccccaaaggaagttatttgttttcttctgcatcttgatgataactgcaaacacaaaacgagttttattcatatttttgaagccaatgatagatctgtaagcatacattaggcttactctgggaggacttgtccagtagttttgaagagaatatcaacaatggtgtgccattgatgttaaatttcatcatggcattgcgaatcctcatggcctcaaagatatgatcacgttccgctgtaaacctgcaatcgtcgtaaattttgtgataacaatgaacaagaagcttttcctttgtagccatagtggcttgattacctttttgtgttcttgtcatctgggaaaatgtacatctcgacatctgaaagccctggttttctgttcataaacaaaccactcagaagattgcctataggaaccaatttgaccttgagtaagacaggaatagcttttgaaagtatataagccttccctcggactttagatgccggttgagctaagaactcgccattaaactcagatggtgtagcagaatccactatgcgtcccctggtatagaggcagaaagaggaagatataaaatatgcacatcttcagtttcaggtttttcagcaatgcaacaaagcctaatgctaaagaaactaaggaaatttcctttttaagaacgcagataaggctaagcacaaacatatatcatgaaattagtaggagtactatagagtggtctgaccgaagcatacaaaatttgaaagcaacaaagatatattgtttgatgggatcagtaactcacttccaaatggggtgcaaagctggtcgatatggaagtaattgcaacaatttctctgataaaattgatcggcatatctcgttggaatcatgatatttagctccatcgccaacttttgattttgacccttgaaaagccaataaaaaactcagcaagatatgtttttagtcatctagtaaaagaagtttgggatcttaggcctttagaaacgaaatagattaagaaaacggagagagaagcaaaagattccaccttctcctactgcttgtgctttagaagcttgtctcatgacccctggacgaatctgttgagtacgaggactaagaggctcaacctttttaggtggaaggtaaattgatttggttttgcgagccaccactgtagaatttagactcctagctcttggaaagccagcagttggttttgttaaacccattggaggacgagctgaaacaggtcttggtactctaaaagttggtttactggtactgcctccacatgcaagtttttttacttcctctggtgaaattaacttcatccttgacgtttcaggaatttttttccatttaggaactggatttgaagattccacccgcactttattcctaatacttctagggactcctttgatagaatctgaagtaaatttgttttgaacaggtctcatcgaacaatcagcacagacaaaatgtattgaggtctcaaatgaactctcccgcatgcaataactggtaaacatagataaaaattgaaagagacttagtcacaatcaaaaaattcatttgactacataagcaaaactaataagatatgatattacttctcaccagtgttcacaggctatgcggcatttagagcaagttacaagtgaattcttccatccttgatgtccgcatgtttcacaaattgacctctaaaataattgcagcaaagagaatcatcagcaagacagcaagcaaacaccaacgtgggaagcaaacaaagatgtatgatagtaactccatacatgtgatttgtataaaccaatagaaaagactagcgtagaacacatcaatacaacatcaagatcagaagtcaaatatactacataacaatttttcaaaactctatattcactactatttttcaaactctagtgttcactactagttcttcgtcaactactgtctaggattaactcataaggtagttaacgactatttcttgataccttgaccattctaattatatgttacattgtttggcctttaaagaaaataatgtaaagactcgctacctcaggtaaacatagagtcaattcaacttgctcagatcactggccaaatgtgatgtataaacatgtacactaagactaattcaagtattttaaacaagagactcaaaaaggaaaatcattggtcaaaagagtaaaggaaatatgatgttacaactcctcacaaagaagccatgattaattacctttgatagattcaatgcagccatatctcatgtcatcttaaatcaaatccgacttcaaaaataagagaggaaaggtcagaacaaaaaatcaatcctcagggaaatcaaaaagaaaaatagttgaacaagacagtgatgcgaacatgattgcaactcaaatcaaagaaaattccatgatcgacttgatcaagccagaacttaagtcaaaaagaacatctttcaacactaatctcccatttacacttcattaaagacattagcaacctccaataataaaaacaatcgaaaacaagtaatcaccgaagctgcgaaagccaaggattctcattgaaattgcaagttaataaaaagttccgaaaatggaaaccctaaattaaaaaccctacacagctccaaaaccccattttgagtacagtacaaaacgcgtgataccaaaatgcagatggtacacccgaaaatcagctcttccaatgaagaaccaaactttcacaaaatccccagctaaggatctgaaacacccttgcttgtgaattacggaaccaaagtagcaaacatggtataaaaaaaaacaagaagaaagctacgaaaacagagcagacgatgaaagaaaaaaacagagatggagcttcaacataccatactacggtaatgcttcttgccgaatgaagtcctaatgttaaaaactcgtcggaaagtttcgatttttgtagctgagaaaaaagaaatggttttagagagagaatggggaagaaatgtggggaaggtggtgggagcttgagggaccagttagagagagagtggggtaatcactttcacacggaagagaaatgttttaaaaagtataaattgcaacatctgctcataccttttaattaatttaactatcaaaaagaccctccaatttctcaaaatacacgtaataaccctaaacttatctgttgtcagtctttactactgtctcaactttttcactattttgacttagctcttataggttacaatttttgtaatttattccaaaatgtcatttcatcttcttctttttgacagcccaaaatgtcatttcgtttgtgattgacatctaataaaattaaatatacattatcttatgggtcttagagtgtgactgattaactctaataaaagaaataaaaggaagaaattatcatttttctttatatgtatcagtcgaaaaaattggaagaatatcttcttctttttttctgaaatgtcaaaaagtaattaaaacaagattcttccatttttttttctgaaaatgtcaaaagtaacaagaaaaattagttttccttctaatatgatttgtcttctcctctattttttcttcctacatatgtactccttgaaaataatgcatcactgaaataatttcgtcttttattctattcaaatttacagcaataaatacattttttttttgttggcagcaataaaaacagattttatatatatgtttatagtttatactacatgatcatgtgtctaaggagtggtcgtgagtctggaatggtcgtgagtgaccataactatgggtgtaagatataatgatatattgactatcaaattttaactatttttgaacatttcaaataagttatatatatatatctatatatatatttttgtagccattttgtgaaataaatcttgtagttggacttatttacaatggctgccactgaattttgatgtttgtttttgataattagaaagaaaatcttcgaattaaatatttgacatttaacgatctttccaaaatctcttcacgttaactacacagagatataatttgatagcatttatttactacaaaattacaaaatatttagacaatgattcataaacatatcataaataagatcaacattaataaaataaatggttttttttacgttgataggacgttacttaataataattgtaaactataaaataaaaatattttatagttagatacaatttgtaaacttttatatatactaacattaaaaaataaattgtttccgcggtgtaccgcgggttaaaatctagtatatatgtataaatgtaacgaataaaatgagtatataattttatatgattagtgttgaatgttttgacttaacataaagttgcatcaaaatgtataactaatgctatatacttctctttttgaaaaaaaaaattgagtcttggtatattaaccggagacgagataatgtaattatatattaagattttttttcactggcatcaaatctaccagaacagtcaaagaggtaattaagagtaactgcaagagctgaaatcttcttacaaacaaaaacataacatagacccataacacagagacagagattaccactaaactagaccaaaatgtcctcgaaacgataactaagtgcacccacagaaccagagaccattaacatccttagagcatcaggaaagagcagaatccactcgaagcgatcaagagaaggcagatgaacaatttgcttgagttcttgagagcaaacgcgctgctgtctgtcgtgtaatccgggttaatccctgtcccagtggtgcctcctgtgctatttcccccaaaaactccattggttgggttccctgaataaggactgttggtaccactaccaggaagtgtggtggtcgttgggctgccttttggattggttgtgccaggtgtcacagttgtgctgccgctagagccactggaagaaaataagagttatatcagacaatgaagttccaaaaccagaccaagtcttgatgaaagagattgatctaaaggaaagtcttcaaagcaaattcatattctatactcaaaaaacgctaacaaaaagaagagtctcagtttctattaactaaaagggtctttgatgggtccaaaagattaaagatttagagtactattgcttaatacggccatatcagtcaagaacatgatcatgcgttcaaactgtaatccaataaagcatttgattttgattatagatatgaccaaaagtttggttaaagaaataaagaaaattgagtacttttaggttcacgttgaacacttacaattaacagtgtcttaaaataagactgttcacaacagagtcaaaaaatttcattacttactctatttcctttagtctatttaagtaatactaatgatgctgttttctattttaatttaagctgaatgatgatatctctttcacaacaaaagtaaacaagaacaaaaaaagttgtaatttgggacccaaaccaaactttaatctactttttctctttgccacaaacatagaaaacaaattcttggttttggttccataaaatgcaaaacgtttctttcaatttcttgataaggccatttgaatcagaagcatacctggcactagtaggaaaggcacaacctgtataacctgtaaaaaacaaacacagaaaatgttaagccattggttattgtccacaaatttgaaaactagaaatatagtctttattatgcatttggcgtatccattttgtctcagaatcttgaataccaaagtcattcactagtgacaaaaataaaaaccttcaactttctgtaactatcaataattagacaccacatgaatcctaacaagcactccaaaaagagcaagtttctttagcattggcctaatgtaatatcaaagagcagaacaaatgagaatagtttagagagactaactgggatcggagttagtgggagtggcagttccatcgaaattacaagagccaggagattgacccttcttttggaagaagctattgactgcatagttgcaatgagacctaacattgtcagggttgaagcaagattgttttggtttagtaggattacaatctgctccatttccacaagcatagtctagggttgcctgtagcactgtatcactcagccctgtcttacacacacaccatgaggcacctacaaagaccacaagaaagccaaaattagaaaatagatagctgcatcttccttgttctataatgtgagaagccaacaagatttgggtaaatcttggaatcacctttaaaaggcaagatttacaaatattagggtaaaaaaagtaagtaggaagttgagagacaacaagcaaatcagaagaagaaaaaaatcagtaaagttttctagaaatttgtgaactatgccaagaaaaaacactttaagaacagaaaacaattttttattttttcattcttcaaaggaacagaacctttttcagacaagagctaactaagagtgaaagagataagaagactaagctaagaaatctgaagaagagtgaaagttcttactagaatgtccagccaaggatagaaggagaagtgaaagcaccagagcagccatagatgcgttcagacaaaatgtcactgttgtctttctagaaacagagagagaaaagaatggagatagagagatctctagagcaagaagaagaagaagaagaagaagaagagaaagtggagagacacagagagagatagagagcaagtagagagaaagaggggtggtgagatgagagagtggctacttgttctgtgtcttcttgtctcttctcaaaacccttttgaatgcttttttacatcattaaagaacttagctcgtgtagactttttttgtacgtatatttttagatttaaattaaagacacatcgtattattggtacttcaaaataatttaaaatgacttattgtaaaaggcaatttttttattttttgtgttgcaggatgagatgtgaaaaagctgattcagaaaatcttgttcatgcttgggtcagatttgaataatttgttttgcaaaaaaaagaaataacaataatttgtttactgtgtattggccattctaaattttataaaatcgacataattacagtaaaaaaaaaagtataatattttgtgtattttatttttaattgtcttgttattaattcaaaaaaattctctaccaataataataaaaaaagaataatttagtcatggtccacaactccccatgtaataaacataaaacgacgtcgatttcgtggacccgtatcttagcgggtcggtgtacgggcctatttgttcaagtatctaaccgacgccgttttagaacgcaagcgatcgccttcttcctcggagagccgaccagaggtgaaaacaccacagaggagaagaatcctaaacgacacaagtacagggattttgtcatgttagttcagcttcctcgcttgacaagctctcttagagagcctttcgacatcgatcaggcttaccttcgccgcaaaactatactccaaactcttaataagcctcgcaggtccgtttttttctttccgaactgattccactcgtttactaagttttcagcgagttctatagcatctgtttggtgctatatcgaatttgatagttgtatagtctggtgatcacaatgtctaagtagaatttggaaagcatttggaaatacttgaattgaattggactattgtgttacttgtgtttgccatttcagctccggtaatcgccttgatgaatctgaccttgctaagaggatagttcatcaatgggaaggaggtgattttatgatgatatctattttttcccaatttctctataaaagatggtgttgtgtgtatattgattggaattggtgtgacagcttctctcgaagtgcgacaagcatacaagcagtttattggagctgtagtggaattgattgatcgggaagttccatcagatgagtttcgcgaggttgctttttccgcttatcgtctgtttaacaatccagtggaggaagatgatagtgatatcaatgataatataagcatttccgggaagaagtaagtactgttaattctgttttttcattttatgtatattcgtttatttatcaaccatgctgatgcaagattgttgaagattatgaaagtggccgagatttttgcacttctttatggtgttcagagataattgaggctttcttatattcaacaggttagagttgcaaaatcttgtcgggcatgctgtctcagatgctaatgtaaaaaacgtggcctcctttgctcaggcactttactcaatacagcctactcatcagtctgagacatatgctgatgaagttaatgggggagctgagtttggtgccgaccttgttttcaatctaccagctcgttttttggtggaagcatctcttgacgaaactgggtttgtggatgtagaaagcaatgatgctcatacatcgttttctgaaggatggagtggtgttagcgacacgaaaaataatctcagtgcaggaaaattcaatttaagttggctaagagatgcatgtggtcggatggttagagaaaccaattcacaactttcccgtgaagaattggctatggctatatgcagatttctggattcggataaacccggtgaggaggtatgttattttcgaacctactatacctgttcctagagcatcatatttgcaagtgaaagtagatgagattttaaatatttgttctgcagatagctggggatctgctggatcttgttggggatggtgcatttgagactgttcaagaccttattatggtaaggcctaaatttgatattgctcttttttctgaagtctacggacctgtggtgatacttggtacctgatttccgttagattctacagtatagtatgcctttctcattagttaccattacgtttaagtggcatgcacaactgtgtttttatgtttttggatgaaatcaccatcttttaagccgactttatggtgtatgggtgtgcctatatatagtaaaagagttgttactaaggtctatattaaaattatattcttctttctagtctcttagaaatgtgaatggtgtcttgtatattcctttttcagcatcggaaagaaattgttgatgctatccatcatggccaaatgattctcaagtctgacaaagcagcttcaaacacccaatctcggatgcctacctatggaacacaggtacatctatttgcctgaggccttcccttctgattttgggcaccattccttttctatagccacagtaatgattgcactcagccacctttcaggttactgttcaaacagagtctgcaaagcaaattgaaaaacttcggcgtaaggaggaaaagaaaaataaacgaaatgctgatcttggtttagagagtgaaatatcagaggccaatttttcttctttacttgaggcaagtgaaaagaagactgcatttgaggatctgattgggtctggagaagcgaattctcttgcacttgcccttccccaaggtactgtaaggaagcacttaaaaggatatgaggaagtgtttatcccgccaacccctactgcacaaatgaaacctggcgagaagctggtacgtctcatccatatccagaggcagatgataaatttctttgagtgacattttttcatgccgagaagttatcgtcaagtctttctccacacatttgaatggttttcttatatagatggtattgtagcttttttctgtcagattgcatgcactcttaactctaaattcttgcttgtttctagattgagataaaagagttagatgactttgctcaagctgcttttcatggttacaagtctttaaaccgtattcagagtcgcatatttcagacagtttaccacaccaatgagaatatattggtgagtcatatgatttttttttgtccatactgctacaatgccaattacgtagtcaagcataacatgattctgaactttgcaggtctgtgctccaacaggagctggtaaaacaaatatagctatgatttctgttctacatgaggtaagtttttgatttacctggttgatatatttttgtctgaatctgtttttaatcacagaccgtgctggaaagagttgatatttactttactaagagcgtgatatttttttgttagatgtggtttatctagtagaaaaggtgatctattgtttaatcacactgacttatttcatattttactcatagatattttggaaattatcttgcagatcaaacaacacttcagggatggctacttgcacaaaaatgagtttaagattgtttatgtagctcctatgaaggtaaaaccaggttaatataatcttatggatgactttttttgtaaatattttattttactattttgttctttgtaggcgttagcagcagaggtcacgtcagcatttagccgtcgtctagctccattaaatatggttgtgaaggagcttacaggggatatgcaactcacgaagactgaacttgaagaaactcaggtgtcatttgagcttatgagatatgcttaagtttcttgtggagacatgtaggaactgatacttacggattatttatcaattttgaatcagatgatagtgacaacaccagagaaatgggatgtcattactcgcaaaagcagtgacatgtcaatgtcaatgctagtaaaactattgatcattgatgaagtgcatcttctgaatgatgatagaggtgcagtgatagaggcgctagttgctcggaccctccgtcaggtaacgtcttgaccatgaaaaattggttctcctaaagtaattcttgaagttgtaatttcactccttatgttgcagcaggttaccatctgtctgacttttgctttgtttatcaggtggagtcaactcagacaatgataagaattgtaggcctgtcagccactttacctagctacctacaggtcttttccaacatgatatagatctctgtcacgatgttttacttcacatatcctttttagtctcaggaaattagggtcggtcaaaattactttttttaacctatttgtggggtggattccaggttgctcagtttctacgagtgaatacagacactggcctattctattttgattcaagttatcgcccagttcccttagctcaacaatacataggcatcactgagcataactttgctgctagaaacgaattattaaatgagatatgctacaaaaaggtctctatctcgagcaaagactctttttcatttatgtgaaaatggataggtcacttatctatctggtaatgctttcatgttaggttgttgattcaattaaacaaggtcatcaagcaatgatatttgttcattcccgaaaagacacttcaaaaacagctgagaaactggtacatgatattttacctttttatattcagcttctactttttacctgatgtcttccaaaacgcatgcatttgtggttttcctgaaatcttaattattgcatatgagaatgatctcgccgccgaaaacatggtttctcaaacgattttggaatccagatctagaagtacatgacttttatattttcactttggcaggttgatcttgcccggcaatatgaaactctggatttgttcacgaatgagactcatcctcaatttcaactgatgaaggtaaaaaatggaatatatattatcttttttaacatcattgttggtgttaatttctcaagattgtttctgatgtatctcagaaagacgttatgaagtccagaaataaggatcttgtcaaattctttgaagctggcttcggaattcatcatgctgggatgttgagatctgatagaacacttacggagaggctgttttctgatggtctcttgaaggtacaaaacattttgtctgcttgctctttactatttaaatacttatttcccgcaacttgttttggttatacaggtgcttgtttgcactgcaactcttgcgtggggtgtaaatctgcctgcacacacagtcgtaattaaggtatgcttatgtggtgctctttggtatagccagagttcactctgtaatctgtgggaagataagtttctgttttgggagatcaaacaagtggcgcaattatatcacatttccttatagctcaatatgttcggttgatttccagggaacacaattgtatgatgccaaggctggtgggtggaaagacttgggaatgcttgatgtcatgcaggtaaaggaaaaatcttctttagaaaagagcaggacattgttatatctttggtattaatgtatcatgctattatatgcatttagatctttggaagggcagggagaccacaatttgataagagtggtgagggaattatcatcacatcccatgacaagctggcatactatctccggctgctgactagtcagcttcccatagaaagtcaggtattgggcagaaacctaaaagggcttgggtctgtcatcttgatgcagaaacctgcttttgtagtttgatctgtcaaatttctttggccatacagtaaagtcccattgtaattcttatttgcagttcataagctccttgaaagataacttaaacgcagaagtggttttgggaactgtaactaatgtaaaggaagcctgtgcttggcttggatatacatatttgtcaattcggatgaagttaaatcctttggcttatggcattggatgggaagaggtgcgttattctttgcatttatgttttttaagctctagtagtgtacatggagatctttgtgattttgtttatgccatagtggttttgaatcatattataatactgatttatatatgtacctaaaactattctgaccttgttactcatcacagataattgccgatccttctttatccttgaagcaacgagcccttgttgctgatgctgcccgttcactggacaaagctaagatgatgaggttcgatgagaaaagtggaaacttttactgtaccgagcttggacgggttgcaagtcacttctatattcaatattctagtgttgaaacatacaacgaaatgttgaagcggcacatgaatgaaagcgaggttttcaataatcattctgtttttctgatattttcttgtttctttgctgtgtaactaaagtttaatcattacttactgatttcaaattttctggtgtagataattaatatggttgcccattcttctgaatttgaaaatattgtggtaagagaggaagagcagcatgaacttgagactcttgcacgctcttgctgtcccttagaagttaagggaggcccttctaacaaacatggaaaaatttcgattcttattcaggtgactgactttcactgtcatttcaatattatacctatgcgatgaaacggctggttgatatcgagttctgatatagtggctttatgatctacagttgtacatatcccgtggatcaattgatgcattttctctggtctctgatgcttcatacattagtgctagtttagcacgtataatgcgtgctctgtttgaaatatgcttgcgaaaaggctggtgtgagatgactttatttatgttggaatactgcaaggcagttgatcgtcaactatggcctcatcagcatcctcttcggcaattcgaaagggatctgccttctgatgtaagcttctgaatactatttttacttgtaatatgtaatattttctctaattcatctcaattgatcagatattaagaaaacttgaagagcgaagggatgacttagaccatttgtatgagatggaggaaaaggaaattggagcgctgattcgttataatcctgggggaagggtatataaatcttaagttcactaagttactgcatgtatatatggaaaaaagcactaatgttttttggttttttgcttgcactggaatttctagttggtcaagcagcatctaggatattttccttcaattcagttggcagctactgttagtccaatcacccgcactgtattgaaggtagctaatggagagattcttcaataatttataagctttcagacgacaaactatctatcaacatctaatttgttaccatttttaggtggatttgcttataactccaaatttcatatggaaggatcgttttcatggtactgctcttcgttggtggattctcattgaggtactactatctaactcccattaagacacatatgtcacagtgacaaagaatgagctgtttgtaacgatatagtatctcatgttatagcactactaaacactaggaagagtcaatactctgtgctagatactagttaactaatgatttcttcttcaataatgctaactcttttggcagtgttgatataacgcttgtcttgtgctatttcttcgacaggacacagagaatgattatatctatcactcagatcttttcacactaacgaagcggatggctagaggggaaccacagaagctttcttttaccgtaccgatatttgaaccacacccaccacaatactatgttcatgcggtttctgattcttggttgcatgcagagacttacttcacaatctcttttcacaatcttgcactaccagaggtatatatcttctagaggttgctatttccgaaatagttacaagatcatttctacgcttaaattatcggtaaggtaggtcctaacagtcttcttcattcaggcgcggacgtctcacacagagcttttagacttaaaacctcttcctgtgacttctcttgggaataagttgtatgaatcgctttacaaattttcacatttcaatccaatacagactcaggtttgagcatatttaccctgttactctcctaattttatattaaaaatgtttttcttcatcactccttttttagttaactgaaaattgtatggtttggtgttgcagatttttcatgtgttatatcacacagacaacaatgttcttgtaggagctccaactggaagtgggaaaactatatctgctgaacttgcaatgttgcgtctcttcagtacccagcctgatatgaaggtatgagttttcactctcctaacgcttggtaattatttagttcgagacttcgactaatgtttcagtttattatacatgattatgtttcagctaaattgccagccttttactgaatctacctattgaaatgaagaaatgaatctctaaaatgatatcaaatcacggcttagtttagtttctagtgttctattttatcttactgaagatgcctaaatttttgtggcttgcaggttgtttacatagcaccactgaaggctattgttcgagaaaggatgaatgattggaaaaagcatcttgttgctccacttggaaaagaaatggtaagaggatattgcctcggagcatctatacatgttgcagactcataatccatgattgctgtttatttggctaccaaatattattcctaacacttgcatttcaacaggttgaaatgactggagattacactccagatttagtagctctcttgtccgcggacatcatcatatctacccctgaaaaatgggatggcattagtcgtaattggcatactcgaagttatgtcaaaaaggtaaatttttgtcaatagattgccttttttgtgaacagtaacttatgatgttctggggatataggtcggccttgttattttggatgagattcacttgcttggagccgacagaggaccgattcttgaggtagaagcttaataactattatatcccattttctaagtacttacgctaagctccatctattggttagaagtttccagttatatcatgacacatgcaatgtatctatggtcttggtgaagagcttatatcttttcggctcaggttttttcaaagttatgtgttccaccagatttatttttgatctacatttggtttccaggttattgtatctaggatgagatatatatcatcacagacagagcgctccgtccggtttgttgggctttctacagctctggcaaatgcagggttcgtattttaacttctcagactctttgaatatgctcttttctatgtattatcattaaacacgcaactgaatgttcgagctggtagactgttattcgtgtcttttctgtgctgatgacattgtgcttatagtgtgatttgtgagtgaaagactttcaactttagtcttatttactagaaaatgttaatgtggaagatggcttaagatataccttactcccaatttttctggtagccagttttacttattctctcaagtctcccttttcagtgatttggctgactggttgggtgttggggagatcggacttttcaattttaaaccaagcgtcaggcctgtaccaattgaagttcatattcaggtaagtcaatatcttttctctagtttgcaaacaattaatacctttcttaaacaaaaaatttatgtatgtctcctacactgtacttgactacgctatttaatttccattttcggtgggtggattaaaggtattcaaggaaaccatacaagtatgaaatttccagacttaaccttgtttattgttttcagggttatcctggaaagtattactgcccaaggatgaatagcatgaacaagccagcatatgcagccatatgtactcattcacctacgaaacctgttcttatctttgtttcatcccgtaggcagacaaggcttactgcattggatcttattcaggcatgatttatcatcaaacaccgataccgaatcatcttttaactatataactctaatttgtatcatcctttgtatcttcttttcctatgaaatgaagtttgctgcctccgacgaacatccgcggcaatttctgagtgtgtcagaggaagacttgcagatggtcctctcacagataactgatcaaaaccttcgacatacgttgcaattcggcatcggactgcatcatgcaggtttaaacgaccacgatagatctgcagtcgaagagcttttcacgaacaacaagattcaggcaatttcctcaacatattctctctgctgcctttaccgtatccatggttacacttttacattacgattgatgatggaatccatgcttccattacaggttttggtctcaacaagtaccttggcatggggagtgaacctaccagctcacttagttattataaaggtaaaagaaggtcctcttctattattatgtttgggatcactttcttggattttctcctctaatgatttgtcttttctctttaataccgttgtttttggcaatgtttcctatcagggaacagaatatttcgacgggaaaaccaaaagatatgttgacttccctcttacagagatcttgcaaatgatgggacgtgcagggcgaccacagtttgaccaacatgggaaagcggttattcttgtacatgaacctaaaaaaagcttttacaaaaaggtcaagctcagttggaattatttggcaatttttggtatccgttgcaacaatttacctcaaaaagatcatacttcctctgcatgcagttcttgtacgaaccattccccgtagaaagtagtttgaaagagaagctgcacgatcacttcaatgcggaaatcgtctctggaacaataggcaacaaagaagatgcagtgcattatcttacatggacgtatttgtttcgtagactggtaaatatgcttcagttttattaaaaagcgagatactacttgagaacgtgattctggttccttgaaaaattgtgctaaaagcatgatcagttccctgcagccagattctctttttcctttcagatttttccattactgcagaataaccagttcatgactcaatctggtatttgatgtaacagatggctaatcctgcttactatgggctagaaggtactcaagacgaaacaatctgttcctacttatcaaggtaaatatcaaagttattaaataaagaagatttctctaactagaaccattgtaatattggtgtatgcgggctgctttttgtgtagattggtgcaaaccacatttgaggatcttgaagacagtggttgcctcaaagtaaatgaagatagtgtggagcctacgatgctgggtacaatagcgtcacagtattacctttgctacatgaccgtgtctatgtttggctctaatataggtcctgacacatcgcttgaagtaagaagctgatccagtttatattgattattctttttgtttttctttggtttctaaccactgccctttaggcatttttgcatatcttggctggtgcttctgagtatgatgaacttcctgtgcggcacaatgaggtctggtctatactgttttacttgacgaatatatggttcatttttaaaagtatctttagtgatatggtgtcaaaaaaaaaaaaaatctgtgtcccttaggaaaattacaataaaacactgtcagatagagttcggtatcccgtggataataaccatctagatgatcctcatgtgaaagcgaatctgctcttccaggtatgtacttcttcacactatcatgcactgaagaatgaaacaaaaatccaaactgtgtgagttcatgacttaggccctgtttgtttgtccatccacatgatccatccaaatggagatgaaaaatgatgtttgtttttgacaatttaacaagcatttggatggatcatctggatgatacatctgaatgagtatctaaatttaggcaaatttatgaaactcatttggatgaatttgattaaaccatttggatggagatgtttcatccaaaaataacaaaaaactaatataccctcatttatagtcataatttaaataattttattttctatagatttctcaaaaaatcatgaaatcacgtattattcttttatgtcaaaatcgtaaaatcgtggaattgcgttttttggccaaaaatcgcaaaatcataatttttgatgtaaaattatagaaatcgctattccacctaaaatcataaaactatatttacgctgaaaccactaaattatattttcttgccaaaatgacaatattatgtttttccgccaaaactgcaaaatcatgttttcctgctaaaattgcaaaatcatttttcccgcaaaatcatattttcccgccaaaaccgtaaaatcgtatttttccgccaaaaccgtaaaatcatattttcccgccaatatgtttggtattgatagtgggtaataatgttgaatatttgtcatttgttaaaatgaaaacatgggtattttagttatttttatctaaatgaaaatgtgaatgaactacaaaatgatcaaacaaataaagatccatttaaatgcatcatttatattaaattacaaataacgaaacaaacatcattcaaatgtatcattcaaatgaatcatgtaagtggatcatttgaatggaaatgataaatgatgaaacaaacagggccttaatcatataattcatgattgttaccatcttcttaatgcatgacatccattgctccaggcacatttttctcaattggcacttccaatcagtgattataacacggatttaaagtcagtactggatcaaagcattcggatcctccaggccatgattgatatctgcgcaaacagtggatggctctcaagctcactgacgtgtatgcgccttttgcaaatggtcatgcaggtagtgtcctgaagattactactcttagcttgttcaaattatttcacttttgcaaattaagaggaatccaattctctttttaattctagggcatgtggtctgatcaagattcgtcattatggatgatcccatgcatgaatgaccttcttctaggatctctgaccgcaagagggattcacacgctacatcagctattaaatcttccaagggaaactctacaaagtgtaaccgaaaacttccctgcatcaagattatctcaggtgctctcaaattggtcacaactatttcttttgcatttaatactttcactcatggagtctcaactattctctgctgcactcttcgatcttaattaggatctccaacgattcccacggatccaaatgaatgtgagactccaaaagaaggattccgatggcaagaaaaagccttcaacgctggaaatcagattggaaaagacatcaaagaggaatagctcgagggcattggcccctcgattcccaaaggtttcacttaaagacttaaccacagattagtttgagctcgaaacaaaaatgaaattgaattcaacacgtttattttgtgttataggtgaaagacgaagcgtggtggttggttcttggtgatacttcaacttctgagctctttgctgtgaagagagtttcgttcactggtcgtctgatcacacgcatggagttacctcccaatataacctcttttcaggtacaaacaattttcaacttattttctcaaactaaatcattctttcttacacttctatgtatatattattattgctgaattggtttttttttttttggccaggatacgaaactcatcttagtttcggattgttatttggggtttgaacaagaacactccattgaacaacttgcacgacgcggatgagccattagatgatggattgtagtaaccccatatttttttggaatttgttttatatattgtcaaaattttcttaaaattctggtttttttttgtcgtcttcttaatgtaaaaccaaattttaccttacgttttgtaataaaacagtgttacagatcttttgagatacataagaaaaataatgaagagcttaaggtaaatgtgttaattttacataacgttatgtagaacagtgttacaaaaaaattgggctacatgactacataataaattaatcaagagattaaaactaaatgtgtttactctgtgacagtctgtttggtaaatttgtttgggtcaacaagtttacgttattttgaactatctccatatcaaattaccaattattcattacagttacagaagggaaataaaatccattattacatgaatttaaaaaaatcatgattctgtctttattttgattaaaacgagtctaattccagactacattataacaaatggacgaaaggagagtgaaagatttgacgaacatgattaatcttcgtcactgtcatcaatcacggccttacgacgatgagtcggagcttttctaggcggagactcctcctcgtcagactcaatccctttccttttccggccacttccacggtgatccttctctgccctacctccctgcataaaccacatttcaccacacattacaatctcaatgaacttcctcattgacaacaataaaaatggaagaacattctaatttgcgtaccgcaacctcttcctcttcttcatcttcatctgagtatctgttagattttcctcgttcctcttcatcttcttctgcatcttcctcatattcatcttctgaatccttgccccttccacgggccggtgacttttcttcctcttcttcttccgtctcatattctgattcctctctctcactctcagaatactccatttgacgtcttgacggtctggccgaagtcattgaagacctccccggaatgcctttgtggctctggttttaccccagtgagaagcagttgaatattagttcaatttctaatgctttttttgcattccgagatatatgagtttttgttttgtttaccttcttggcgtttagaatccggcgttcccgttgcgcttcagcttcgagatcttcctcatagccacggtttgagcggtaatcctcgtcatcctggttccaagaaacaatcagtcgttactagtgcaatctttgctttagaaaatggaagaacccaatatacacaaactaatcaaacagacctcatcaagagcatcttccaagtagccagtggaaagttgtctcctttcaacaggaagtggatacttgcgcttgattttctccctcgcctgactcagctttgtactagccttgaggttttggctttccgccttcagaatttgagatattaaatgagaaaagtctacaaacactgcaataaaactattgttggattgtctgagctcaattaagaggtaaccttttctctcttctccttctccctctcagggtcaatgtcagtgacacagttcttaactttgaaggccttcttctgcctcgattcaacaatggcagtcaagagcctatgggaatttgacgtcagcgatgatggggtaaatctcattttcttcaaaattcttccttgtgattgaaggataccctacaccaacatccaaataagacaacactttgagatatagcagagttggaatgcaggagacatttggtttcctaatgagaagttttgtcatttagtatagagaatcgtatgggtgctctaaaatgaatcagtgtatctaggaggctggagcaactacaaattgatcgctaactaaggcagaaggaatgacgaagtaacaccttttcatgtttgataaagaggtgattctggtcttcttttgcatcttgttcagttatgttaagaacttcgtttcctatcaatagctgtaagcttccatctgaccaccttacaaaccgagcattactttcactctgcatacgaatatagagtgacttgagtttactacagcaaaagtaacggaaaaagtagaagaaatgtgtgcaataagcaacaaaaccaagaattcttgtttatgggcagatttctaatgaagcctaaagaataagaagaactgttgaacagagatatcataaaatttcatctccaactatatgaacacatgtccgtagtgaaaagcacaaagtaaactaattcggaatacataaattgcatcaaaagtatgtacttataatacatcattgcatcagaagtactagtaataggcaaactacatagcttcattgcaggtttgatggaaaatttaaaagcagaaaagctttgaagaagtgttcacttacatatgttttgccatctcgactcttaacaaacctatggcgaacaatattattgtccaaacggatacgattctttgctccgggttcatctgtcatgaatgtgtcttcttcaacgaatgttttggcatcaaaaggctttggatcaatccccatgatattggaaacttttatcatgttcatctgaaaaagatcaaagagaaaacggtatatgaggaagcgcaattttgctacagaacatcttcactacagatagacaactagaaaatggggtttcagatataaaacagaatagcacgctcatgtacaccaaatggcccttcatgctaagtaaatgtagaagcatgtttcagtgcaatggttctccacataaaagacatcagatactcactcttcgaaccacaatgatatgagagattttggtaacttggaaataccagaaaggaaactattgatttgaagccatgtcagcgaataatcttttagcaacataaagcaggtataccttaacggggtcacctggaggagggcggaaaggaacctccacttccaaagggggaccaactggcctctccctgtacctagcttcaacatgttcagcttctgactcgtattgaggatcttcttcagggattatatcatcaagcaccatatcatcgggtctcagatccttctcagagccctcttcatcttcgattggcgatctctacaaaattagacatctcatcatacatacatgcaatttcatatggtttctaaaaggaagcaaacactggaaaggaaacagatattctgtaaactgaaatgtaatattagatgcaagactcacatgttcatcctgctcaacgtcattccgaacatattcttctgcgtcttcatcatccgaagatccgaaaacattacgaatatttacgtctgactgtgcaacttgaacctcttccttctcctcactaggtgatctacccaccacgccatatttccatgtacaaaagacaaagtgatccataagaaatttgaaaatccaaggaacctcagaggactagcaagtattattaaatccagagcacagaaaagatcaaaaagaagctatgaaacagctaggaaaaaaaagaatggaaaaaggggtaccttggactcctagtctgatcaacctcttcatcttcagactcataatgcttttcaccagacctctctgatccgctctcaacaacctcctgtctcctctttttggctactctacccccatgttcttcttctttgttatcactatcactatctcttgcttcactttcctcttgtggatcagcctcctgtgaactttgctccctctcaccctcactttctccaggatcaagttctacatctccctgttccccgtcagactcagcttcagcttctccgtgaacttcaacctcagcttcaccttctccttcaggctccaccccgccctcagcctcatcctatcagtgtttacattggaaatttcagccacaatttcactgatatcttagtctagttgatattaagaagaactgaagctgaattaggcctaataagttgcattggttcctgcaattaacctaaaaccctaaattcaagcgagaagaactccagaaaccattcgtattccaaggtgtaattgaagaacagtggcagtgaaaaatacgaaaactgaaacaatcaatagtgacgaaacgaaggagataaagatggagagagttacggaagcgtagttaggctgacgacgattgcattcatgttcggattcgatctcttcttcctcggaattatctccgaacagattaagcatcatctcggatctcttttctcctttaaccatcttcgcctcacttactcaaaagtcactgcctcttagctggtgacggcggctcgtgatctgagctccgacgaagggttcactgttatcggcctttgttgaagaagctatttttttttcatctctacctcgcgattttatggcatcagaattattattattaaaaacaattgttacaacttacaaagaaaaggaaattttcatcgatatatcttttttaacgcattaccggattattaaaaatcattttttttacgtgtaacgacgactagagagggaaaaaagatgggattttatgggcttttttgagattggaattcaatatttttggcccacaaattttgggttatggataccagtttctttgtgatagtgagcttgtgtttgccttggcccctatgtatatgaatgatacaacatccttttaactgattcttttggcccctatttttttatatttaatttattttaaaaactaattattaacttctttgatcaaataacttgagttgccaaaataaatgttatgtcttcttctaaaacattgttgttggtttatagattttatctgctttagaaattaacaagagacaaagattaggtaaaagcataaccgacttgtgttctatgaaaacttaagtgacaactaaacatcatgaatattcaggaaatcctgaaaatttaaacagaattatagtaatttctgaaaaactcaagaaattatggaataaaaagaaaaaagaaaaaactatggacacttttaaattactcaaactagtttaaggcttttggaaatttcactttttgcttttttttaactcgagaaaattacaattttatgtagacacattttgctcacaaatgtttatttatatattttccataaatttatttttcagccttttatctacaaaaatttatcttctaagaatgtttttaccaccaaaaataataaatataaaccacaaaaataaaattatatattttatatatatatatatatatatatatatataacaatttttatctatgatatctggcagtcgcagttggcttaagccgcctggccgcctctggagggaccaaaataattcaaatggtaattacgtgccttggcttccaaccaacgtttttgactagggctgactcggtagcttgttatgttagtataagagttaactccatctgatactcagctgaataaactcatacgtacaaaggaatattatctaaaagacgagagtacaagtgagaaatggcgttaaaggtgatcaagatctcccgagtcagccctgcaaccgcctccgtcgacccgctcattgtcccactctcgttctttgatttacagtggcttaaactcaaccctaccgagcaagtcttcttttacaaactcaccgaatcatcatcatctcgcgacgttttctactcctccatcctccccaagctcgagcgatctctttcactcatcctcactcactttcgcctattcacgggtcaccttaagtgggattcacaagatccaaagccgcatttagttgttctctcaggagacacactctctctcacagtggctgagactgatgcggatttctcacgtatctctggcagagggcttcgtccagagctagagttacgccctctaatacccgagctaccgatttattctgactcgggggctgttgtatctctgcaagtcactttgttcccgaaacaaggcttctgcattggaaccacagcccaccatgtcgtcttggacggcaaaacggctgaaaaatttaacaaagcatgggctcacacttgtaaacatggcaccataccgaaaattctaccaacggttttagatcgttctgtcgtcaatgttccagccggacttgaacaaaagatgctcgaacttctgccgtatcttacggaggacgacaaagagaacggaagaaccctaaagctacctccagtcaaagagattaacgctaaagacaacgtcctccgaatcaccatcgagataagtcctgaaaacattgagaaactcaaggagagagccaagaaagagtcaacacgcgctgagcttcacttgtcaacgttcgtagtcacgttcgcccatgtgtggacatgcatggtgaaggcacgtagtggtgacccaaaccgaccggttcgtttcatgtacgctgctgattttaggaaccggttagaaccaccagtccctgtgacatacttcgggacttgtgtcttagccatggatttctataaatacaaagctaaggagtttatgggagaagatggatttgtcaacaccgtcgagattctcagtgattcggtcaaacgtttggcttcacaaggggtagagtcaacttggaaagtgtatgaggaaggaacaaagacaatgaaatggggtacacagttgttggtcgtaaacgggtcgaaccagattgggatgtacgaaacggacttcgggtggggaagacccattcacactgagacaatgtctatctacaagaacgatgagttctctatgtccaagaggagagatggtatcggtggcgtcgagattggcatctctttgaagaaacttgagatggatacttttctgtctttattttacaaatggattggaaactgaaaacgtacggtcttaatcgatcccagcttttgcttatttgtatttttatttctagttcaataattgccctatatgtactacgcaaatttgtattgattctgtcttttgaattctattttttggggtacaataatcatccatatttgaaatattagtagacttttcatgatcagtgaatctatttccccctactttgaaaaatcgaaactttgatttcagaaaaaaaaagctgtgatacgcagtggcggaggtacagcttcaggaggggggtcacttgaccccatgacttttacaaaaaaaaatttaatagcttaattatttggtatttagtatataatttgggttcaaatattaaattgacccccttactcgaaattcaaatcctatttttgccccactcaattaccatattttgtgtaaatcaatctcattattcttcttctattaatttcctgaaccctatattaaattttggtaactggttttattattcccctaaaaatacatgaatttagatagacaaaacaattaaataatgtgggtactaatctttacatttagataaacaaaaaacaattttagtaacaaaaaagatgtatatcatttttcaccagatttttagtaaacttttaaatagaaaaatgatgaataacatatgactactcgtgtattttccacaaagaattttttttcggaaaaacaacaataatttacgaaattgtgatattattttttgttctatttttttatctataaaaaatttttttttaaaaaaaatccttgttttaattttctcagaaacgtgggaccacaatattttccaaagggttcagagtttagcgggccgaatatatgtcataggcccataggctaaaacaataagggtagttatgtaaaatccgctcacacacactcctcaaaagccctaatcgtttatcataattcctcaatcccgtcttcaagtatcgccgacgccgcagcacaaaggaggagaagaaggatcaaaggcgcgacaacaatggcgacaggtaaaacagtgaaggatgtctctccacacgagttcgtcaaggcttacgctgcccatctcaagcgttccggcaaggtaacgaatcgtgattcttagcttttggtccgcatcgtttgtccctaatctagtattttgattgatgtttgggattacgattacctcatgaaactgcaatgatcactgcctgattgaaacttgaatttggccttactctagagcattttgaatcgtaactacaaatctcaataaagtctaaacagtgatttgctagtgtcatttcagtgaagataggtttctgcttttgattccaatgttgttccttccatgtagattgagctgcctctgtggacagacatcgtcaagactggtaaacttaaggagcttgctccatatgaccctgactggtactacatcagagctggtatgtatatataacatctggtcaaatcttctacatattggatttagcattgtctttatctgttctatttagcttccatggctaggaaggtttacctgaggggtggtcttggagttggtgccttccgtaggatctatggaggaagcaagaggaacggaagccgtcctcctcatttctgcaagagcagtggtggtgttgctcgtcacattcttcagcaactccagaccatgaacattgttgacctcgacaccaaggggtaagtatattgtctctagtttagatttctcattggcctaaattaagttaatacactggtacaaagaaattgtaggaaaataaaaattgtataacacaagttagacacttggattcgattttcgcttaagaaatctgctgaaactgtaattgtgacctattaaaactcactagatgaagtgtgtataaatggttttagaatgtactactgcgtcatttactaatatacctatggaagcaattgttcatcttcgctagcttatgattacatgttctgatgtaaccagtggaaggaagatcacatcaagtggtcagagagatctcgaccaagtcgctggaaggatcgcagctgctgtctaaatcatagcgactgatggtcaactccaagtttaaggtttatgtttgagatttagtaatggaatgagttgcatttgatgaaaaccagtagtagaattccctctcatttttgttttgatgagttttcgtttacaaattgcctctctttttattctcagcgacttatggcttatatatttgatttcatctttgacctcctttcctttctatttcatgaaattagttatcaaaattttgataatggcttgtttaggtttttacatttaagctcctcgttcttcttcaaaatcaaagtgtagaaacagagattaccaataactaattgtgaacgtttcaaagtttttaaaatttcttgtaaacggaggtaaccattaaaaaacgaattacatttattattttgtaatattcaaaacaaaatcaaaatcttgagaatcgaaaccgttacgtatactacaatttatatgatcacattttaaatttcgaaaattgagggacatttcaaattcaagaaaacatatactccactaatttagggtgtctccgttagtttctaaaactcgttgccccttttaattccagttcaaaagctcacgcctcatacacaatctctaaaccctgacctcccatttcagtttctctgtttgagaacacttgatttcttttaaaaatggcggctacagtagcagagtacgcaactgctaaatcattggcgttgctggacacagagaaccgcgaggttctcaatagttttgatgccatttttactcatggcaacaccgatcaagtcgctcctcttgatgagcctctggtctttaaccgctttggactcagtcacatctcggccaaagacacccatcaaccaaaaacggacgtagatgaatcagcgaaggcggatttcgctggtgcaaaaacgtcagtttggtgggacattgagaactgcgaggttccaaagggttgtgaccctcatggggttgctcagagcattagatcagttctgtcgaaaagtaacttctgtggtccgctcactatttatgcctatggtgacacaaatcaaatcccttcctctgtacaacaagctctctcttccaccggcgtatctctcaatcacgtccctgccggttaatctctcttcttgaaacacctgattagctataaattaaagtatgaatattttggagttagtgagaccagtctttgctttgtagtctctaatggcttaattattctctatgttcttgatgatggtgagcatttaacaggagtaaaagacgggagtgacaagaagctccttgtagatatcatgttgtgggcaatggacaaccaagctcctgctaacataatgctcatctctggtgataaagacttctcttatcttcttcacaaactaggtatgaagaggtataacattcttttggctcgacctgagaaagcttcaacgccactcatcgctgctgcaaagaccgtatggttatggacaagcatttttaatggcgattgtcctaacatacctattgatctcactactagacgtcatcatcatgattctgcctatgaggtatcaagacatttgggtcctaaacaagctcaagggaccaagaggggccggagtttttgtgaattatgcaatgtttcttgctcaaaccatgatttaaccgctcacctctctggtagaaggcacagagctaacgtaagctatacatttctttttcttaatgtgtgcttgaatattgtcctctctttaagcctaatcttgagttcactctacgggcattagatgtgaggcacatatatatatatgttttatgttgatatagtcttgacaattgttgttgtacattttctcaacttgtgtaggttgagctagtagcccgtggacgccctcttgtcagtaattcaaccgaaccaaagtatgcatggtgccgagtttgccgtttgcgtttccgcagccaagcaagttatgaaacacacatcttagggaaaagccaccaagaaaaacttgaagaccaaaacgagcattccaaaaagcgcatctgcaggaccccctaatcgtttcatataagattttggagggaagacataatgcgattagagtttgttaattcccaaacttgtcttttgagtctcatctttagttgttggttgaacaacttttggtttcggttttcatttagtctcgtctgtgtttttggataaaagccgagagctgagcccacgttgataacttttttttttttcaaaaattgggaacctagtagatgatgatgtgaagtgataattacttaaacgtgattatatatatatatatatatgtgggaaataatgttttactggaatgttgatataatagttttgacagttttttgtactctttagctgaaaccattttcttaattgatttttgttgtcagtgtgctaatgtcattggtgtaatcaaacccgaagcaaaatcgaaaaccttccgctgtaagctttgccaggtcgattgctcgaacgaagctatgtataatgcaagtcatatttcagggcggaaacacaaaaacaaacttaaaagtcaagctaatctgtttctttaattaaatttagagtaatagatataatgatctttgaggtctatggatttttggtaaggaataatttgagccaaatttgagcaattttgattatcgatcgtacaagttgtagttttgttgctccggaagatttcagattttgatgtaaatttaatcccacaagttataatcatttttgtagtttatggaattgaaattctaaacataattgttctgacaaaacttgtatttttaatacaattttgaaactctgcacatccaattattttctttaacgtgcatgcaccgatttatttagtagccttaattttttcttattaagaaaagatcctttactaattatgacacttattttcgctaattaccgatggggagatacagcccccaaaagttacaacggctattttcaaatgctgattggtgccttttcaaatgctgacgtggcttaaataataattgtcgaaaaagtagaatactgtatttaacttgatcgtactacagaggacaaaataaaaaagcagactttgcgaaaagcgaaaggtttcttcgtcaacatggaaagaacttagtggaaacttcttaaaacttagattgtcagattagcataactcaccttagcaagctccgatcttcgacgagatagtgagaggagtaaagagtaacttttggttcagaaacaagtgtctcttctctctctagtatctccggtgatgtcgacggcggaggcggattacgtgaaggccaaaacatcggtgtggtgggatatagagaattgcgaggtacccagaggttgggatgcgcacgtgattgccttgaatgtgagttcgtctttgttgaagatgaattattgtggacctgtctcaatttcagcttatggcgataccaatctcatccctctccatcatcaacaagcactttcttctactggtgttgcgcttaatcacatcccagcaggtgtacttctcacaaaacccattttgtgattcgtcgttgtttagatgcttttgtggtttttgttcttcttggattgggattttgttttgttgattttgtgtgttttttgtttgattttggttaggttattagttatgtattcgtcctggatctgcaattttaggtttttactttctgtatgttgaattgggtttctccattttgattttggatactgtgattataaatctcagtttttaagtagttttctaattgtggaagtatatgattgggtttgtggtgttttggtggttggaacaggagtgaaagatgcgagcgataagaagattctggtggatatgttgttgtgggcaatagacaaccctgcgccagcgaatttattgctaatctctggtgacagagacttctctaacgctctccatcagctaagaatgaggaggtataacattcttttggctcaacctccacgagcctctgtgccgcttgttgctgctgccagagatgtttggctctggacagtcctagcctcgggaggtcctcctcttacaagtgttgaatcctctctactctttaacaatgggggttttcgtgtctctaataaaggtgtgtcgaaacttccagtttctgaacaagctcagcctagccaaccaactggttcaacttctaacgctggagatactaaggatcataaaaccagagaaaagcatgttccaagaggatcacttcaagaaaatagaaaaaatatgcttcagcatagcagtggagccacaggggaatctgctactacctgcagaatatgcaatgttgtatgtgatagctttgaaaagttcaccgctcacctttcagatataaggcatatatctcaggtaaattaatatcttgcttgttggtctatctcttcttgaagatgaaattgtatggtagctagaaggaatagaaaaaaaattgtttgaattctttgtgcaggctgccattgtagaaagtcgcagagctcaggccagcgtttcagccaaacccatacatcaagcagttcttgtcgaacctttgttgtgcaaagtttgccagatcagctttaccaacaatgatacatataaaaatcacacctatggaaaaaaacaccgaaacaatttggaactgcaatcaggtaagtccaaaaacattttggtgggaccagctgagccttccaaagaggttctagagaaacataatatgaataagaaggtgatgattgagagtagagctcaggcaaacgctgaattcgtttgtcttatgtgcaatgtggtgtgccagagtcagattgtctttaattctcatctgcgcggtaagaagcatgccaacatgctgagtcaatcagaggcaagtttctaacttttggttattcgagaacttgttaatttatagcaatagaaaatttgacagcttggtaaaacatatgcctgacctaaaagcattggatcaggcactcattgtttctacaaagcttcaagagaaaggagtcggagaaaaagaacaaccaagtgaaacagttgcagagcttcagttgcagtctcaaaaggctcaagagaagcaggttcccatggtgaatcaattagaggcaagtttctaacttttggctattcgattatatggaatttttattaacatcgataagttggcagtttggtaaaacatatgcctgatattatagctttggattaggtactagttgattctaagaagcttccagagaaaggtgatgaagtaaagggtcaaccaaaagaaatgactgcactgcgtaatgcaagtgctaaatacatttgtcgtatgtgcaatgtggggtgccacagtccaattgtctttgaaactcatctaaggggtcagaagcacgctgccaatctgaatcaatcaaaggcatgtctcttacttttgcatatttgagagcatataaaaaactacagtgtggtagacatatgctttatgtaataccgtaggatcaggcactcattgattctaagaagcttcaagagaaaggtttcggagaaaaagaacaaccaagagaaacaattgtagagccacagttgcagtctcaaaacgctcaagagaatagcaagtgtttcgaaaagcatgttgtcatggtgaatcaatcagaggtcagtttcttaatattggtaatttggtattttaatttacaatttccagtgtagcaaaacatatgctgaatatgagagtcttaactgtggtaaaatatataaagaatgaagcttatatagttgcatcaggtactcatcaatgcgagtaagcttgaagagaaagatgcccaagaaaaagctcaaccaatagaatcaatagccgaacctcagtcgcagtctcaaaacactcaagagcataccaaattctttgagaagcaaaacgaagagttgagaaagatttgtggcactttagaaagcagtgtaaaagaacctcttccaagtactaaggactgggtggagactcttaacaaacagattccaaatggagaatttttctttggtgacctaagatctgattttgaagtacccagggaagcaaggtaatttttgctaacttggatttgcttgcttagtatgtcaaagatgcaattatctaaatgtattctccaacttttgtcatagtgaatgttttgatggcattgtcaagcctgtaaacctttccaaaggagaaactaagcattcatgggaggtaaagaagaagaaaatcgaggtgaccgtacgccatgcaagaccagctgcatctaaactttgtcatctttgcgtagtgatttgtgatagccggggtttgtcaacagttgtttgtgataacaaagctcattggccgaaccaaaaacatactactgtagtgacacttacttcatgttctacctctttatccttgatcaatatcaaacccttctgacttcttatttttgatgtaggccgcctttgtagccagcaatggttctcagtccagcgtttcaaccaatcctttgaaggaaccagagggtttgcagcccgtgtggtgccaagtctgccagatcagctgcaacagcaaggttgcatttgcaagtcacacatatgggaaaaaacaccgacagaacttggaatcacaatcagccaagaacgaaactatgtctactggaccaggcaagctttctaaagattatggagaaaaaacgaagaaagtatcatgcaaaaaccaaaccacatttgattctcaactgaagagtcagaaccattataccatggcgaaggagcttgtagaggtaaatcttactatttaggttttctttcgtgaacttggaatctgcttttagtaatgaatattacaaatcttagtaaaaataatatccttaggtttgattcctatcgaaagtgatgaagtatatattagaccttaactaaaatatcgatgtagaaggcatttgtctccgcatttgagcatgtctccgcattggagcagttcagtattgttgactcaaggacaatccgagaagacaccgaccaagaaaaagaagcaacaaaggagcagacacttgtaaagatggatggtaatgggtttcgaggggcaccagaagataaagtggaattgaaccaagaaaaacatagagaagcactggagcagttcagtattgactcaaggataatccgagaagaaaccgatcaagaaaaagaagcaacagaggagcagacacttgtaaagatggatgatcttgggtttcgaggggcaccagaagataaagtggaactgaaggagagacacaccgtatctgagaacttggtgcaccgtgtcttcactgaacagaatcgagagtctagaatacccaatgaaccgaggtaagagccaacattcatgggagtgtataatatggtctctctctctctctctttctcttgaatctcgatcaatatgtgtgtgtctaactggttgcttggattttgggttacagaggatgtttagatgtgattcctgagagagtaaaactgccaccaaacgtgaatgtggccaagaatttggaagatgagcagaagcataaacccgaaccaaaagcacaggaagccgaaaacaagtctggaggacgcaaggatcttcctggagaggctgccaaaagggaagagattaagggccaagctgataacttttggactcgcctttgggggaaaaaatattaaaataatgtgaattgttaattcatgtttaagttgtcaacaatggatgttttcttttgaatggcagattaacgttttattttggattggcttttgcttatttcttactgttgtttcttatatataaactttacctcttaaaaaagattcaagaacaatagaatttaggcattgtagtatataggttctctcaataaattgggaaataacgaccggtttttccaacagaattttcggcttagtctgtaatgtaatcatcaaaaattgcattatttgctttacgactacagctcaactgggccaccctgattacttatccgacccggcccgacccatccggatcttccttctcttgtttaaattaaagcagataaaaaggaaactggaaaattcagttcaagtattgtcgtcggaatattactcttcaccggccaggtaaagctttcctacgactatgcttgtgttcgtcggaatgtgtttttctttctttttcttatagtctctggtcgctaatgactcgtattcttggtccagttttcagctcttgtgtgtaaatttgttagtcttttttaatgtcgagtaattggggaagtagctcgcgagatagctcgggaagtagttcaagaagcgatgttgacaactcgtttgatgctgacgaacttttacagattggttcaagatgtatggaggtgaatctgtttttctttctctatatcctttgtctcagagattgatgaagttcatatttttggctttatgatctcatgttttcattgtaattgtagctacggagagaaaaggagatgcttagagaatctcagtcacagagtgttgaacttgtcagagtatgttcctcttgtgtgttttagactagtgaattgattgttcaaactttttctgagatttgttgtcttttttttttttaccctagaggttggaactgaatgcgaattcgttgtcagagtctcgtttagaagataagagaagaattcagatgttggagaaagaattgttgaattgctaccaggagattggtaatggagagattctcatgaaactgaaatctaggcatatattttatatgagctaaaaaacactttctttgtctttcagattatttgcgggatcaagtaaacttcagaagccaggaaatgaacgacctgagtgaacatgtactcgatcttgaagtcagagtaactaaatcagggaaattggaagaagaagttaactatttgagggaggagttgtgttcgtcgaaatctgagcagctattgttgttgcaagaactggagagcacagaaactgagctacagttttctttgttttctgttgagaagctggaggagtcggtctcatccttaacattggagtctcagtgtgagatagaaagcataaaacttgatatagtagcgttggagcaggcgctctttgatgctcagaaatttcaaggtgaaagcatccaagaaaacgataagttaagagaaatagtcaaggagctacggttgaactctcgagaggcagaagagaatgctgagtgtttagagaagcaaaacaaggagctgatggagagatgtgtagcctctgaaaggaatatcaaagacttacgtcaaagctttagaggaaggttggaaagtgaaagtgaagcgcctgtaaatccagattgtttccatgacatcatcaagaaattagaggttttccaggatgggaaactgagagacaaaatggaagatatggcaagacagatacttcaatacaaagatcttgtaaagcagctcaaggtattagttaccaaacaaaacagtagaatcaaaaatttggtgcctttttgcagcgtcacacatattctaactagttaaaccattattttgttatgcctaaggatgagttgaaagaagagaaactaaaggccaaggaagaagcagaggacttaacacaagaaatggctgaattaagatatgaaatgacatgtttattggaggaagaatgcaagcggcgtgcatgcatcgaacaagcatcattacaaagaatagccaatctagaagcacaggtacttgcttctttatatcttccaatttttttattttttttgagccatcagatattgttgaaggaacctaacaaatatccattttcttgttaagatcaagagagagaagaacaagtcctcaacttgcttagttcctcttcctgctgtataaaccagctaaggttcgagttaaacttgaaatcacagttaatgcctcaaataagcctttaagctataaggtttgaattcttatgtatttaaagtgtacataatccaatttgattggaaattggaatatagatttcatccctgtgattatgtttatatatggaaattgagttttacaagagtgaaactgcttcttcatgtgcctaccaaaaaaaaaaactgcttcttcatgtggcttctaagtgtttaattacgccttcagcaacatgtagagatcttgagaaattgacatgagtctctagagaatgttgaaagctgtggtcgttgaccaagaagattcttactatttgactctatttgataggcctgtaatgagcctaggtcaataaggctgagtttatttgatggcccgtttttctctcttttattgttcttctttttcttgtgaaaataaagaaatctggaagcgttgttgtatcatcatgtatgtgcagagtctagtaaccttgttgttgatgcaaagggataaatgaatgggtcaaggaaaagaacctgttgtctttattgttaatcaagacacttgtagatttgttgtctaacctaatccaacttgactttaagcaaaaacatattccaacttgttcttcaccaaaatgatatgttgaaatatcgtatctactaggacatcaagattttgttgtagtcgttatcaatgtaaccggtaacaaataaaaattaatgagataaattaggcatgatcatatccatagatattgtcaaacaattttctatcttcaagtagtttttggttttgggcgaaaatatgttctctttgacaaattcaacaaagaccattctttttggatgacaaaattgacaacttacccattctttttgggctcatacaatttatcaactaaaccatcagtacaaaaaaagaagcagaaattagaaaaatataagaaaatgactctttctctgtaagaaaaaatccaactacgtttattatatccacaattacgtcctatatacaattaaaaagatctaaattgctctattttcgttagaaagtagttactttttacttttttagaagtttgatctagaaaaaaaaagaattatatatatgaccgttttagatttgaattaaatgattttgttttatttattaattgatccacgttcctttctacaatttgttttttttttaatctccttgataaattttcgtcaacacatacccaaagacctccttgttgtactctcaaattcttgggtcgttctgagtcgtctccgcgttaaatcttttccctttttgatcctttcttcctttcttcttcttcttcgcattgatttggtcctccttcctcttctattctattcattaagaacctaatcttcatcttctccatcttcttcttcacggactccacttcgctcatccaggtaaccacaatctgctctctatcttttgcttcaaaattctcagttcctttcttctcaatttccgtctgctagatcctgggctttcgatttgttccgttcctcttctgcgattgtttcgttccagagagaattatcgaaataattaagcgaattttgtgtgtggttttcatagtcttgggttctttagccgctacatatactcaattatgcccaaaattaggtttaaaattgattaactaaaacttatactttttggtctcgtcttatgttatcgtttaaattgttcttagaagtgaaatcattcgatgctacgtttttgacttgttgctttactttatctatacctttgatttgatcaacttttctcttagcttacaagttagaatcaaagcatcaatcctgattactgttttggtttctgcaggaaggtttattagtagtaaccaatccaagtgttccttttgtttgaagcaacaagctttgtgatattatcctgagagacaatgtttggtttaaggaaatcaccggcaaatcttcccaagcataactcagtcgacctcaagtcttccaagccaaatcctttcgattcagatgatgaatctgacaacaaacatacccttaacccttctaagaggactacctctgaaccctctttggctgatatgacaaacccttttggtggtgagagagttcagaaaggagatagtagttcatccaaacagtcattgttttcgaactccaaataccagtacaagaacaatttccgtgattctggtggtattgaaaaccagtcggttcaggagcttgaaggttatgctgtgtacaaggctgaagagactacgaaatctgtacaaggttgtttgaaggtagcagaagatataaggtctgatgctaccagaactttggtcatgttacacgatcagggcgagcaaatcactaggacgcaccataaagccgttgaaatcgaccatgatctcagtcgtgtgagtttttcttccttctggttcttgattataaaatggaaacattcaatctttttctgaggacattagttggtgtgagataagaagacggtagacatttgatgctgaaactagttggatttttggttttcagggtgagaaacttcttggaagccttggaggcatgttttcaaagacttggaaaccaaagaagactcgtcctataaatggtcccgtcgtaaccagaggtttgcttcttggtcattgatatctcaattcttctcgcagctattttactttcacctaattgctgaatcctttattttgtgtttttgcttagatgactcaccaacgagaagagttaaccacttagagaaaagggaaaaactgggactgaactcagcacccagaggacaatcaagaacccgagaaccactccccgaatcagctgatgcttatcagagagtggaggtttggacttctcttccctctcttcaatttttcctttcataagaacattactatactcctgcatctgatatgagtgatgcatgaactctttatctgtggtcctgtaatgctaacaatttgagacattgatgactcatcaatgatgagcatatatatctgagtgaaaaacatgtgttttggacgccactaaacttaatactggtttattacagatggaaaaagctaagcaagacgatgggctttcagacttgagtgatatactcggcgagctaaagaacatggctgttgacatgggaagcgaaatcgagaagcagaacaaaggacttgaccatcttcatgatgatgttgacgaactcaacttcagagtgcaacaatcaaaccaacgtggtcgccgtttgcttggaaagtagatgaacagagggtttatatgttcattacactcattcctcgtttgttttattctctatgaagttgttctttaaaactggaaagattcttatcatgttaaatacattattgctatctgtgtttgtatttgatcttgtgacaaaaaaccaaaaaacttattgatcaaacagaagcaactttggtatcgtttttatctgtatcataaagctttctcaagaaattctgataatagatgaaattatgagttttaatctcagatttataacctaaaaatatcagtgctagaatacgacataagaatacagaaactccagacaagttggaacatatgttatgcaacaactgcacaatcatgtgagattattcaaaagaacaaaaaaaccaggaactcttcattccctttagtcttcctcagctacaatccaagggatatattccacaatgtcctcttcttcacttgtataatgtctgaagccataaaacacaaagactactaatgagaactagacaaagcaatctgacatagttggaaagaactatgaatagaggaaataataatctcatacaaacaccacttgttcccgaatcatattctcaagccacaaactcgacaatcaatgaatataaagtggctccaacatgaccattaaaaacaaatagctttggaggatattgtaatgacaaacatacatctactgaagcttgacttccatgatgttcttggtcttgggaggatatgccaagtaaaccttgagcactctctcagcaacaaaaagctgttttttagcttcagcataagcctcagtcaccttcgatgggtcagtgagattcttgttcatgcggaagccatccaaggtccttcgcttactgtactccctaatgttgtaatcagggaattgacgtcccgctcgaagcaaggcacgacataggctaagaacttcactactagacaccattgcaagattggaaactaacccttaattatacaaagcctggttaactgcaatcagtataagaacacaaagaagctgagattagcaatgccgaaaaggaagagaagtagtcaagatgatcaagggataaagctatacacttcgacatgtaacaagaagttatatagataagtgaaaagtattaaggaccagtacatcatttatagagcaaaagaacctagattcagtaacattagtatatagataagtattgatttgagtagtgtatataaggtatgagaaccagttgctgcaacattagaaactaggcactagagttcatgaaaatacgcaaaagaaccaatattaactaatcgcaaacgcttaaaacaatcaagaagaaaccttaaaaggccataaacgcacttagtaatcctaaacttcagtaaaatggatgaaattgcagtcacagccaaaagagacaatacatctgaatcatgagaggatccgataagcatagaatttgacgataacgagctccagatacatatacataccgaatcaaatcgtcggagagtattaatttcccgagctcgccgttgaagttctccgttcgaaggttttgatagcagcaagctgggtcgttcgggggaataaataaacttttaggtttacccaaaactaaaccgggaaaactgatttgggaaccggatcaattttagattgagtaagaaaagaaccggttttagaatgggctagacacaaaggcctgttaaattgggccaatatgtgataagccagccttttttaatgaaggtgtatgagctggcatattcgacaagaaatagtaaacaaaaccgatatttatcattctctgtcacgccttcttccttctctacacgaattcgattctctcttatctcgacgagaaaaccctactgcgaaaaaactccgatctctctggcgagaagtaaatttttatctctgagcttggtttcaccatttctctatctctatctcctcgctgggttacggtacgagcctctcaaacttttcgattccttgtgttcataagtatgtgtgaaaatccttgcgtgtcgagattgatttttctctttttcgtttcggattcatcgttggattcttatttcgtcaatgtttttctgtgatttgttctgattcatgtgtaatttgtagctgacttgattggtgatcgatgattaaaatttgtactcgttagttcccccttgattcgattgattttgtctctgtgagggtattttttctgattctattgtattgtttgtagatttgccaatattagagactacaagtgtcgtaattggattctgaatgaacttttgaaactctacacgagctggattgttgtgttatttatattacagagaaatttatagcatttttgttgtgttcatctggttttcactaatttggttttcttctccatcttttgttgataggtttggtaaggtcagtgttctctaaggctgaaatttgggggtttctcagtctcgatgtggtcgtgctccgttaggattcttcacaatcattagggttatatttcttacaaactgatgctcattttctcttccctgtctatggctttatctgtgatccttcaaaagcttagtgtcttcggccctggtttgaatccttctttcccttactgcatcgccaatcactcctttgcctcccgttaattgagttgctctctttcaacttaattacattagtctgcttcctttgctgtctagtctggatagtgttgcaaatcaagtagtatcttctttagacattcttggctgagagatttacactaaaagcatagaataagaaacccctgtttggttagtatctacccgagtctcgtagtcctacacagatccggatcctagtttcgaagctagttcttgtttagctgaagctcagacccaaaatgctccaagaaccgtcggctgcattctccctccggcgtaactcattcagacgccgatctcccagatcaaatgtcgatgacagaggctggaatccgctccatatcaaagccagaaaaggcgatctgaaatctgtcaagcagcttctcgaccaaggaatggatgtgaatgctctagcatggggacccaaatcaaaaggagtgagtgcacttcaccttgcagcagagggaggtcacattgaagtcatggatttactcctagaacgtggggccaacattgatgctaaaacatggggctcatgcgggtggactcctctccacgctgcagccaaagagcggaagagagaagcagtgaagtttctggtggagaacggcgcattcttggcagatgatataactgataccaggtttaatccgccggtgcattactgtcacggccttgaatgggcgtacgaggaaatgaagaagcttaacagcgagtcttcttcttcatctggtggagacacatcttccagttctgacaactgaacttcttcttggttgtttctcggtgtgttttgttttgttttctagttgagactacttatcagaactattatggttggtgtttgatcttatgggctatgtgaaacattgaaactgcggatacattcatgtaatcttcagtgtgttattttgcaactccagtttgatatcctagccgaatttgatttgtttaaccggttctggatcaaccaaaaatatgagataatcggttttggtctcttatgaatcattaagtctaaaaattaatgcaggtaattgacatagtgtgatttaacataattgacatggatatgtatatagctagattgcgaggatgaagcaaagttttgctcttaattgagttagcaccatatgtttctaatcattgtcatttgtgtcttaggacatgtttaactaattaaggtaaggaatgcaataattttacacaaatgacaattatttggtcgatacccattaacaagattggttctatctcttcaatgaatgatttggtcgatacccattaaccaaaaagaaaacatccggatcattaccagacccgtcggtgagatagcgggtttgaaatacacggtattcggtttacgaatctcaggaggaggaagagaaaataaaaatgagttttttaatttcgctctcttcttagatc

SEQ ID NO: 940 - DNA, 80376 bp, Arabidopsis thaliana
ccgtttgttctctttctcactttggctgtttaagcaaaaaccatggcttctcgctgtgagctacttctgatctgcgtcttctctctcttaattgcttttgctcactccaagacattgaagcgagatggtaagtttttactttaatcaccctctggttttgtgtttatgatcgatcctccattgattgaatttgtatagctctttaacagatttggtagatacccattatccagattcgttctatctcttatcaatttccatgatttagcacgcaagttcgatcctttttctttcatctatttctaatctgagctgagctgagctcaaattgagaaatattaattatgtgtgaacaatgattggatctgatactattggtctcaagaagtttgttatatctctgcatcatggtagttggttactactgtatcttttataatcagctttcctcaaagttaatctcttgtggacagtgaaagctttgaatgaaatcaaagcctctttgggatggagagtggtgtattcatgggttggtgacgatccttgtggagatggagaccttccaccttggtctggtgtcacgtgttctacacaaggagactatagagttgtcacagaattgtaagttctggtttcttctcactttagtgttttcttttgtagcaacctgatttgcttcactgaatttgatttgcagagaagtttatgcggtttcgattgttggacctttccccattgcagtaacaaaccttctggatttgactagactgtaagttactttctaaacctttttatttgtgacattaggtagattgatgcaagaactctttgaacagatatttccaacctagtttgtgaaacgagatccccaataattctttagagttatgctgttttaagatggttaaattgaaactggtattggtttctttgatatttcagggatctacataacaacaagttgactggtccaatccctccacaaattggacgactgaaacggctgaaagtactgtatgttccttgtgctctcacaacgatatgaatcattgatttacttcctttcaaagtttgtctcaataagttgttctgagaccaaactcaggatccaattctcttcagagtgaacttagcacttacgtgacagaagtctgttatttgtgccatcataacatgtcaagtttccaaatacttcacctaaacatttactctgttgttatcactagaaacctgaggtggaataaactacaagatgtgatccctcccgagattggggagctgaagagactaacccatttgtgagtaccttaatgtttctttttaccttctgatgatcgtccatttttatccacatgaaatcatgatattttttcttcttttctttttatgtttaaggtacttgagcttcaatagcttcaagggagaaattcccaaggaactagctgctcttcccgagcttcggtatctataccttcaagaaaaccgtctcattggtagaattcctgccgaactggggactctgcaaaaccttcgccacctgtaaacaccaaatgccgttttctacatatagtttgggtaccctccaatgatttatttactgagatcatgtttggtttgtgtcccattatttttcagagatgttggtaacaaccatttggtgggaactatacgggagctcatccgttttgatggaagtttcccagctcttcgcaacttgtaagcatcccttcagaaatttccatttgcttctctcttccgtttgatatattcttttatgtactacgttttctctttttaaaatctcgattcattaggtacttgaataataactatttgagtggagggattcctgctcagctgtcaaatcttacaaacttagagattgtgtaagcagtctacactctccatctctctgcaataaactatatcactagatctctgatgtctgtttgattggttttgcagttacctgtcttacaacaaatttattggaaacattccttttgccattgctcatattcctaaactgacatacctgtaagtctttgtgctagatcgctgatctttctctttgtctttgatttgcttactatctaaaagaaaatatgcattctaatgggatcatgatgttgatgaaaccaggtaccttgatcacaaccaatttaccgggagaatcccagacgcattctacaagcatccattcctcaaagaaatgtgagttctcacccaatttttgaagagttcatcaaagctttgactcagacaaaatagcaaacccatcgagtataagaatttgaacaatgtgaactgttttgtgtgaaatccatctggatgagtttatgatgactggtttttcagaaaagttgaatgttttctttcttcattctccactctgacgataaggagttctgtttctattttgcaggtacattgaaggcaacatgttcaagtcaggcgtgaacccaattggtacccacaaagttttagaagtttctgatgccgattttgccgtgtgaccggatagaagattccaggaaggttctcgagaaaacgtctcagaaccacctagagattgttccactttagccctcttcactattattattttttgtatggtctgtggatttgcaaatgaaagaaagcataagactacaagtttttatcttcatattgtatagttagacacattccactaatctatatttctccttaatcaaatgattatatatatttagattggaataaaccacttccagtatacaatagtatgtgttacatcgatcatatatacaattgccaagaaatttacagtagttcttcaatgtttgattttcaccagttaccatcctcttcaagaacaagcaggagcatcaaaggtaggcaacacaatgaaagagatcgacagcggattgatataaaccggagatttcacaccatgacggaccggctcaagctttgggatatctccggtggctgtcggtaccaaaggtttaccattcaagagcattatcttgctacgcaagtcaccgtctttgggactcaagtgatactcttctctgttcaaatatccgtccgaagctttgtttccaacccaagaaaccttgctcttgattgtttccaagaacgatttcctcttcatcgattctgcttgcaaaaccaccttcacgccattgctgactgcgactgtaaacgtcgtgtgcttactcagattgatcagaagaatcgttatacccgcctaagatgatagatttcgcagttacaaaccgaaactagaggatagtttagcgacagaaagatagagatatatatacactcactcttcttttggagcaatgaacgtaagctcgtagatactccgaggcagtcgtctgaacgccgagaatgcctttacccatcaaacgatgccaaagaagcgcgctggtcagattgttcgagatcaagaagtttatgttatgaactcgcctacagtaatcatgctggtttaggatttacagattatactttatgaacttgcctgtagtaatctggatttggaacaaacgtttccttttcaagcagaccgtagaaacctccgaccaaagcttgtctgcagtatactttggtgttatgcttcgacgaaataccgagctgatctaagtaccttaagagaagagttcattttgtcaataatagaaaccgagtaaagatagaatgtggaatttgattctgtcttaccagaaactgttaatgaatgtctcggaaacctgacggccaccactgttaaaggctccaccagcttctccaacccaagcagcagcccaaggtccatgttcttgaattgtttggttcacattcgcgaataattccgaaattccgctcaagtaatttggatctagtatcttattcactagcttaggatcattccctgcaacactaaattcaacattgtttaggaatgctacaaagagagtctcttattgatttatttttcatatgcagcacctggaccaagattgtatatatgatgagtcaggacatcaagaacaccaggcccagagagccgaagaagctccgagtaccattgttcttcaaagaatccacctggagctacaaccaaaggcttggttctagaattcttgtaaacgttcttgattacatttttcagtacaatcaagtctttcccataaagctctacactcacgcttgcccaaatcccgcttccactaagctcattacctagtcaagaacagagctcgtgttataaggaccaacactaatatataagaaacaacatgggccaataagaaacaacataagaaaagagagatctagttctatataccaaactcccacgagtctatagcataaccctttgagactgtgtagttcatgaaatcctgagtgttggtatgatcccaatcacctccccacgcagttccgttgagtttatttctcccgtgcagcgcgttcaaaccgaaagtcacaatagctctgtagaattagagttaagtcaatgtgaattatgctctgcataaaaccatactaaggttttatacttaccccgttgcgttgaagaaatggttaacttcgtcccaacgtttcatatacaaacatccttcagagaatccgaacaatccgtcgtcagttttcttgaactgagtgcaaggagtcttcaagtctccaacgtcgtagatcacttgatcttgcaaggaaccacctattcttatcctcaacgtcctaaaagctaacaacaatcaaagtatttcagcaaaagaagtttatgagaaaatgaatatttcggtttgtgatagaggtcacaaaccttgaatagctttagcaagaagaggagaagctaagttctgagtcattttcaaaagattaaaagaaaaggagagtttttaaggcatatttaagatgaagtaagtaagagtcaaattaagctcaaagttgttttatataccaaattgatgagagatgcgtaaccccaaggacattgatcatagttgcatttttcaggtggccaccaatcaagcgttgcgcagataaagttctcatcggtctcagcgattcgacgtgagccgtctataaccaaggtggttcgttccatgttgctaccaaaagtaacaggaggaagtagaagcagacaactcaagaacacaacaacgttgaagcccattttggtttctttcgattggttgatctgtaagaaagaaaagtgaacttttagagcgatcaagaattagtaatcagttacaaccaaaaacatatcaagaagatggaaaatataatccaaaaaaattagaaaagaggaataatagaactgaaacctgcttatcttaacaagcaaatgatgattacagaggaaaaacttattaagaaaacttggaggcttgttcaatgatataagaattatatttcttggaaaatttatttcgaattttgagttgaaaagtaaaccattagtgtttgaaaatttgtgtatatagaaattttacttaatgttggaggtgtatttgttaatgataataattttgttcctaatttaattagattagtcaaatgttggtgtcagagaagcatggataagggcattagttgactttttggatgatttaatcattaatttctaattttaatcttgtaaccttcataagtcataactaaatatttataatttatgtttctcgaagagatgatatgaaaatctgattgagagagaaagcagaatgaaaaaaaacctcaagaacagaaactgacctcagaatcaaggatccatggagagaaaaagcctagactgaagttagaaattgggacttttgattagtttgaactgtggttggatctcaaaacagagcagaggtgctttttgttcttggagttgacaacacttcatcaaagtctctctcttttaagcatgcttaatctaattaaaccgtttacaccaaaccgaaactgtaccaatttttttgttaattgatattctattgaaaaccatgagaaagcaaatgttacaaaggagcccaaacacacatttaggagaatcagtttctaatctaaggagcccaaacacacagtttgaatctaatgagcccaagttcattggcccataaagaataaaatcaagtaacccatcttgacattgtattattgtgggctctgtcttctcaataaaacattttttgtttttgttttgccaaattccatatctcaaagatttattttaggctaaatcatgattatctttttcgacggccacattatctatatttaaaatcattttcttgcgatataacaattcatatattttttgttcgtgggtcaacaccttgatcttatcttattctaaagaaattacgaaaagaatctagagatgttcattggcaagaatcattctttagaaaaagtaccaaaaagacttaacttaaggtatcggatcccttaaatgtcatacatatgaatatgatctcacaaagtaaagtcagtttatgtaaaaaaagaaaatagttacaaaactaataactctttgtttttatgttaaagaaaaattatggattttgtgctttagccaaaatatcctccgagcgattggaattccttgtatgataatatacttttgagatttaatatagtgatctaaggagattatagattgaatttgtcaaattcatttttcgtgaccgattattcatgcatttttcatgattttgatatataagagagattaatgagatttttaaacaacaccgattttttattaaatgcatccaagtgtatcagttttatataaatgaataaatagattataaaattaggtaaaacattaaataacaaatcgagccaaagtaaattaaataacaaaattctttaatataaaaatcagaatctccctctctcacaagacttctgcacaagaagatttcttccctcctctgtgtatttttgcgtgttcttttcctaactaatcaaatctacctttcttctttcttcatatttgtttccaactaaagataatttgggaaagcaattttctggtacacatatatacatttttctcatattttactgttttctttgttttttctctcttcttattctgtggaaattctctgagagttagattaggcagcaatctaaaggtatcttttttcttaattcttgatttcttttttgatatacgtttttggttatttttgtgtttgtttgaattgtgaaactgttggtagggttttaagcgtgtggagtatttattgcgttactgtgtagaaattaggtcattgtccttcaatctcgatcagaagtcaaattttttatctaaaaaaagatcggagtttttttcattgttttgtaatacaagtgattaattttcgtaacggatcatgatcaaaattcaattttgtcgtttaggtattaatgtcattgatgatcaacgaggaaatatacacatatttgatcatgactcttaaagtcaacatttgtccttctttgaatgtattgagtcatctttggtagatttttgtctaaagatttgttctttatgatgtcaaattctagaatctgattagtgaataggtaataaaagacaaagaatcagtttagaatccattaaattgttctaatatgctctgttcataaacgtcgagatctttttggtaatgcactctgtttcctctacaggtttattttgtcaatggctgaagagaatacttcagaggtcaaagatattgagaattcttccgatacaaaccctccgaagatgtctgaagaaggctctttggaaacagtacgtgtaaaggatgtggaaaatgtggaagatgttatagctgtggtagccaaggatcaagaagagattataccagagattattgaagtgcctaagcctcaaggtgggactttgagacgccattcgactggaacgataagtaaaccgcaggttcagtcccgttatcgtgggaatcatcgtgtgggttcgactcatgatttatgtaaacatgggaagaaatgtgatcaagatgatgctgtgaagccgtggaagattgcaaggagaaagagtgttgaaggttcagttgtgatcaaagttgagacaccaagttcgacaaggaagtcattggggagtgtgagtagacagagtccaggtataaccaaaccggatagttctgtttctgcaaagagagatgccttggctgtgaagaaaaaaccatgtgcttctgtgaattcagaatctagctccaaagaaggtagtgagatagcgaaatctgttgatggtttaagcgttaaaagcaatgatagagcgcggaagaataaagaaaccgagagtggtctgagtggttcagctgttgttaagaaggttcctgccttgagaactgataagtcaagtacttctacgggcgttggaagttctaaggtttgtgctccaaagaatctgaagaatgtggagaaggcaaagacgactcagacaattagcggtgaagatgtaaaagaaaagactgtgtgtgttgttgaatctagcgtcaaaggtgttaagagtgaaaagcaaccatcatctgagaagaaaaccatgaaaagtgggaataaaagcttgagtactactcctaaacgtggttctagtcctacaaaacagattcctggtaaaatcagtaccggtttgactaagaagaaagaaactggctctgcagacgttgttgaagcaaatccaaaaccggagaagaaggttaggcctaagaagacaggagtaaaggtgagtctagctcagcagatgactttcaagaaaggaaaggttcttgatcctaaacccgaggattcttctccgagatggatcaagttcaaaaagagggtggtgcaggaactgaaaacgcaatccgaagggaagaagaagaatcttaaagatagaagattgggtgttgagacgaaaacagattcttgtgaaggaagtaaacgtgagaaagttgttctgaggcatcgaaaagtagaagggaagaagaaaatgataacattgtttaacaatgtgattgaggagacagtgaataagctaacaaaggtgaggaagcacaaagtgaaagctcttattggtgcttttgaaactgttatctctcttcaggacactaataagacatctcacaaacctcagagcaaggccacaacatctgcttctaaggttagacctttggtctccgaacaatgaaagaaagaaaaaaagacaaaagtttatttgtgcatatgatctattaacattgaagattttaaacttcaagagcgaccaagagataattttcttgttactgtcctcgaaatagcaaagggtttagtaatgtactttgacagttactgaattcagttgtgaagctttcaagttttatctgcaagtctttttccatactcaaaacagtttttacaatcatgatacaacaatctttcaagaactatatatatggatcaataatactaggtcgctagactaatctcttttctcatgattcgaagaacttgaaggcatgccgatatttacctttgttgtttgatcagactgttgtctatagatagctgctgccattttattgtagagatccatattcattgtctgcatcagcatggccaatggaagtgagctcaagatttgtatatctttgaacacttttctcgaaaacagttaaaagcggtcttacctgtgcgaaaaaggcgctgtatggatcagataatgtggctgaagaaccgttggtgcagtctctgttacccataggagggaccatcattggtggaggaggaggaggaggaactaaacctccataaccatttccaccacctcccattcccattcttgccattgttgcaagcaacgacatctgaaactgttgctgctgttgttgctgctgctgctgctgttgttgttgttgttgttggtgttggatgctgagaactgactgtggtggaggtagttgcggaatcatcatttgttgtggcaagttggctcttaggctcatgaactgtacttgtgcttgtagctgtttcaagtgttcgataacatcatccaagattgagactttatccgcctgcaatatccgaataacgcgtttaaactgaccgatatcaatataaacaaagttcttaaacttaaaagtgggttcttctaggatagacatttaccttacttgcagtaggaagcagcttctgaagtgttctcatcctctggtttatcctatcacgccgtctctgcatcaaaactcagagtcagtagtttggtaatcacggaaagagaaaagatggattagtttttaccctttcggactcgttgtgaatcgctgctgctcgtccccgtcgtccattagatctacctgcttctcctcttgtctcttgttcatctccttcagtatcttgagtttcctattaaagtcctcttttggttatttctccagtcatctttcaggaaaaaaaggaagagtaattttgttagttgttaccgatccagagcggaaatagtctctgtctccggttctagctgtcttcaagctccgaccggattcaaaagacgcccaagacatattggtaccactcgcacttgcagtgacgctgtggccaactctatggctctcctcttgaacagcgaaccatcggtccatttcttgaggataaccgcgttttcttgaacaagatccatccttgctctcataattgtggtttggaccattcggactctgcagctgaaacttgcttggctgctgtagagccgcttgatgaaccacagactccaaagtctcacaaccgttgagactttgagtccaaatagggttattcgaggtggttggttctacttcgtcgcctagaccatgaacggttagttgcccattttcccatgtgagctctttaactccataattcgacctgagtcacgaaaaaaaagaaattggttttgtgttaagacttaagagagagagagagataaacaaaaaaggacagaagcgtaaggttttgtctctttttggtgtaaacagagaagagttctttatcagaaacagagagagatacatgtgttacttaggccgcacgtttgcagagaataaactgacaattaagctctctttttttttgttctctctattattggaccttctctcttctctctttcttcttgcttgaaatgttgagttcttctttcttctttgtgtgttcaaactcttgacaatcacagcgacaactcatgcggtgtatctgcctttgatccatattgaaagttataataaagaggcctctctctctctctcttcttgtctcctctttctcaaaaatggtccctgcaaaacgtcaaatggtttttatgtggacgaagcacatgtgtggcaaaggattgtttgtgttttgccactcaagtccagaatcatctctcctgcttaaggaaaaaaaaaactaataaaatgagggcattttcgtcatttcttcacaaccgactcacattgacatgaatgtgttattgcatgcatttgactactcggtagaaagcatagcaaagcaaagcgtgtgattcaccgatttagaaacaaacacatttctaataatagaatttattattattatttaaaaatgtaaatttttatcgttatacagtataataaacgtagttgaaatatatacatatatgtagacgcattaaagaatagaaaacaagatatatttattggagtaaacacgtaagaatccgaaactatagtatggtattcgaatgtcaaaaatgagagtgagatgtgaggttgatgcatcaactagagatatttgatgcaagttgctaggaatcaatcaatatgttctcacttctcagcctcttttaatcacttctttaatttttctctgtccattcccatctcacaatatatcaaatgacttgttcatatgatcaccataaaaacatttttaaaaagtaaaaaaaaaagaaaagcatttttaagaagttcattttacaaaaagtaatgtatgggaagaaagtttctagtctaccatgggagaaagaagaacaagaataagaagaagttttttagatttctcaaagagatatctcattgatttccatgaataattgaagcaaagattgttcttacttgtttcttaaaatgacatattatgtttttcaaattttgatttcttactgtagttagtgtttatattgctatctaagatatttttatatgtactcttcaaaatggagcatcacttattaaatttcttataggacctcatgtgcactggtccagagattacctaatacatagccgtctaggtagttttgtacgtaaataggtaaaaatagacgactttttcaatcattggttcagtacttttgtatcagattggttacaacttgcaaccataagttgaggcttataagccttgtttgtagtggaacaacaagttgatatgaatgaaatatgtgatgttgagtcagaagaaaagaatacgaaaactataaagtacagagaaatggataaatacggatcaacccctttgtattgtgagattttctttcccaatcatttgatgtcacatcaaaatcttaagtgatttcacccactccgctctcgagttacggccgacagcttcaaaactgatgtcgtcataatgacacgtggaaagatcttattggatggttttttgggacccagtgttgatctgtgaaattcagccaatcaacttctcgcattagattcttgacagcgaatcctaacgctcctcagagttatctgttcaatttcaagcttttttttttctttgatgttcaaactctcttttatacgaattagattcttcacatcaattgttttctgctaatcatttgatttatgataacttattctttgatcactagttgatggtaatgactgtattgaccaaatgatgttatagatttacataaaactaaaaaataaataaataaaaaatacattaaactacaaattaaaattaaatgtcactgtcaatgttcttttgatatttgaatgtactctttcaattaacactcgtagttttccgtgagactttacaaatttgcctatgcaactcaacacaaacccgaaaaacaattgttacttatcaaaattaaagaatattaatatggtttcaatttatcataacaagttttagctagaatcctaaagtcgtcacttttgtaatataaaagcagaggacatgcatgtgttcatgtatgtgtgcgtacgtgtgagagataaagaggtagataaaaagtgaagagattgaaagcttgattgagcaaagtttaatcagtggatcttccgaagaatttttaggatttattttaaggattcgtacttgttaactattcatgtgttctttcatttcaagtttctatttttcttaagtctttcaagaacacacgagtttaacaaagtgagaaagatagcttttatataagaagaaaacatcatatttatcaagttaagtgagttctacttttaactaggtaactatgagaaagttatatagaatgtattatgtttataaatgtatataacatttgaattcattacaaggtcacgcaacgcgtatccatggcataggatcggtgaacttactctttgcatcataaattgaaaggacacacatcaatagttggtgaataaaatttaaatcgtcgaaattctattgattgagacttgtacaacgacaatatatattacaaattttcctaataagaagagaggatagtaaatgtgaatggtcctggccaccacataggtgttgctacgtaccaatggagaaagaaacttcgggtaagagagtaacttggttggaccaaagaatgcctcattttccttttgagagcatatcacaaattgagtttaacgatctatcaaaatcctttatggtccctttttggtgtttactcgtctataatatgatacatttcatgtgtgaaatatggtcgagagcgtgtgtaaacatcgactatcacatcaatatttgatttttatggagtataactccattttattatgatatttgacataacaattaaagcttaagaattagacagatctttagaaaagaaaagaaaatagggaattaggttgagagacaattgaaaactgcaatattatccatggtgatgatatctaccaaaatttataattataggtacttactctttatttatgatttgagtttaacacatacaaatatagtttcattgatataagtaattttgattttagtaacaccgaaagcagaaataattattaggaactttccctgttcgactcattttctttacttttccatgaacttgagcttctttgctccttctcttctcctcaagctgtttcttggctccatcagctattagttgaatccttgctaattttgacttataatgctgattattaatcccttttctcttctccaattcactctttataaaacaaaataatatattagctagtcgtctgaattatatgcattaaaaaaaaatgtttattcactagataatgaaataacctttcttttctccattaacagtgtagctgctaattttctctcattctcccaacccacaatatcagctttcattttctcataccttcaagtagagtttattttccagataattataataagtaatggtattatatatacttttaatattaataactaagaatgaattttgaccttaatcttattttcttgatttgagatttttcccaagaatctgctttacttgacgctgaagcaagtcctgatgttccggaggatgagccaatctcttgtggccgacggttttctgatggatactccaacaatttttttctgaaactctcctctgggggaagaaaaacatatctattacgatacatgtgtttttatttcaatatataagccaagtatgattacaaaaatggtagtaaccacttagattaattattacctccaattttcacctcttgtgtatatgatttgcttaacctctttacttgggtattaggtataaccagattggattttttggtccttgacctcttgatttcttctcttattcttttcgatttttgtttatcggcttcttccattgatctaatgacgaatgcagcaaccgcaacagaaactgccaattcactctctttctcgttgtagtagtcatttttctcgtaccaatatgattggtttttcagccagtttaatgctgggtaatcttcagattgatattgacaaaattcaaaattttatatacattctttatgaatctttataaaaaaatatggaaacagatgtcaaataagcgtaaattacctgttatgtccaattctgatagcattggcaaatccgtttttatgttctcagagattgagaccctataaagatcaagaaaacaaaaacaaccgtttttgagggatacaatataatgtgattcttatcaaaaagatatctacagaattaatataataaaaatgagattttggacgtgtaccttcttcttctttgcttaaccaaattatccatttaattttcccaattaagagactccagtattgttgagcttcctataatcctattttgcctttgtcttatattaattgttttgattcttgaataccacgacaacgagaaaatgtggtaattttgtcttgaagcaaaaataagtaaataaataaataaggtgaattctttttccactgaacaggaacatgccaggtatcaaaacatgtgattttatatgctaatcttcatgtacatattctttccacataactaatacctatgtaaaagccaccgtttctttagtaaaatcttttggttaatttaatgacgctctgtctctctgagtgttctaaaagtctcaatcgctggctggttcaggttgaattgaaccggaaattgctaattacgtgaagatgggtttctagatgggctaatgcccaaaatagaagctggcccaaaaaaaactggttgccttgttataacagacgaaacaaagagaatttacaaattatgatacaaaaattatttagtccacaatttagtgcaaaataatgaaataaccgcagccagttatactgttataccatgggtaaatttgtgaaattaccatgatacaaaaaagtgaaaaaacgaacaaactaacacttacatacaagtacaatatattaggtgcatacatatacccatttggacaatattaatatgtggttaacaaaatagaccaaattaacacccactccttcttgttaacctcacgttataattatttcaagaaaatttagatttcatcatttcctgttgtttaaaaaaaattataatctcatacgtgttagtccacagcttcggaattaaaacaaggttcgctctgttttaggactgagtttcgacgtttctcctgtagactgggttcttcttctttctctgttcttcgtgctctgtctgcaggtggaagacgagtctgtgctgggtttttcgtctgggcttctgagctctctgctttgtttctttttggattcaaggtttttcttgttttattttcgggcatgtgtgcttggttggccctagtggctttgtatgttttcagggcctatatgtccttttgggcttttggccttgtaatgttttaatggaaatataaaattttaaaaataaaaaaaaatagaattaatcataaagctctctcaaaaatatgtcatttacaatcacacctaaacgattctgcaccaattaaggtttcattgctgctcagcaactcttttcttctttcttttttttggttttgcaagagttccaaaataatttgagtagtctattgagcttgttaccgttacgcgctcatgacactctgattatagtgaccagtgaggcagtgaccactctcaactaataatgatatcaatgatcttgctacaagttgtctgtattaactcatccttgtttgtatccaagtaattattttagtgactaaggcaataacacatgcagattcacgtcaatcagtttgtcccattcctgacagataacttatcatattcgttacaatgttgtcatttttttaaaacaaacacgtacgacatgtataatttagaaggtaatactcaagaagttgtcaataaattcagtatctattattttatgaagatgatatgatttgacctaaccaaattcttcagcttggtgacggacgtataacgaatacttattggttgtcatctacaattatatatgaattgcttcataaactatttcgtcggcaaaaatttctttccaatcctgaagcgaaattattcatgttggtaatagactaataggctaattaacagcgcttaacgcgtgaattttcttaaatcatctttcctttaattaattatcttctcaaatactctacaattatataaatgattaattatgatccatgactttgtctattgtatataaaaatatatatattataatgttgttaatatttacaagaaagaggacttttttgaaaaggaaacttttttgtctcctctataattttggtgcaaagaataattatatatgaatgtaaacgtttagtaagacatgctttgatgaaaaaagctcatttggtagcttactggaaagagctttttaacggggtcaattataaaaccttaaaataatatctaggcatccctcttggaggacaaccaaaaaaaaaaaaaaaaaactactctgtagagaacaaaaagatgaagtctagttggtaaaaatttaaagttttcgtgttaatattaggttgaaaaaactatattctgttaaaaaaaaaaaacatacacacaactaattaaattggacctacagttattttttcaacgtactacgtatttacgttaggttagattatgattgatcaaacgggttctatttattaaaattaaacaaatttaattgatacattaatgtgtcacgagttcaactaaggaattaaaatactgtgcatggaaatattgaatttgcatatactgtacacgatgagaattaaataaattaaaatatatatatatatatatataccccagcctcgatttgaagtggacaggttattttatttcaaatagaacgatataaatccactgtatatctattattttttaacagaattggacctacaaaaaaaaatctgaaattgttgtatcgaagtgagttggtcagtcagagattatgattgatcaaaccaggtcccattcatcaaaataaatgatatttttagttttttttgttgttggaggaaatcaaaattaatgaatatacaatgtactagaggcattcaacatatttaatcggatatattaatgaattcaaatatattgtttccatgaaaagaatttactatttagatactaatcgataatcatactattgaacttcgatattcacggagagaaattatagaatattaaattttggataaggattagctccgatttgaattgtggctgagaatgatatcggttcatgctggtcaaacaagtcccatggtttacttaaaaagggagaaattagcaaaatgggtgaaatagtctgttttctttaaaaattataatttatcaaacgacacatatataattactttttatcttaaccatgcatataacacataaaacaaaaacaaagttttccaaaatgtgatcatagagtaattatgtatatacaaatcaacaattgtaagaaaaaatgaatcatctcataatatataattaaccaataatgattagcaaatgatgtaaaaaatcaaaattaattaattaaatttcctaaaaatataaactaaacaagtacagtatttagcttgaaaaaagatatttatgaacaatcaatatatcacatgttgtctgtcgacaaagacaaatgtaaaaaacaatcaatgacctttaatttcatcattttgattgtacttgactcgtgttttttgtctaccacgtctcgtcgtctctttgatttattattgattgattcattcatttataatttccacgtttcaaaaatgtcactagctagctaagtttatgtagctatattcttttaaccttagttctcaatgcagtaataaccaaaaaaagcaaaaaaacaattgttgaccaacaacaacaaccaaaaaaaaaaaaccactatataagcatgccccatgacccatatatgacaccacgagaagcaaatcaaaatcagttactctccgtccaaaatggtgttagtgattacagagccaattaagagtcaatcaaagacggtatgtgtgataggagcaggaccatcagggttagtgtcggcgcgagagctaaagaaagaaggacataaagtggtggtgatggagcaaaaccacgacgtaggaggtcagtggttataccaaccaaacgtagatgaagaagatacattgggaaaaaccaaaaccctaaaagtacatagcagtgtttactcatccttgaggttagcttcacccagagaggtaatgggtttctctgatttccccttcatcgcgaaggaaggaagagactcgaggagattcccagggcatgaggagcttttgttgtatcttaaggatttttgtcaagtgtttgggttaagagagatgattaggtttaatgttagggttgagtttgtgggaatggtgaatgaagatgatgatgatgatgatgatgtgaagaaatggatggtgaagagtgtaaagaaaagtggtgaggttatggaagaagtgtttgatgctgttgttgttgcctctggccattactcttatcctagattgcctacaattaaaggtattgtttttgtctaaattatatgtaaagctataatttggagtccgtgtgtaattatgtttaagttcataatcaaaatggttttggtgttttaaatacaggtatggatttgtggaagaggaagcaacttcatagccatatatatagagtgcctgagcctttttgtgatgaggttattaattgtagtaattagtgaataaacttgatgatttcatgatgtttatatgaagcatgcatgcatgatgatgatgatggtaggtagtggtggtcgttggatgctcaatgagtggacaagacatatcaatagagcttgtggaagtggcaaaggaagttcatctaagtaccaaatcacttgatattcctcctggcttgtccaaagtcattgaaaaacatcaaaatctccatcttcatcctcaggtacggtcttaccatcacatcacatatatacatcttattcaaatcatttaaaatcttttgttttatttttcaaatggttgtagattgaatctctggaagaagatggacgggtcattttcgaagatgggtcttgcattgtagccgacactattttatactgtaccgggtaagttaatatttctttccacgacaagatcactttcatctccttatttcttggggccgacatatgaatagttacagaaaaaatgtcagaattgtggattctatacatgaatatataaacatttcttgacatttttagatttgagaaattttatgtttactaacaaaaaaaaaaaactaaaaatgtgggcacaaatacgtgtaggtatgagtacaaatttccatttcttgagagcaaaggaagagtagagattgatgataatagagttggaccactcttcgaacatactttctctccttctctatccccttttctctcctttgtcggaatccctcgaaaggtacaatgattagtacttacttactaatcattatgatttatataaatcaatctttcgttagttaaatcgaggattaaaaaccggttaattgcagttgatagggttcccattctttgaatcacaagctaaatggattgcaaagcttttgtcaggcaaaacttcacttccttcctctgatcaaatgatgcaatcaatctctgatttctatctcgccagagaagctgacggaatccctaaacgtaacactcacgacatcgccgatttcaatgtagtacaaagtttctccctttttttgtttactcaaaaagtttcgatctttttcatctgataaagctctgtttttttgtttttggatatttgcagtatagcgataaatacgcggattacatcggatttccacatctggaggaatggagaaaggtcttgtgtttatcggctatattgaattccatcgaaaatctagagacttatcgtgactcttgggacgatgatgatcttcttcaagaaactcttcaagacccttactttacccaactttcaattccttctgtttgataaaaacaagatttatcttttgtctaaatgaataaaaacgctaaaggtctaaactttctgtagtatatttgtatgtaaacttcttttttgaagtaccatctagcttacaaattcatcttctttttgatgaacttgtaaaaagcaaaaacccaaaagtttcactgttttagtatatatctcctatgtggtgtgattactgtaactagactttgattcttcaagaatctgaaagcaaaaaaggtatgtaagctttggtattagcaggcaggacttctgatgcctcttcttcgttttgttacggttccccaatcgattaccatatagcttgagtgagcatcattcgtctcagtagcttcacttggcctttctatcttctgtagaaccttagaggctttgtttccgttaaaagtgcttaggctcgggagaaactcgttgtgttgttgacgctttcctcgactgtgcagggtcctcttgtgtttaggagtagcaaagttatagactggagtgtttgttctttgctcctctgacttcatctctgttagctgcagtgtcattgcctcgggatagtcattgttactagagttgaatccgggcactgataatccaacttcactctttgagtcctcaacaaccgaagatgcgattctagcaaaccaatgcagaggagtgatacaatcagaggttttgatgcttgactttctagctgaatctgataatgacatatcaactatagcgtctgctgctgctacagatttttcttgttcctcttcctctctaacaagaaagctccctctggcctttgatttagttcttgaactctttctcataaccttgtctggttctacttgtggtttacaacattttctcttaaactcaggctgtgaacttgaactaacttcctccagattatgggcagattcagggatgtatgaggcatcttcattaacaccgaagttcgagtcaagatttgagcctttccgggatttggtgcgaggattttttttaacatattttgctccacgtttagctttcttccttggctgtgagcaacgtgtgtggaagagtgaaatggtttccaaacatgggagcgctagaactaacgatcttgacggttctgatccgtgttttccgtgcaatgaagctgaaacaagctctcggggttgctcagattctataggtacttcttcttcaggtgaaaggggagacatattcaagtcaattccattctctgcaccaagacattgatagctttcaataaatcaagacaatgttacaaaaacaataataagtaccataaagtaaacattactcaccagcttgacattcttctccaggtgaacgttctgctctttcactccttgtttgggctggagtagggaactgattaagctcataatctgaatgttcctcgatactggaaggttcatttaaatcgagtatacatttgaaacttgacaaatcaggtaaatcctgcacactttccggctggagaactgattcgagagacctgcttcttgtagattgatctttaggaaagtacggaacttcaaggaattctccattctttgaaccttcttcttcccatatatcacgatacccgtaagatggtaattcaaaatccaagaccttctctccagacttaccaatctcatttccagaaataccagcttcatcaatcttggcagatgggtcttctggtggccaaacgctggttttagatgtagagatgcttgaacccatccagtgtctacttcttctaggactagagaccccggcatttgggaataaatgttgagtttcctccatgtccatcatcagatccttctgcctttgatacagacgatgaagctcgtagatctgagataacaagtattgtaagagagacaagaaatactgaaatgagacatcttttgaagacagacgcactcatagagtgactctaactagaattggggaatgaaaaagctaacctgagtttcaaagacagattcttggccaagcatggtctgtttcaatgtttccttgtactgtctcaaataaagatcacagtagactaatctattcgttaaggccgtatcaatatcgtgtacaggatacaaactccacaagctatcctcttgcatttccattcaacacacagtgataacaaacctcctttttttaagaacaggacagagtaagttaggtaaacacaatgtacccaaaaacaccgaattgatgcatcagggactcggaagaacttaaaccgaacagtttttaactgaaatttcagcgatgattcatcaaaatgggaaaaagaaagatgaatctgcgagagaagaaacttacctaaggaagagaagagttcatacgaagaaacaaattccaaggattttctgagattgcgagtttatcgattatcgtctctgctcaagaagctaaggagataaagtgtggtgaagcgataagaaatgcgtactcgagatctgttatcatggaagaagatttgtcagagagaaagtggagacaaaatgtagcagacaaacacttgaagtggaagcgaaagtaaaatagaagttgagactttccgtcttactgtactttcctccttcgtcttctgtgtctctctgtctttctttttcgttgaaaacacttgttccttcacaaataaatctgaatttggttaatagataattgtgtcatttgtctctggttttgtgtaattataaatcttattttgtgtcatgtagacataataattgtctcttttgggtaatgggatgcttgaaatcatcgcctgaagctagaactaatgaggtcaaacgatgtctgggtttataaccctattacattgaagtaactaacaacaagcactacaatttttgaacttattgttggagaattaagatctctctactattcctcggtaacaacaacaccaatctcgcctctctcaagcaaatcatagaagactcttgttttcctctgctcgttccagtgatgcatcttccatagcccaccagccgctagtcccagtgtgagaccaataactaactccttcacaacacttgggccttttaaagttgcgtgtgctatcttgtgcccagccatctctttgccactctcctgctcacactaaaccaatcaaacattgcaatagatcatgaatatacaaaaatccattctctttgataatctaaacatcaacatttagcaaaacataacattattcttcggttatatatacacatataatacgtcttcaaatcaaacccacttgaaagagagatcctagagtatcgacaaacagagtacttatcttaaacactctaatggccacagtgaaaaacccaatcaaacaaacactagaaggtatggtatacttcttcagcttaaccacaaaagggtaaatgctaatacatgaatagttctgtagtccacacatacaataatgagggaatcataaacatcatccacaagcaatgcctatatcaaacaagctttgtcaaaaagcttcaaacttcaacatagcaatacaaagaactatttagatactttcgcgtggatcagtcaaggaggtctttgatcagtgcaggacttatgagggcagctaattgatgataaagaagcacaaggagaccaatgtatatagggagaattctagattggcaatcaataatagaaagcaaccccaagcctttaaaaatcgacccatcagattgcacacacaagcacgtggtgaatcaggttcattgttggagaggttgcggagccacagatgccatgactcaaggcatggacaagggccctctcctattaagttaaaaaattgtctcctcgaaactaaattaaaatcaaaagctacacactttactcataacctactcagaccttttacttaacattcatcatctccaccacaatgtcacaaacatatcatacaagcattctagagctaacacaagtctaaagtgagaaactttcgaaacctaagaccacaatggagaagaaaggaatcaatccagtttataaacttcgagttttttcgggagattccattatacagatgaagacaaaaaaaaaacagagagcaaaattacgcaagagaaagcagagaactttgaacattaaaaggaatcatacactgaaatccaagaaaatggttatacccaattgtataattgtatgttccaatacgaagaagaatcagaaagaaacctgtttatctgcgtttagcaaaagctgagaaagatgaaatcaatttatacgtctaattccattttctagggctttcaacaaaaatgagaggcatctaaacgacaacgtttcaataaatggctgcctttattgaaacgacaacgtttctaccacaacagattgaaccaaaaacactctagaaaaccaaaaaaaaaaaaaactgaaaaactaaagaacaaaaacatccccaagaaatcaatctgctactctgtctctaagccatgacgatatgtgtcttctccttccttcttgtcacagcaagagctttaagaggatacttcataacaacagtgaactcccatttctcagacaagtcaacttcataaccttcaacttctttccactcaaactctttaaccaaattcaccacaaaatactccaaatgcaacatggccgatccaatccctggacagatcctccttcctgctccaaacggcatcatctttatccctctacttccagtaacatcaacttctttatcttctccgatgaatctctccggcttaaactccattggctcctcccacactgttggatctctccctatcatcgccacattgatattaaacgtccctttctttggaactctgtatcctcctagctcagtgtcttcacttactctgtgtggtaacaacaaatgtcccggtggatgtaaccggagaccttctaacacgacagctttaagatacggcatcttcttcatctcttcttcttcaatctccttctcttcttcttcaccgattacactttttatctcttcgtataacctcttttgaatttcctggtttctcacagattcgccattatccattgaagtgtcgtcgctgttgtatcagtcccggcgttgagaaactcagagcataaactcacgatctcgtcttcgtttagtttcctcttctcatcaggaagctcaagatcgagcagagtatctacatacgattgtatgtattctttaccggaatctttagattcgatcatgatctttctccgggaacgaatcaacggaagcaagacgttcttgtgttctctcctgaacgtaagaaactcttcccatctctttctcagaaacaacttggtgaaactagggaagacattgaggatgttgaatcttggtaacgtgatgagctctcttctttgaacgaattcgacttgtttgatctgttcttcgtcaagcttatctccgaaacacatgagaacaagaagcgagaacattgcataacggagatgatcaacgacgacgatcggttttgcttcttccccgtgattacgaattcgagaacagaggttttcaagaacagagcgacgagcgttggaataagatttgacacgggatggatgaagaatctcggaggtgagattacgacggagaagtcgccacgtagctccgtatgatcctgagctgatggtgtgttggttactagtgatgatctttccggtaggaagcgccggtggacgatcagagaatacggcgccgtttaaaacaagagccttgtgagccaaggaacgatcagagacgaagatggcagggacggaaaagatgcggagagagatgattgggccgagacggtggtggatggagcggagataggagtagaaatcatcgaagccttgacggagccactggaagggaccaggcatggggaagaagttagggttcggaggtagaggaagattgttgttagttctgcggaagaagagatatagaaggaagttgactgtgaaagagacgcagaagatgtgaaaccatgtcgccatttttcttgtattctttctctgctttttttttgttatgcttttaggattcttcctcttgaattcgtatatatagcaaattcttcagataacaatttgctatcgtgacgctcaagtataaactgtttttatttatatatctatagttcggaagacagataatttagaaataagtttggataattgaaaatatatccgatttgtttgcttcttgggcgacacaccaagctccggagaaagttatacgatctctttgctacgtttagcttcattactccaaaccacaaacccacatgaatttttgtgacatcatcgaacttttgtgatttttttttatttttgaagataaagacaagttcaattatgatgttatatctaccaagtaccaccaaccaatgaaaagaaatcaagatttcaagtagaataaaagtagataaataaattacataatgaagattattcatccaactcttgtgttacttaatactcgtttcgttgttaatcaaaaatttcatttggattttaacaaaaattaactagatgctttcacatatggctttcgatagaaacggtgtcaatagtagtattacaacacaccacagaaaaagggacgatctattacagcgtttcaaaattgtggtttgtttgatattaagcttcagactgaacgtttctggtcttgagaccgaagagattcttaagcaaatccgccgtgtttggaggaatcttcgctggtcgtggagccataaagttgacaatcttctcatgaacattatacctgtttcgattttttacaagaaaatgattcaaaagagagaattatgggaagagaaaacctccaagaggtgaaactatgtgtgttttatttacctgatctttctgctctttgaggcacgtcgatccacaactttcctcttcttcgtctggaacttcttcatctcgtagaaagccgcctctgccaatggcaaatattgagatttcagaatataaaaaagactctttacacttgagttgttggacataacaatcgctagggggggtttcatatctaatgattctaggatgtttttctttactatacctgaggaagctggatcgatagtctcgagaaactcctttagtaactgcctatagaactcagcatcttccacaagttcagggtctccttcttcttgtttttcctggacaagaaagagtacacatgttagagaatgggtatcaagataatcaatgagattgattaaatgtttatactctttatggttagagaaaaccgtgattttacctctggatttggttccatggcttcctgagggacctgtggatgtttaaatttaaagtcaggaaaaattgaagagaagctgatctattgaccaccaaaggccaaattcttagatggtttatgcttttattatcaaagcaaaaacttacagttccaaaaacagcaacagtagatcttgattgttgcatctgtttaatcattctacttggatccctcatgtaggaagcaacctgttcactaacgttctggttttgaaaattaatttaaagttagattcctgattgatccccagataagagcaaaatcatcttcggagtttgctttctatacctggttaaaggcgtggagctttcctttaatagcagctgcaccagttgtgacttgtgtttttctctgccatttgtccacagccttgtttcggaacacagacattctacatagcaaataccaaatttgtgttaacgatgaaacataaatggttatgagactggtctccaaatgaagtcaatcatgctttactaaacagaattcttttgattggacagaactttaaagctggacagttgaacatttagtcttgaataccttttctgcaagtcagatattcgctgccattcatcgctatcttctgcatctgatttattggattcttcactagctgttgctgacagatagaaaaagaaaggagatgttatattgaccctcgcttatagtgatgataattatgttatctgttaatatggcataccattcacttgttgatcaaccgaggggttcttctcaaacaaagcctgtagaaatccatatttagataataataataaaagtcaacaaacgtggcagagcgacaaaacactaagagacagcatacaattactgaatcaagcctatgcatacatacctcttgcaactccaagagggaatctaatgtcttcttagatgaagtaactagatctgtatatgctgttgagacatcctcatcttctgaacaaaataacgatttcacaggctcctgaaaagggtaccttctgtcataaagtatgatgaaacaaacaaccataaatagaagaggagaagagcatagcttacctgtggtaatctgtttgaacgatcaaatgctttctgaagtaagaatctgaactccagaatcttatcccaaagagcctttacatagagcacaaagaaagaattgtcaaaaattcgctctagatcaacttcattaacataaaataggaatatacaactgcaactgatttctagttagactacttcgcaaaccgcagaacaaggtcataccttctgattcttcaccgcttgacctttaacagcatcttcacccttatcacgcttcaagttcttcaatatatccctataccaggaacacgcatattacacaaagaacattcttttgcctctcaatcgttcatttaaaattaaatgatgcaaccgaattaagacagtatctgacaaaaacttttggcaaaagtctgttcttttccttttaaacgtatatattttctactaatcacgaataaatccaattgctataatgagttcgaacctacttctaaatctagccaacatccttgctgatctagattaaacagttgaaactttaatacgactatctaccgtttctagaaagaaacacatacaagaattcactatcttagaaataacagtatttaaaaatgattagttcaaatgaaatcttactgctcttgtgaacgaagctccttgacctctttctcaagctcttccatctgagcatctttattgtcatcattaccttcatcgccactctcactctctttatcatttccatcttcaaagtcctcgctttctccatcctcgtcttccttgttctctccttcatcatcttcctcgctatctccttcatcatcttcctcggtatctccttcatcgtcttcctcactctctccctcatcatcttccatgctatctacttcatcatcctctatcccatcaggtaattgatcatcttcattgtcgctttcggcctataatatagagaaccctcaaccaaataaattcacctataccatctaaataacttaaacgagacaaaagcaacataaacataccttaaggttttcttggtcgcttatgtcttccgattcactgtcaagtcttgctcttttagacctctttgaccccccagccattttaacaacttttaatgctgcaatcacgaaaaactaactcaattgaggaaggagaaactattatacagtggattaagcaataaaaatattgaaacaaataaagaaggaccaaatatagagcaacaatgaggtaaccataccatcaaacaagctttgtcaaaagcttcaaacataaaaaaaaaaaaaaaaaaaaaaaaaaaaaaaaaaaacagagacctatagataatctcataaaaacagctcacgtggatcagtcaaagggtctttgatcagtgcagaatcacgagggtagctaattggtgataaggaagcacaaggagacaaatgtatatagggagaattctagattgacaatcaatgatagaaagcaaccccaagcctttaaaaatcgacccatcagattgcacacacaaatcaggttcattgttggagaggttgcggagccacagatgccatggctcaagacatggacaagggccctctcctataaagttcaaagattgactcctcgtaactaaattaaacatcaaaagccacacactttactcataacctgctcagaccttttactttaacattcatcatctccaccacaatgtcacaaacagattacaaagaacaacattctagagctaacacaagtttaaagcaagaaaacttttgaatcaaactagtttatgagttcgaatgtttcaggaagagaaacgattaaatgaaaaagggagagactttgagcagatacgcaagagaaagcagtgaattttgaaaattaaaaggaatcatacaagcagaggagcttacctaaaagctctgtagaagctgagacgcaaataggagaggttatatcttcgacttggaatcgcagaaactgggaatcgtctcaagcacaaagctgtctacgagcagaggaaaagtaaaagtaagaagaagctctcaaccaactctggaaatattaaaaccctagaggtttcgcttaacccatgaaccggccggttcaaccaaaaatccggtttaaatgttttaattttggtttgataggaccagattatacgattcggtcggtcggacctgggattataaacccttgatcctaattcctaaatatggaccatgaatgattacattgttttgtatgtttggaaagctacaaaattttgcttgttataaaattcatctttttgtgcttaattgtttcttgatctctttagatgcaacatttccggattccactctttttaacctataaaagtaaattagattcattcataatttctccattagaagaaattttaggtagtactgaactattgtattaaagggctttttgttaaagaggttcaagtagagagattagtgatgtagaccacccactagccattttttgtctttttaagttgagcttttatcattaacacaatttcaatgtattattaggattttcattcaacgaaaaatacaaaaagttcaattgctttcgcctctaccgtctatttaaagataattgtgacatttcttcttctctctttgtaatgaaagattttgcttgaacttatccttgctcaaaaacaaaagactcttcactcttgttaaagtgtgaatctagtcaacatcttcataacttaaggaagtaatcaaaatcattgctaattaatatattttgtcggcaatgaaattatactgtaggattaaccaaatgtgaattccaagatttgcattaattaaaatttctggtatatttgactttacaatgtggaaaaaaaagagactaaaataaagaaaagcagaaacagaggaagaagaaaaagttttgcagatcctgtgattgttctttactgtgtgtgtacctttgctcttctttgaagtgaaagctacttgagattatccttaaagaatcaataatctcataaagtttttcactttttttgtataagtaataattacatcaaccaacacaagagagtcacaagatttcttgcaagttctttgatcctttgatgtgtatctttgtgttctctgtttcgctgatttggatcttgattgaatactcgtcttctctaccgatattttgatcttcctcgtttttgatgcagctctggtaaaagaggaagttgactatggtgtcaagaaccaagaagagagcgtataagtaagctatgaaggttccttcaagagctatggatatgatatctctgtctccattgtaataagatctcatgactcggtactgaaacaaggcttcgactcctgctaagccgagattggtaggcagagcaagagccattgctgttgaatttcttccgcgaatcagaagacacgccttgaggatgtttgtgtatcctcccgaggaagaagaaggtgatgaaaccaaggctagattagagatgacaaaggcgtttgcgatgataattgagtagatgattgctgaggatagggagaggaaagtgtagaagtttcttgaagagaatccaaaggcttcaagggtattgtatgctaagaaaaacagagcaaaagcagaggcgtttgcagagagaaggaagaagaagttgcaaacgtaagttttgagaagccggaggtagaaaacagaggaggaatctgcagagtgattgtttgatagaagtttgatgacgtaagctttggataaaaggaggaatgtgagggagaaaggaagagtgaataaagaggaagatagggtttgtgagagtttaaggcttaagatgttgaagaagtcatgagaagaagagaaacccgctccgcggaagagcatgttaagcctcatgtgaagggtggaagaggaagaagagaagaaaggctgagagaggaggagaccggcggagaaagggagggccacggcggctgcggtggtgacacggtggtagttttggaggaaagtgtgaattgaccttctcatgatcttgcttggatcctccattgtcttcttcattctagtttttgctattttcttttctttggagaagtttgaatatgtgtgtttcttgaatgatccaccaaatcttgaaagggttttctcaatgcaggtcatctatatatatgtatataaaatatgtaatgatttttatattatttatatatttttttgctaaaatttaattgtgggttgggtgttagagaagagaatggagataggccaaccgattttgcctgaagatgaggagttgtttagacaaactaatcaaattaaaactcttctttttctttgtgaagcaaagttttttgcatggaatagaatctttcgtgtgagtaaaataatacataacacctccttgttaggttttattgggtataatatagatttgcttcgtaggtaatgttgttaggataaatgaatttccttttcgtgatttaatttttatacatatattctagaaaagtcttttacttgtgtgatatgcttagtgatttaattggttttggatgcttactatacactccattgtatatatatatatgtgtgtttgtgtatatatatatatattaaattgtgacagagtgagtcatgtattagtattcaattgaaagcttaataatgataggtttgaggaaactggaggcttagctttcaagaaattgaataatgataagagctcaaaagagtaaagtttttaataaccaaatttatattggtaaaaatggtactcttgttatgcttttgatcataatgtaaacaacaaaaatgatttttgagtgagaaaattccaaactctattaacttttcttgaggcgacttgatcatatatatgcttaccaaacctactaagtttagctttaatgaaaaataagaatgtttaaaaaaaaactctatcctagaacacttgaatacttattaattaccaattgtgttcttgtaccaatacaataatatgttaaccaagttaataatttattttaaaataatcaagagaaaatggaaattagatagaagaaatcatcaaactttgtccaacctgtggcatgcatttggtgtgcagtcttattgacttggacttggtggttagggagttctccatttccttgtttgaaatttctgattttcttatatatagaaatatatccactcgcaataatatactttaattaatggcatatggtaatagtttaagcgtgaaccattattattgagtttccattagacgaacaaaatcaacgagaaaatacacctggaaatttgcaattttattttcatatctatttttagttgaatggtttaacgtttaccaggtaacacatcttcttgttttatataaatctacatatagtccatggagaaataaatctagaaaaagcttgctaaaatcttaaatggaataatcttaatagttataggtataaagtctacttgtaattaggtattagtctactaataattggagttataaccattttataaagtgagctataatgtttgattctaagctactccaacaaaaaggaactcgaccgtacatatgtgtaaaagcaagaacatagactcaaaacattttttatatgtgatatctactgaaggtctcttacgaatattcattctattttctttagtttatacaaagattatgtaatgttagagaaaagtatatgtccatcaataataattgatattttggcgtcgaccatgactgttgaacgtctatttttggttatttgctgaaatgttgatgtgtttttttttgtttgtttattatgacattgtattatcacagttttaatttttaaattatattctgatcaattttataatttagtaacatcaatagacgcaataatgtatttctacaaaatgagtatatattttcttttattgatgttagaatttttaaaaataaggatggtagaatccaacagaaaaggttgtagtgttggtgcttagtacaaccgaacatctaacaaactaacaacactatggttaaggtaaattaccaaaattaatccttcttgttgccatgcctctttcttacacgactttcatttaagtgttctattaatatttgtttttttgagaaaaagtgtttattagttattccatctgtttcttaataaataatgtttttggaaatttttgtttaaaattaagtgatttctcattttttttttaacataaagtttattaattttgatgttagttgaccatttgtgttctgaattttgttttatcataaaaaacatatatataatttccttaataatcaactaatttgatatacaacacccataatgacctagtttatttattttcatcaacaatatacatattctgaatttgagtgacaacacgactttaacacaaacaatgtcggatatcatgatctcatatagttactttttagttgatcaataaatattggtcacatttttttgtagaaagtcaaaatcgaaaggatgaatatggatcctataaattctgtttttgcaataaaggaaatacttccaaactctggtatggtgcaattagaaggacctccaaaaactagaatggacaatatgctacaaccaaatctaaagtcaacattcctcacatcacaactttgttatactttttttggttcttcttttattaactacaaaatttgaattacatgccacaggttaaacttatgaattatgatgtagacaattataacgagaaacttacaaattatatttcatgttatttaaatctacattcacaacgataattaacaaaacatttaatgtacaattagatatcgattaaatactaaatctctctctatatatattttataccatcaccatcatcattattattaccacatataatttgaataacgaagaaccaatcaatcattgtttatatgtgattttggatggtgttgttttatcaaccgatccagagtattgtgacatgtaatctacctaatcaattatacatttgagtatgtactggtaaatgaaatcacaagtcgcaactttatacttatatacatgtaactctctatagcataattagaatacacaacaaaatagaaaagtataaccattaataaagcaaaaccgttatttgtttcactcattgacctagaatatatttccttgatgtatataaccgtatcaaagactctataaccgaatcttgatagagattataaaacaaagttacctctaatgattgactatatataattagtctttgtcaacacgagtacttatttatataactagaatggttaaaattgttaaaaatcacgtgcaactacggctggattatttacttctgatctgtaaagcagtgggatcgatccaaaataaaactatattgcagatggtttagtgtataaattaaatcttagagtttatccaaagttaagttgacttagaaacatacaataagacgaacaagtagtagttcaatagagcaatatttaaaataattatcgaattataagagacagacaaacagtactttacaaaaacaatactacatggttggtgcatatatattaaatatgatttatatacccattttaataatgatttatgatgaatacacatataccatccgatcctttctacattttttaaatatagacaactctcgtttgcttgaattatgtgtagtgaaaactttttttttttttttttttttttcataatgaaaacaattttgtttactagaaataataaacttatttacccattaccgcttcataataagttaataaccatgtttccatcttacatttttcaaatttaatgatgtttaagttaggagtaactaacttcataatgttaggaatctatatctattcaaaatcccattaaaaaggaagaacaacagttagaatctcgaatttctttcttaaaagaaaatatatatggaaaaaggtttttcaaggttaaagaatttgttggcccaaaagttaaagaatcaccatctaggcttttagcctacaaatttggacagatcatagcacagagaatgatttctctaacatggatcggccaggccttaatactaagccaatgtgcacaataagacaagtcataaaatgttattcagatacatgaatatgtttgtcttcgttggatcaaaaacctataccctaatatgggctcatattataatatttcaatagactatcgcccaaaggcccaaacttatggtgtaaaatagttttataatcaaatccatttcaactatcaaaattgccgtcttagctcagtggtagagcgcgtggcttttaaccacgtggccgtgggttcgatccccacagacggcgtcgctttgaggtcattttttttttaagaagtcatgtatatttttattgttaaaacctacaagtataataataattgagattataactaaaatgaaatatctgggtgtttctgtaatagtattacccaatctcaaactgaaaatgagctaaacatggctgtcactaatttagaacaaaaatgaacatttctaaacactgaaaaaactatagttatcgttaatggaggataagagtttgaaatctttaactgcccaccaatttagtacctcactgtctttatttttctaatttgtaacaagtaaactcaaagaaacctatccacaaaattaattaagcttttgactaaaaaaaatcaattctcatcttccaaagaaaacaaaaaatatttcttacacttttgcacgttgctccctttaacgtgcttccaacaaaacaattctcaaacattaataaattaaaagatcaataaaacaaatatcgttaaatcgtataaccggccgcaagtttttaagtagtttttgttcaaaactttaaaaaccattcgtttttgattatgctaaacctctaattctctccttcctcctccaccaccaccaccttcaaaacctcgccggatattatgggaggagattttcgtcatttctcctcccacgtttctctcctcctcctcttccttctcatcgtcaaatccagttcttcattcactccagctgataactacctcatcgattgtggctcctccgacgaaacaaaactctccgacggtcgtaatttcaaatccgatcaacaatccgtcgcgtttcttcaaacagatgaagacatcaaaacctccgtcgactcaattccgatcaccgactctaatgccagtacccttcccttatacttaaccgctagaatcttcgccggaaaatcaacttactccttctacatttcacgacctggtcgtcactggatccgtctccatttttatcctctcaatcatcctctctacaatctaacaaactccgtcttctccgtcaccaccgacaccaccgtcctcttacacgatttctccgccggagatacttcttctatcgtcttcaaagaatatctaatctacgccgcagagaaactctctctttatttcaaaccacataaaggctccaccgcttttatcaacgccgttgaaatcgtctctgttccggacgagcttgttccggactctgcttcctctgttcctcaagctcctgatttcaaaggcttaagtagcttctctcttgagatccttcatcggataaatatcggaggagatttgatttctccgaagatagatcctctctcacgcacttggctctctgataaaccttacaatacgttccctgaaggttcgagaaatgtcactgttgatcctagtacgattacttatccagacggtggagctacggcgttgatcgctcctaatccggtttacgccaccgcggaggaaatggccgatgcacaaacctcgcaacctaatttcaatctctcatggagaatgagtgttgattttggtcatgattacttcattaggttacatttttgtgacattgtaagcaaatcgcttaacgaccttatcttcaatgttttcatcaacaagctctctgcaatctctgcacttgacctctcctcactaaccagcgctttaggtacagcgtattacgcggatttcgtgcttaatgcgtctacgatcaccaatggttcgatcttggttcaggttggtccgactccgaatcttcagtcgggtaaaccgaatgcgatacttaacggtttagagatcatgaagctgaacaatgctgctgggagtttagatggactttttggagttgatgggaaatacaaaggaccgatcggtggtatgtcatctaagaagcttgctattgcgggtattgggtttgtgatggcgctaaccgctttcttaggggttgtcgtgttgcttgttagatggcagagacgtcctaaagactggcaaaaacagaatagtttctcgtcatggttgcttcctttacacgcaagtcactcgagttacatctcgagcaaaggcgggtcaacgtcgaggcggatgagtattttcgggtcaaagaagagtaagagcaatggattctctagcttcttctcaaaccagggattaggtcggtactttccctttaccgaactacagaccgcgacacaaaattttgacgagaatgctgtgtgtggagtcggaggattcggaaaagtctacataggagaaattgatggtgggacgcaggtcgcgatcaaaagagggagtcagagttcggagcaaggaatcaacgagtttcaaacagagattcagatgttgtccaaactcagacatagacatttggtttctctaatcggattttgcgatgaaaacaaagagatgattctcgtctacgaatacatgtcaaacggtcctctgcgtgaccatctctacggctccaaagaaaatgaccctaaccctattcctaccttgtcctggaagcaacgtctagagatctgcattggatcagcgcgtggactccactatctccacacgggtgcagcgcaggggatcatccaccgcgacgtcaagaccaccaacatcctcttggacgagaacctagtcgctaaagtttctgattttggactttcaaaagatgcgcctatggatgaagggcatgtaagtaccgcggtaaagggtagtttcgggtatttagaccccgaatacttccgcagacaacaactcactgataaatccgatgtttactcattcggtgtggtgttattcgaggttctttgcgcgaggccagtgataaacccacagttacctagagaacaagttaacttagcagaatatgctatgaatttgcatagaaaaggtatgttggagaaaatcatcgacccgaaaatcgtgggaacgattagtaaaggatcgttaaggaaattcgtggaggctgcagaaaaatgtttggcagagtacggtgttgatcgaccgggaatgggagatgtgttgtggaatcttgaatatgctttgcagcttcaagaagcatcggctcaagttgatttatcggaggataagactacaatgaatattgaaatggaccttattcccggcgaggaaatgcaatctccgtcgcattcaataccgtgacgatgacggtttccgatgtgaaacttcgtttggattttttttttttaacatgtaggatttaagaaagccttttggtttttattttctttttttctttcttaaatgtagtttcagtttatttatttccggaaatgagatttttaaaatttacttgtgtgatcttttttaaaagacattgggttgtcttgtagattatgttgtgtatactttgtttgatgttaatgaattttccctttctttcaccaaaattacatttgtatatgaaattgggacgaagagttgctggaagctagtttttgcaatgaaccatctcaaatttctaggatatatacaatatggtttttactaatggtatgtgacgtaaataagatttaatttgtaattgttttggcaaataaattgggtggatttgtgaagaaaatagtaaaagaaaggaacgaatctacatgataaagcatctatggtgccgatatttgaaacttggagtttcaggtagtctccatcgttcctttgtcaggaacaaaccaacgactcaaaatttaaccagagatggtggaaggtgaagaacagaggaggatcacacacttggatctgagaaacgagccccagtttccaatggttttcgttagagaatcgacttgtttcgctaaggacgatctcgctatcttcccgccgatcaaccacgagaatctctacgtcaacggactcgaatctccgtcggtatcatcctcttcttcatcttcctcgtcgagactctcagattcgtccttctctccgtccgattcagacgaacaatttcaatttagccggaaatcgcattctcagccatcggaagatgtcgggaaatctccgtggaaatccgtaattgagattgatattatccaaggttggtggaagattcttctcgctcgagtaatgtcaaatttccagaatttggttacctgcttctccagaaatagtctctgttccttctcaaagactctccggtcattttattcggttatggtcatattcctttggtggtggaagcgtaaccgaactcgccgacgacttgaaaaaggtgaaatcatcgctgctcatctcagagatacaatcaaagagagagacgaggtttgtattctcattcttgctctgttttttttataattcctaccaagtgttcgacgaaatgtcaatgaaacacctattgttactaacaagtttcttatttgtgtgtttctgcagagaatagctcaactcttgcatcagattactcagatgaacgagttacttgtaaaaataacacattccaattgatcacaatattcttgtctcttgttttgtattcttcagaacccatatttttcgtaataagaatcaatgggacaaagagaacaacaaaagaatctcatgtcctttgcttctgcattactactaatacataaaaagcagaacatcttacttgagtttcttgtgatacattgcctgctatatcagatgttcttaacaatgggtagaagaaatcaatcaatgttgcagattcttcttctttgtcttgctcctgcgtttcggttttagtttcagttttggctttgttttgttcattctagcgtgaatcttcaagttaagagcacgacgatccaccattgcagcttcttctttcatcttcataggtttgaaaacctctgtgacagatggatcaagcaaactaatggagcaactaagtgtaacatcaattgacaatgcctcttcccaaagctctcttcctttctcaaagtttcctcctttacatagttttggtatgagcagatcataaacctgaccataaccacccactgagcttctcttcatcttctcaaacaattgaagagcaaagttaacccgctcgaccccacaaagaaccccgatcagatcataatagaatttgcgttcgggtctaaatcctctctcgatcatctcatccacaatttggttgcctttaccaaaccttcctgtcaaatacaggaccctcacaacgaagtaatagctccctgtatccggatcacatcccgatcttttcatctgttctaaaatctggcaggactctctcaccctcctagtccttcccaaacaagagagcaaaatgttgtaactcatagacgtaggttggattttgtaagacctcatctccaacataatattcaaagcttcaggaacaagcccagacgggtttcgattcacgtttctttcgcaaaggcaggtcagcaacgagttgaaacagaacaaatccggtgtaatccctgctgatttcatatcttgtataactcttcttgcttccttcacgtttctttgtaccgaccacccgaataaaagacttctatacacagacaattcattcccggatattacatccttgtgatgatgcataactcccaatgctctcttcacatgtcctctggaacaaagagcgcttataatagccgtcacagtgaaaccatcttgtgggcaagaaaatttgtccaagatcttgaagatacctattgcatcttcttccttaccaaccttaaccagagtttcagcgacaatgctaaacgtttgcttgtccatcgcccgattctccttcctgagatctgataagagtatctgcatagctgtgtgatccttcttctcagccaaaactcttaggacatagttgaattccttgtcgtgtaaactagatcccaagcttttacacgaccaggagaaaaacctcaacagccttctcggtgaagtctcgttcttgcaagactcaatcacttgggtaacaaggtttgatgatggagaaacagaaacctggttcaagttttcttcaaggtcatctagaccaccaactggagaagaaactatccgaataacttcatgcaacgccgtttccgatcggtcaactaaatggtgagagcaaaagtaacgtgtcagttttgcagtactcgttagatacgtaaacctgtttaatctgactgtggtggacatcatcttctctgaggaatttcatcaaacacttgatatgcgtatgcttcttaaaagccgccaaatataaaccatagaagggactctctcctgacttacatgtttctcagagtatttacaacttcgttgtaaattctttcagcaacatgaaattcagatttctattaaaagacctaaatttgcagatttcatgagatcgctcggctcaacaacaatatatattcatttgttggaaacattgcccgcgtgtctgaaaagggcattttagtcttttacattccatcacgcttcaaattcagaaccggataaaaccgataatcgtgagatacgatggttataacttataagtcactaaccggaatgattactctcgaaggccgccgatgcatattggaaaatcgaactcccgataaaatagttctgaaattacacgaataattaacatcataaagtcataaacaagttattggtcaatggtcgatggcaaaacgtaataaaagttggaccgggacaaaacgtgtcttacggtggatgaagttgagaatatatcatgcattattggtccacttgtactaacgatattcgcagctactaatatgagccaatcggtaatacgaaatattttagcttgtcgactacttactttctatataaaagtttagcctactaattatctctttttatgattatgacaacttgattatttgtttcccaaccactgatgatgagattaaccatcttttttgctaagaaggtaaatatttcatcttgctaatgtcctgtttacaagacaatttgcacacatacacttataacattagaaaaaaacacttgaaactttgttacaacatatcatttagcttgatttttcaatcactttaagaagttaatgaatcataatgcctaaataagtcctctataacaaccatgaaaggagtgttatatctataaccctgtgcttttagaaagaatcataatttttaggagtcttttgtgatgagaaattgagatgtaataaaagtaaaattttctatatctgtatctttcgttttttatttttattttgtttgtatctttaattcttcagtacctaaagataacagaaaaataaaattctgataatagattttcttgttgttataaatatattttaataaacgaaacgaagccgaatcctaaaatttggtttctgatggtttggtctgatctggtcatatattttaaaagaatttgcaattttttctttctgtcgaccttttgatatgtttgttgattttgatatggagatgcatcttcttatcttgtatcttaccacaataatatcaaaaacaaaaataaatatcatgagatattttctccaagatgacgtggccttttctctatctcaaccaaactatccaacacaacctttttttttatggcctgcactttttattgtccacgtcatctccttggcctaaaatatcccaagtcccaccattaagctacacaacaacgcgtaagaaaaagacttaatctccaccgtccaattctatcctctttcaacggtctctgatttaccatctctctctctctttttcgcgtctcataatttgaccattgattgacaaaacaaaacaatgagtcttctttctcttctcactcttcttgtcggaaattcaccttctctctctctcctcctcatctcaccgccggcgttacgccggatctccggtgacttttgttgagcttttttgttgattcatgattcgatatagagaaaaaagaatttcctatttcagctctttgttcttagatttatctttttgtttgttcttatggataaaggattaggttgggggattaaaagagtagtttttgtttggttgtgagattacttgactttgttaaggggataaattaggcgactttgtagggacactgtaccgaaaaaccctagttctgatttggccatggaagtatcatagcacttactattgtcggctttacttcttctacttttgtataatccttttttttcttaggttctgtgattagatattttttttgtgtgggtttagttgttaatctgatcatggatttgaacggtgagtgtaaaggaggagatgggtttattgatagaagcagagtcaggattttgctttgtgacaatgattccacgagtttgggagaggtttttactctcctttcagagtgttcttatcaaggtatgatttataggtttgtccttgtcttgttcccaaagtttctctttttactttgttattttttgctaagttgggattactactttagattgcagatctcttataggttcttgtcgtctggctttttgagtcagtatggtcagatgtgatcaagatgacatttttaacctttgttgattttagtaccttattgatagtttttgaatgcatctctagtgtgtattgctttctatttttacactatgctcaactgtttgttgttcaagactcaatgatgatatattggatgaattgtttttattctttttggaatgcagtgactgcagtgaaatcagcaaggcaggtgattgatgcacttaatgcagagggacctgatatcgatataatactggcggaaattgatctcccaatggctaagggtatgaagatgctgaggtacatcacacgagacaaagatcttcgcagaatccctgtgataagtaagctgtgttctttgttgctcttctcgttttattatctattcgtgaagttgtatcttctctgcttatcaaagtgcttttgacagcatgatcattagctttatactgactaatcttataatattctcaatttaagtgatgtcgaggcaagacgaagtccctgtcgttgtaaagtgcttgaagctaggtgcagctgactaccttgtgaagcctcttcgcaccaacgagcttctgaacttgtggacacacatgtggagaagaagacgcatggtttgttttgcttgtctcaagttctctctatttatcttactgtttttgagcaatacttgatagccatatctctcaatctgtcgtcttctgaaataaaagaccttgatgcatgaagttaatgctattgatttcatatatttgttttggcagctaggacttgctgagaagaatatgttgagctatgattttgatcttgtgggatctgatcaaagtgatccaaacacaaatagtaccaacctgttctctgacgacacagatgatagaagtcttaggtccaccaacccacagagaggaaatttaagtcaccaggaaaatgaggtgagaaagtatttgacagtttaaagccctctgaaaatggagaagaactgattttttagcttgcgctcatgcttttgctggtagtggtctgttgctactgctcctgttcatgctcgtgatggtggtcttggtgctgatggaacagccacttcttctcttgctgttactgctatagagcctccattggatcatcttgctgggtctcaccatgagccaatgaaaagaaatagtaatccaggtgattgtttctctttgatgtctcactttctaatagctagtctctaaaagaacctttgttttagtgaattctaatatagtaggggttttgcagcgcaattttcttcagcaccgaagaaaagtagattgaagatcggagagtcctctgctttctttacatatgtcaaatctactgtccttagaactaacggtcaggatcctcctcttgtcgatggaaatggctcacttcatcttcatcggggtttggcggagaagtttcaagtggtggctagtgaagggatcaacaacaccaaacaagcacgcagagcaacaccaaaatctactgtccttagaactaacggtcaggatcctcctcttgtcaatggaaatggctcacatcatcttcatcggggtgcggcggaaaagtttcaagtggtggctagtgaagggatcaacaacaccaaacaagcacacagaagtagagggaccgagcaataccattctcaaggagagaccttgcagaatggcgccagctatccacattcccttgagcggtcacgcacgcttcccacatcaatggaatctcatggtaggaactaccaagagggcaatatgaatattccccaagttgctatgaacagaagtaaagattcgtctcaagttgatggatcgggtttctctgcaccaaatgcctatccttactatatgcatggggtcatgaaccaagttatgatgcaatcagcagccatgatgcctcaatatggtcatcaaattcctcattgccaaccaaatcatccgaatggaatgacgggatatccttactaccaccacccaatgaacacatctttgcagcatagtcagatgtctttacagaatggtcagatgtctatggttcatcattcttggtcaccggcaggaaatccgccttctaatgaggtgagggtaaataaacttgacagaagagaggaagctctgctgaaattcagacgtaaaaggaaccaacgttgttttgataagaagattaggtatgtgaataggaaacgccttgctgagaggagaccccgcgttaagggtcagtttgttaggaagatgaacggcgtgaatgttgatttaaatggacagcctgactctgctgactatgatgacgaggaagaggaggaagaagaagaagaagaggagaaccgggattcatctcctcaggatgatgctttgggaacttgaagatacaccaagaactgaaaaccgttgtgttatacgtatttgcttgcatcttatcaaacaacagaagatgttgatcgactgacacgaaaaagatgatactgctacagccaaaaaaacatcgaatatcgagttgtctctaaggcaatgttggctcttgcggctcaactttttgacagagcattgaaaagctctcattgggtttagcttagttcgttgataaacatataatgtattttatcatgttcactcacattctctcagtaagtactcagatgtattaacctttcttctccttccagtatcatttacttgaatcttgtttttccctcgctctctcacctgtgtttacatatataattatatataatcgctccatgtcttccaccactaaagcttctgtctttcctcggaaaaacacaatacaaatgcaattgtgtcacagacaagaagcatatgaaaatctaaatttggatttaagttatctgaaactaagaacataatcagctgtatatctactgtcaggaacaacagttctgtgtttctttcatgactacataaataaatctctacagtccactaaactctgatttctttaattctctgtggtgctattgagtaaggtccactaatgtataacaagctttctagcaactagacggattccggctctctgctgataatcatatggctccagagacaagaaagcgtcaagaacagttctcggattcaacaaagactcaatctcttcagccttggggttgctagaaatgagtttctgagtagcagtagctccagagaactctttctggtgtatctcagctgcgtaccgatctatatctccatttaactctgtgggtatactgcacatacaaagaaataatcaggaaaaaaagcaaatgaaataagtaaaggagatatataggaaaacatactgtatccttgcagtgggacagttcagaaatcctttcattggaatgactagagggttccagtcagaaccactgcctgaatcaacagatattgtctgtgcagcactgtcgcattcttgaagtacgttgcagagacttggatacagatcaattacaaagttcaacctccgtcttccagctttatccataaatttcccattgattccaaaccgtactttcagacgaggacaatggagctgaaggggtctgtccccaaggaagagttgcagcttcattgtttggctcccgtcatatagcgggacatgagttgctctgatacttgaaacagatattttatctagctccatgaatccttcctggtcaccggtaccttcagaggcaacagtctcagactgctgattttgttcttcttccatgggaacatctgattgaagaacttcaggggctatttcgttcctcaaagtgctcatatcaaatggatccgtttgagcttctgcggatgaaacaaatgataaaataggtatagttgtcatgttctctcctgtctgctgatcagtgggagattgcagaggagatttttttatagtcctacgccttcttgaactagtttcaggagtagtagtagtaaccgagttctctataagttcatctggaagacttgactcctgttgaaaaatggcatgtttctgaattagctcctcatagttacatcactaaaatctattctacagagcgacaggtacacacaacacacgataatccatctcgaagaagtaaagagagcataccaagaacaaaacagtggcacaatacttgagaacctcgaagttcatccttacatcgtccagactccttaagagatagaaataaacatagtgtacaaagcattagaactcaaccggcctattaaaacaccgtaatgcaaaaaaactcacatatataaattacctatgcgtctggtttccaagtccaaagtatgtagccaaagtcgccatctgttcaaacaaaggccacaggaaaacagaataaggaaccatcaaaaccgccaaattcgaattccatcaagcaaattcaaaatacacagatgaatatcaatcatgactctttgagtatacgagaagaaaccatctcaaaacaataaacaagtcaggaccagagagcaaaattgttaccttcatatcaccagctcttctcccaaacctttgagtaagcaaagccaaggagtcaatggtgccctttggctctggtggatctcgtccaatctcagcaaatgcttctcttatccttggacaatcgaacttcaatatgttatgacctgcccatatccttcctacaataaccattaaaccacaacatcaacacacttgaacaaaacaggctccaaagttaacaactttgagctcgaattgtgtcccaaaattcttgaaaagaagagagtttcttctgtatcttaccatggagaatatcgtagacggtgtcggcgatatctgcaaaggtaagagctgattcgacgtcttcgcgtttgatgccgttgcacttcacggaccgaggcgtgatgaggttgagattagcaggacgaaccagaacagagtagtttttcagctccacaagcttcttggggcaaaccagaatcgatccaaactccagaatcgcgtacccctgaccaactcggaacggaattgtcgtctcgacgtcgaaaaaggcaatctctgaacgatcctcagctggagttagaccaaccattgttaacatgtaagatcgaattgagcggaaaatgtgaaaaggattcaactttttatcgaaaatgagcagagatttatatgaagtatgaagataacttggtaaggtgggtttcctttgcccaatttgctaggaaaaggccatcttctaaatttggcttctctttctcagtcggtttcctcaggaatttctatattattgttttggtttagattcgttttacatgtaaaaaagattctttctctcaaatcaagggaaaatatattactggtcaaacaatcaaattttataacataagtacagaactaagtacattgtgttgtttttactttttagtgcatcgccggatcgccccttagattagatgctacttccttcgtctgtaatcaaagtcccttgacttattgactgagtttaacaattttggctacttttcttacataccaaaatgcaccaaattacttattttcactctgttttaacctcctcatgtggcttcaaattacttctgtagtctatatcattaacatcattaacatctataacgaacatagattacgaagattaattttggttataagaattatctaataaaccaatattaaccggaataataaaccaatgagagtactgtaccatttacacgaagaagagtaacgtagttttcagttttgaccagtagattcgtacaatctcctctccagatgttgaagcttctgcttccccaacatagaacatcagtttacttgttcaagtttcaatttttcaactttagattcttatctcaatctccttctctgtcaaattcggcatcttctttctcttcttcgagtctggctgaagcaatactgaaatgcagatcagcggaagaagcgttcaagctgttcgaaacgtcttcgagatctcgagtctccaagtcaaacgatcttcaatctttttcggcagtgattcatgttttaaccggagctcacaagtatacgctcgccagatgtttgataaaaagcctcatagaacgtctgaaacgccacagtgagccgagtaacatgtctcatagacttttcaatgctctggaagatattcagagtccaaaattcagtatcggagtgtttagtctattgattatggagtttctggagatgggtttgtttgaagaagctctttgggtgagtcgagagatgaaatgttcaccggattcaaaagcttgtctttcgattttgaatggcttggttagaaggagacggtttgattcagtttgggttgattaccaacttatgatctctcgtgggttggtccctgatgtccacatttactttgttttgtttcaatgctgtttcaagcaaggtctttactccaagaaagagaaacttcttgatgaaatgacgtcgttagggatcaagccgaatgtttatatctataccatatatatccttgatctctgtagggataataagatggaggaagcggagaaaatgttcgagttgatgaagaaacatggtgttcttccaaacttgtatacttacagtgcaatgattgatggttactgcaagaccggtaacgtgagacaagcttacggattgtataaggagattcttgttgctgaattgctgccaaatgttgttgttttcggtacattggtcgatggattttgcaaagctcgcgaattggtaactgcgaggagccttttcgtgcatatggtgaagtttggggttgatcctaatttatatgtttataactgtttaattcatggacattgcaaatcagggaacatgttggaagcagtgggattactttctgagatggaaagtttgaatctttcgcctgatgtattcacttacactatacttatcaacgggctatgtattgaagatcaggtagcagaagcaaatcgattatttcagaagatgaagaatgagagaatttttccgagctctgcgacttacaactcgctgattcatgggtattgtaaagaatacaatatggagcaagctctggatttgtgctctgagatgacagcaagtggtgtagaacccaacatcataaccttttctactttgatcgatggttactgcaatgtgagagacataaaagctgcaatgggcttgtacttcgagatgaccatcaaaggtatagttcctgatgttgtgacctacacagctttgattgatgcacatttcaaggaggccaacatgaaagaagcactcaggctgtatagtgacatgctagaggcaggaatccaccccaatgatcacacgttcgcttgcctagtagatggattctggaaagaaggacgactctctgttgccatcgatttttatcaagaaaacaatcaacagaggagctgttggaatcatgtggggtttacatgcttgattgaagggttgtgtcagaacggctacattcttagagctagcagattcttctcagacatgagatcctgcgggataacccctgacatatgcagttacgtttcaatgttaaagggccacctccaagaaaagcgtattactgatacaatgatgttgcagtgtgacatgatcaaaactgggatattgccaaaccttttggtgaatcaattgctagccaggttttaccaagcgaatggatatgtaaaatcagcttgttttttgaccaattcaagtcgtttgaaaactgtcagcaattcctgttagtcaatctttgttaatcggctcttcgttgtatataaggataaaacttttacaggagatagagcaaagtgattatctctgggtttttgggcaagagtcgcaagacaaatgaaatgctttattataagtcaaaaacacatatgtaacaacatatttcttatcacagtgtttcattgcaaaatgtatggaatctgcatatcctcaatttacaagacaatggtacagaatagtatagaggagcctactttgaagatattgagtttgattcttgtgaatgttatggcgaatggagacacaacgacaacatctgggacttctggtgatcgtcattcactttttaactgttcctgaaataaaagttactacaagtcagatcaaaccacagataaatcccagaaacaggatttgctcatcaaaaaaagaaagaaacaggtcaaatatgtgaattttcgttttcaagatccaagtttgtgtactgcaagcagagtatatagatacaaccatgagtatttagaaatggcgaagtcattaacctaagtttaacagagtcttttcgcttgctgttgcttcacattacacagctacagctgctggtcgtttgctggccttaattccttttatagctgcagatttttcaacaaacaaacagagcaacgttatattttcctactggctaagctcagaaagtaaacgaaacatcggatttatctctataccttctgcgtagtccttagctccaaatacagctgatccagccactagagcatttgctccagcctcaataacctattacactcacaaaagatttaatatcgcgagatctctaaggcacagaaatatctacagcagtaaaatgtgagttgaagatagaaactaggaagagtatctgagctttaccttgtacgcattcgctggagtgacaccaccatcaacttcaatccatgggtttactccctaaagaaaaaacaatacaatgttttgagaagagaagaggctttcactcggagagaaaagttactcgattgataccttctctgcacacattttcctcaagtccgagattttctttacttggctttcaataaagctctgtccaccaaaaccagggttgaccgacatgatcaagaccagatccaccactgatatcagaaacaatcgatattccaatgagaacaatcttaatcatctcttgccaatgacagagcaatgttaaggaaaaaaaactcactatccaagacatattctattgcactcaatggggttccagggtttagaacaactccagctttagcccctaagctttttatctaaacaccattgtagcagcacaaggtaagattatatactccaccagaaggaaattttaaaaagtggaagcatgaaaatatcagtacttgattgacggtacgatgcaaatggatggtggattgctgttcacaatgtacactgacaatatctgcacctgctttgatgaaatccggtactctctgctcgggttccactatcatctgattttagagaatctttattaactagaaatgtgacttcaaacatcaagaaaccatatatagaaaaagataagaaaagaagctagtctttaccagatgaacatccaaaggaagatctgtcacagggcgcaaagcatcaaccacgagaggtccgatagtaatgttgggaacaaaacgaccgtccatgacatcaacatgaatccaatcacaacctgccaactccactgcttttacctgaaagaagccggaaatagtgaaatggagaaacaaacacacaagaaaccaaagaggagagcaacaaaaacctacctgctcgcctaatttggcgaaattagccgagagaatagagggagaaacaatgatatcacttttcgaaaacctatcaacccgagatgaggccttgacaattccatgagttctccttctgcaaaaagttcacataccaaagtgtaacttaaagataaccgttaatgcagattgaatctttatcaagtgacaaatcataagcataagctctccctgagcaacatctatattactgcagagacttaacaataagcaatatccacaaagacatgaaagatacttcatttatataacgattcaagtaatcttcaataaccacataatttcaatttaaggatgccaaacaaacctatccctgagcaatcgtagcaactagaacaaaatcatggttattgagttacctggagaaagaaaaggaagtgggttggtaaagaagcgacctttcaggcctaagaccaaacccattgacctgggttgatgaacaacacaaggaagcggcggaggttgacatgtccctaatcaaagactcaagcttctctggctaaaatcctgaaagacttggtgggtttagataataagagaaaacctcaatcgtttctcttacaccaattctcaaacccagagaagaaaaaagaagaacagaaactttatttttccgggtaaagaagaaaaagagagaatatctgagaatccgccacgtgtgattacggtctcgtgggtaacgtcttccttgttcggatgatccaatgcagcggcttatcgctatctcaaacggttggctctcttttgatgacgggtcttgtacatttgtgggaatatgctaattttgcaaaataataaatctatttttactagtgatacaaaacatataatttctaaataaattgtcgtttaaataaaaagttaattaataaaaaaaaaaattttaggtcatttataatttttacaaaatatttgataaataaaaaataataggaatgtatatactaaaatcaagattcaatttgagatgtatgactaaaacaattgatagaaaattttaattaacatgaaaaactcatcgttttaaattttataattttgtcaaccaattatatatacaaaaaatgttttaggtcattttatagaaaaaaacagaataccaaatttagtcccatttgatagatttcgtaatctatttacatgatgcttttatatcatggggccatactgaaaaaagaaggcccatgatccataggattaggcacatagttcacgaggactaacgagattgattaagaaataagaagagtgggttaagcacaaagcaacaaacacctcataaaaataaaaatctcatttattcaatacttgtttgtacttcatagcattttattaaatagagaatagatcaaagaagatggctcatggttgtagtataacaacaacactcaagtcacttcttgctttgtccactgccatgcaagttactaaagtaaccttgagggttactctcgaatccacctcttgagatgtaagcacccccatttgtccctggtgctaccatattacctgctcctgctcctccgccgccgctttttcctccgccactgctttgtccgccaccaccactcttacctccagcgccaccgctctttcctccaccgacattgctgcgttttccactcattcttcttatctgatattgatcaagaattttggaggtttgagagagtatgaaaattgtgtgtttaggaaatggctatttatagagaaagagacccgattcggagtgttggtcaaaagttgtgcttcccaaaattatatcgtaatctctgcattacttaattgattcaaatcacctcgtaaaagatataagtagtacaatcttacatttacaaagtgattagccattaatgggttgaaatttgaatgagaatccaaaacgtctctccatattcgtcacaatactattttaggctttattttaagtaaagcccattagcatgaggcctaattatttatatgcagatctatatagttttttttgtgtggcttatcctctgtttacagaactccaatgattaacattttatggattgtagtggattccatcggaagaagaccgatctattagcatgaaatgctcgcaataagaatctagtcttttgatatgtcagcacttttactttttgttagatgatgcatataatgtattcgtttaatcattaaataaagtgtctttgtcacaaaagaagacattggattatatacagtattggtttggcttaataatattgccatatgattatcgtaatttgagtgggcttgggctctttttttgcaagttgacaaccagtgaaattaaaagaaaagtatcaaattactttagattaaaatctccacacatgccgacaaaaaaataaagcgctcccatatatagcaaaaacgtgcttaatgtaaaaaaaaacctataataccaaaaggagtttttgaccaacaaagttttcatcttttattttccactacaatttcagataaacaatgtgttggctttaagttttcaattttttttatttatattttttaaaatatagcgactccaaatgtatagtagttggaaagagaatttcagatactatactaacgagtgatcatattaatacactgcatatcaacaacatatgttttgattgaatttacctatatataaaattgttgattaattgtaactctgaattatatactttaccctaaattgtgtcttatcttcattcgcgtaatacaaacaaaagtaaccaaaacaaaatttgcaaacaatattgagtaacgaaccattcgtggacgatggtggagttctgatatgaagtaacacaattacgctcttgacgatcgatgcaagagatacatagcatgactggggttgagagcagtcacgatgatttggtcttgtaataagttgcattgttttgtgcctctttgtaagatcttaggggcatttgtacaattcatttttttttctgaatttttttgagcgatgagtgggtctaaaggccatttatgaaaagtgagtaagacttcttatcagaattattggtcaaacaaaaaaactctaaaacatcttaattcttatcgtttttttctttatttggaatcaatgagtgtattaatatatgaaatcatgtttctatatcactatatattacgtttttttgtgtgtggtaaccacataaaattatacaatatcattcgaaaaaattgaaataaagaattaaaaatcatttaaaaagtgaaaattagaaatcgaataatttatttctaattctttgactgctagagcgaattcaaataatatgcacataaatactttatatattataatataattacattattattaagattcgattttgtgtttagacaagatttgtaaatccaattagacttctgtttcacctcgtgatcttttggctttcatgtaaattgtttattgaccacacaaatacactattattgcaacgtctttttcgtttgagcattttttgtttgtttttcttttatttttcattactttcacacatttcttattaaattctacaataatagtaattggatttatcggaaagagagatgttgtggtcggttcaaatccaacgaaaggtatcactataccactacgttgaatcgttgatgacttgatgccatgtaaagttgtaaacaataaatgagtttaatcatataaagaagagcataaaaaccaaaaagagcataattgatgactattatgggcactgatgattataatgggaagtactactacgaaataagataaataaaacaagctttagaaagaaatattagtataaacatcgtggcccgcacaaatcaattaccaattgattcgcgaggttacatgcatggttctcaatgtaagagaaaccctaactcaaaccctattttatttattcttggggaaacttaagtgttaagattaacccttgtttaacatcgtaataaacacgccttggacatatagtaaacaacccaaatactaattaatacatacacaatatctcgttcgagcgagttagtaatcgactaaccttgggtacagaaccattattttaagtcgtcgaatagtttgaaacctttctgtttggatatgaagactcatatgaaatgcttttcaagcgagtctgagtcggtgtcatacataaaattggtatggtcaagaagataatttgaccatccctcgaagtttcctaccatattgtcttgatcatcaacgctagttgatgagacttcttgggaaacatcggacataaggagatcattcatactgttctcctcattgtggttatctcctccgaatttttcgaaaaattgtgaaaaatcgtaatcttggtccatgttgagatcagaagtagcattgatctcatgttcggggtacaacgatgatggggagaagggatcaaattcagcaagagtatttgtcagggatgtgttagaactatcctcttcattgcgaatctgctcagtgaagccattaaaaaagcttgcatgtgatattgtagtagcactcaagctaccttccatggaagccgacaatatatctttgatggaagtggccttagccgcaactttgttcaagagccttgatgtagaacttgatttcttgaaacgtttcttgcaactcaaggaactgccttgaatcggtgtcccatcattgctgctaagctcggagaccttggaaaccatgttgcaactggatggaggaggacgagacagaaaaggcattgagctcgatcgggagtattgcttgtcggaactagaggcatttggggaattcaaattctcatcgaccgtagggttggaactagaagccagtggcttgtgagtcacgggatcaataccctgttccatcaaacgttttttgagatgcgtgttccagtagttcttgatctcgttgtctgttcttctaggtaaatgtctcgctatgaccgaccacctaaagaaaataagatagatcggagaccaagattaaaatgatgattatgtctacataataaatattatatgaaaactttttcatgaaattcatttcacattcgagggtccacgcacacacatagaaacatagaaacgtacttgttgccacgagaagcatgaagcatgatgataatctgctcttcctctgaactaaactcgcctcttttgatctcaggtttaaggtagttggtccatcgcagtctacaactctttccacaccgtttcaaccctaatcagacacaatatgtttatcagaacaattttctacaacaagtacaaaaatgagtgtatgtatagatttgtataaaccagctttttggggaatgtcgcgccagcctccctcgccgtggtcgtggatgtaagagatgagtttcttgtcctcctcggtggtccatgctcctttcttcaagccttctccgacgcaacatggctttcttgacattgtttttcgatatagatgaacaataatgcgtaaaatttcatataattaacctctcacaaaactcaagatataggaacagagaaaaactatatatgttcaaaaaagtaaaattctgaaggaaattgtttaatcagataaggaaaaagaaacagatctgttaatgagaactctgatacatctgaatatgaaactgatcgagaaacaccctttgatcttacccacactgctgctacgtgttttcatttttttaacgcagagtagattttaaaaaaaatatatgttataagcttatggaaaagaaccaagaggcatgatttctgtggtagtggtgaggttatgagctattccatatatatacacgtacgtaatgagatttttttttttttttttttgtgaaaacgtaacaagatagttatggttagtaaattatttaaatagatcaatagttaaaaaggataattcgtaacttttctatgaaaataatgtccgaaaagtggtgtttgtatagtactatattttcctactttcaggtattttaaatacggtaatgcgcttcggtacgagatgcaatattttaatttatatatcacgtaaacgtacctgtaggttcttgcatatttgtacatttaacttttggttattaaaaaaaaattgaatgattgatccaacatggagagttggaggggaataactaaagggacgtttgcaaatatatataacttttaagaattcgattgtattatatatatatctttgcagatatttttgtattgtttaaatagttggtttctgttaggtatatatataaaaaaaaactatcaaacagtttaatacttaaaacgtattttactatttttatactgcaaacgcataatgaaaaaacaaatctggttaacgagaaagtataaatttacattattgtttttcttatcaataataaacattattgttcatcattgagaatgaaagggtgattgtaacatcacgtgttttttttccagcgtaggtcctttttgtttgccacttttgtggctgttgtattattgctcgtcgtctataccaccttaacatattcttctttccattgtctaaaaatcattcttaaacaaaaaatattcttctatttatatcattccctctttgactctctcaacctaaaccttatgatttaattcgaactagtcttgatgaggtttcctaaggttttgttagttatcggaatagttagaacaatattttctgatgctattcttcacgtatgtatatgtacctatgattttatctcatgcgcatttttcaaggtagagtgaaaaagataaaatttatactcccatggatcgtttaaaactagaccttgtttgatctagaaaaatattttacatagaacacaaacttgtattgtatataaatttaatcaaatttaacatcttattttgcattataaaacaaaaatatgttagtgccacaaagtaaattctatataattaaacacctgccacacctacactcttaagctaggtctgcccctgcctagttctcgtactgcaagctaagtgaactcttatcaatttgtgcgtgtgtatattttactttgctattttgaagttcttgattattattctttaagtcggatttagtatttagtttttaacaaaaggaactcttacaaggaagatagaatatgatacagctatgcttgaagaaggcttgggtttaacatttcgttttggtcggttttcgtgttgaagctttctatggatagaagccaatctctcattgttctgttggttctagtcattgctggagtgaaaatgttaagagctacgatagctccaaactgtgtaaaaagattacctgaagtaggagttttatgagagcgccacatatttaaaccatctgcatttctacaattttgttaggatcagtttgggttactacatagagtaatcatttgattcttctttcttttgggaaaattttagtcaataagtattgattatatccctaagatccgctggttccagtcagttatatatgtcaacctacttaaacggtcccatagtgtatcttcacttattcttgattatttccttggtcccataatattttagttattttgcaaactaaaactcaccataatccttcattttacaaacctaaattttcgcaacgactcacttccgagcatttacattgcttcaattcttctaactcttcgtgattttgtagctttttttgttgcggttttatcttattctccactatcattttgcaaaacaagttgctctacattttattttgtgtcctaacttttttctagtgacgtaaattttatacttggacaggttgctttatccactcaaaaccacagttatgtgatctctagcattttcgacaatttatttattctttcctgttgactgttgtcactcttgttttgttccgattatatgcgaatatactttttgttatattaatccccacatcacacgaggttaaattctttttctttttaatgttcttgtagttaatcatctttttgtttaactttatatcatgcttaaacacttctacacgccaattattatagtttcgttcccaaaggcactactgattctgaatcgggacgtagaattaggactcattaattagaattctgagttatggaaactcttatctgataaaaaaaaatggatacacttacacaattagattaaaataaaacagaataataaaatgattttatctgtgaggtgatagagaacttcagtgattcttaattggggaatttgggaccatgagaaatatccactcaccccaaaaattaaaattaaaaggtctttcttttagactgcccccttttacttttaacatttgaaaaataatgattttctttatgaataagaaatgaatatttgtctactttttattttgaaatggatttaacggcccgacgggagatcactgatttcagttgtgctgtcagttgtgttctcaattccaattttctttcaaataattggtattttcaactataaattattagaaaaatattatgatataaacaatacgatgacagtcatacatttacatttacttgttacgatgcgtgtcgatggcaaatttttatctatgtgttgttgatacataaacatttgtgtatcaactttatctgcatgcatgaactcgtgtaaaccaaagaaccgggatatcgatctcccaagccttagtcgaagcacattcggtccaaaatgctttgacaatcagatgattcatattaaagtccaaacatatttgtcttcaatagggcaaacaaaaaaaagagagttcatacttaattacgccgcaacatgtggacttcgagtcacgagtataaccaatgatcgttttttttggaagacgccattccgtctccggcccaaagaacaatgaccgttttcttcgtgtacatttgtttattcaataatcaatataaatatacatgacaatattttcaatgttcttaataaaaaaattattttattggatcaattatatgcttttaagcaaataaaccttttattttatttttacccgaaaatagaaatgtttattttgtcatataagaagacaaaagatctggcatatagaggaagtagctaggctataaactcctgttgaaaacgatataattaaaaatcaaaacaagaatgaaccatgcatttacccgtccactagtaaaacctgaaaagaatttcaaacacgagtggtctttagattcaacagttgatgcataatacataggcaaatcatattgtgtagagtgattaaaaaatcgactaaagtatgataaccctatgtagaaagtagctttaaatataataattacgaaattgacggctatcatttattattactaaaatattattataaattaattattgtttctgttaatagctaagtaaaacattatttcaacgaatatactctattacacttgctctcatttgtgttttgtttttgggtaagtgctctcatttgtttttgttggacaagtaaaaataaaaaacgatcaagttatttcttttgtgtgggtattttgagtcgggtgattacctccgattacgaaccatcataaaaatcttcctccaagcagtttgctataagattttaaagcagcaacacaacacccgattgcgttgtacataatctaagccgtcaagtgtcatcatcaaaatattatgcaaattaatcgcaaccgcattaattagctcccttttttggcctttggggcatcactccgttcattatctggttccgcatgcactaagctgaatcttttcttagatctacttttttattttttatttttattttattttatttttgaatatcttcttctcattctatggctatgatttctaatattgtattagaataatgttcaaaagaaccatacacttccaattcaaaattaactaaatttgtccatgaacattacatattagaatagaaatgtctcatttatcgatgtgggacattttaaatgacttagcgcttgattggttttccctctaccacccgcaaacgcagcgtttgcggttggtagcggttgttagcgattgacaccaatcataaaaaccgctagacatcgctttgggccgctcgaaatcgcccgttttcaaaagctccttcccgcaagcgtttgcggttgcgggcggtagcggttaggttaaaaagaaaactttttttaattaaattaaataattgtggctttcacccaaactctaatcattataattaaaataatctaatcttttatatatcttatttttattagaaaaccttaatcaatatattataaccctattgtctcaattatggcatccgatgaaaatcaaaatcaagaatcaaacataagtatcatctaaccttttattcattcattagctagtgtaattctttaactatttcatagcatcgttgtttttattttattttgtattctttttagttttttgattgaatacatgtttcgatttgttttctcgattagaaatcatttggtcggacgagatgatatattgtatttttatttggtcagaaaatcaagttttctaatattatcaatttatcttaatatattatatttttatttcttttaatagtaatatattatatttattttggttattttttatttaattactatcgcacccgctggtttaccagtcataaaactcccgcaaaagcatccattatcaaacgctcaaccagtcgttcaaaacgcttgataacgcttgaaaccgcaaccgcccgttttcgcaaactcccgcaaccgcatccgctacgtttaaaccagtcaggctattaatctttcattctacgattaaatatatgttcaaaaaataattaaactgtgcacaagactgtttgactttaggttttagtactcttttgcacacacaaaaaaaaaaagactttaggttccaggtagtacaaaaaaaagaattacctttagccatacaatttgtaaattaattgagaagagaagaatgatagaatgaaaagtcatagaataagaagcattataacagttgaattaaaattatcttatttttgaaaatagatatgttaactaaaatacaacgtgatacttttcttttggagcaaaaaatacatcgtcatgaaaggaaattttgtgttcttcacagaatgtaaatcttacaataataattttcctttaccgtttttcacgacaacaaatggaaaaacgtttactactgatttttctttaaacagtaataaaaacttatcttttgtagagttgtcattttcgtgattactatgacttgaagaaactatttggcaatcgctgcggagaaaacaagaaaataaagagggaccatgcatttgatagaacgctgtgatatcaatcaattacgacagcttctattggtacataattgaagaaatttggttttattcgatatttagcagttttgtttagctagtccaattttgatttatgctacatttttacaattgttaattagacacaaaatgaatatgatactaactattggtccttgcaaggacatattcaccccctcttggtttatacaaaatgcggaaatacgaattccactaatatatctatacaattagttaatatggctaggctaaagaccacaccatcaagagctccttttgagacaaaaacaaaaaatgaaaagtaacgaaatgatggaaggtgggttctcttgggtaaggtttatgtggttctctactcttggaattctttattcttaatatagtatattaagtttttaagaaactaaatacataaattttaatcaccaattttggttttctaccttaggccattaaaaagaatatatatatatatatatatatatatatatatatatttggtaaagctattaatttttttgggatttcgattttttttcgtaaaagaaattttaacttgtaggttttggttcatgatatcacaagatgacatgtggtctatattggatcttctctctcaaaccaaaaatcgatcgaagtacaaaagaaagatatatatggagatgtcagacgatcatgtcttttaataaagtactactctatttatggtttttatttggtctaatcttctgtttgtagctaattgtaatatgataaaattagatatacttcttgtttgattttatgttataaatacataaaccagacatgtttaataacatttgagggaaagtataaagtattcacatgtggtttgttcaacaagttacaagaattgtcgttcaagtccttaccaaatatgttacgagttacatttagggatggattcatgtttcgtggattcgtcacaacaattatttaatagttgtcaattaaatttggttcaaaatttctgtaataaaaattcttttaagaataaatctgatgtagcctaatgttcttattttgagtgcttaaagtctcttaggttaccatgtgattagcaatatgtttgggcattcttaggatgtatttttggtgcattttcagtataagatgtttttaatctgcaagtcgtaagcgaaagattatgcatttggattgcatttgcatggtagaagatgtatttcaattgatactgagatatgtgataagtgattgttaattatagcaagaatgtatcctttatctaaagattgatatccgatcccttcgtatttctctgattcttaaatctctctcaaacccctaaatagctcagcaaatctttcactatcattttttttatataaaaagatggatatccgtgttatttgtcttttgcattgtgtacgtaggtagtagtgttgtttgtacgtacatgcaagattgaatgtgtagaacaagtgtaccagttttgggccatattgggcttctactgtacctattctctacgttacacttatttttattattttgacgaacttagctgcatgctgtatagtgtatacgatgtatagcagttaatgcccacttcatgaatgatgatatattgttagtattttggttcaatataccgatttgactccagttcaagtttttcccatttgtgcggttctcaaaacaaacagtgaagaacatatctagaataattgtgagtaatttaagaaatcacagaaatattaaaatcattaaaaaaaagttcctagttttcgcaaaaaaaagttaataactagagtccttaaaaaacctaagaatacccggcccactagacccataactaattaactatataggtccaagagaaatctttttcgcaatcaatttattaaaatcataaatggaaatagttcatgtaatttgtagtatacttttttgagaataaaacaaaatttaagaaaaatatctggtagatcactctgtttttactgagcacttgatattttctttgtagaaaatcatattattagagtaggaagaaagaaggacgaacatttgttttgtggaaataaactggtgaacaattaacatctaattacgacacgtggttatacgtatccatgtaaaacccgcaattaactttgtacgtaaggtttcaagttcaacttgaataattatacgcagcctaaattagaaaaatacaaaactttaatccaaccctcctttgggtttggaaaactggctattaatacatttggtaattaaaataaaaagggatggttatgaaggtattagtactacctcatttgtaatatatagctctgtagtttataaactatcgaaaaaaatcaaatgttttagttatatatatttgatgtttctcaacaaatgtttcataacttcatcaaagaaaaaaacaaatttttcttaaagaacttttagatagattttttactctattttacgcgctaaacatgttttcctgtagaatatttttttgttcataaagaatgtttagaaagtaaatatatagtacgtttgttcatttggataatcgaatcaacttctgtaatcatctcgcattcaccactataaagaaaatgaagtgcaaaatttaacttggaatataacaagaacaatacatataaagaaccttaaccaaaaggtgaagaaaaaatcaataggaaaacaagacaaaacggttgaggggaaatgcaaaaacaaacaaatgaaaagaaatgagaaatgttaaaaaaggatgtgttaaggaagatgtcgtgtgggactcaatttatttcatttctagttatgatcataccatcacgtgcctctatcacttctccacaccttttgtttggtaattcaaaatgtgtcataaaattaaaatgatagagattctaattttcatccgagtttaattaagatcatatagagatagagatatatggttgtatgatacctttcagtaaacatcagtgtgcaccattatagccacatagagcttagaagtgttataattaggtttgtatacttgatttggtgactgttgtgatgacattgagattgaagtgatcatatatatgcagctcatgtatcggttcatccattaaattttaccaagtggaacaaaaatataattaagaatttgaacaataaccgatattaccacagctaaatattagttccaaaaatactgtaattttccaaacaaattcaaaaatataggaagagttcttaaagatttgagtcaaatggtaattgatttgacgactgattacataacatagtcatcaatagttgtacatagtgtatatatatatatatatatatatatatatatatatatatatatatatacattggaggttaagaatatatgatatgtcgaacgactaaaagagaaaaaaggatatacgaaatagaaaagttgtgttacgtaatatatatagacaatacacacaaatttcaagcatcacgcatgacagctttataacggaatagattcctcatggatatatagagaagatgtgcgaagtatatacatttcaaattttacttattgtagctttctttaaaaagtttgttcttaccagaattatatatccataggttagtataattacttcttatttagtttttagtattacaacatgttctttctaaaactattatacctattgaataataaatttaaaatatatgtttttatacattttatttctcttcacatcttttcgagtagtataacaaatgagatattttttctataaagaagaaatgagatactttcgaaactctactaattgatacgttacgtgaattaaggttttaatgttcatgaaaattgtgtttcactttatacattcccaaaattttaataaaccacatgggggaatgcatatatgaatatactataccttattctctattttatgctaatttagatttacaatgtcaatagtagaaaatccaaatgtgaagtgtcttcttagtaaaattggagatattatattctacatttcttcacgttaagccgaaaatatgaccggtttttaacaagcaccaaaaatggaatatacaccacctcttcacatctacaaatgaaagcacaagtgaaggaaaaggaacgttgaaaaacaattatttgttctccaagaccatttaccaatcaaattaatagatattaaattctaagataattgataaatgttaacaaacaaacaaaaaacgatgtgtcgtctaacatctcaaaatttcatatttttaaaatttgcataaatctatgtaaaattaaaaagctcaaaatgttggttattatgttattttaaaatattagtgataaattttggcgtagaactaaatttttccatgaggatgaaaacaatggaatctcaattctcgcctaaaaatgatattagttctaaaatatacatttgattataaacatcgtagaggtacaaaattgtattataatactttagtcatatatcaaatcatatttttaagtttctttaaattgttataatatatagtggaagttgatatgagagtatatgacaatagcctatacaaactttaacacaccacagtaaattaatggacatgagaatcttgaatcatcttcagtaattccagaaaggttcaagatcaaccggtccagtagaggaagacggatcttcttgagaatcaaaccgtctcttaccaaattcaaaatccgatgagatatcagtgttcatgtcagttgaaactccggtttcttgtgagacactcatcgttttgagactttgtcttctgttgttctcgatcatagcatgtagaactgagtgttcttgcgtgagaaccgggctctgtagattcatagaaacctggagggactgagtttgatagagtggaatcctgtgaaaaatgtcggcttggatcgagttaagaacagggctgctgaagcaattgagtgtggttccttggttttgatccgtttggttggagaagcagggcacgtagaccggttctgttttggttttatcgttgtaaggcgaagaatcggttaaagagggcaaaagcgaagggttaaagtcggttccgagtgaaccgattcggattagactcgaaatcgggatcttcttccctccagcactcttttggaacaccctgcatatcacccattcattctgcaaaccccaaaacaaaaacaaaattagtaaacaaaaggaaaacagagcataaacagagtaagtgtttggttttcgggttaacctttgcggttttcggcaagttatgggcagagaattttccttcaagcctgtactcatgcatcacccagttggttttctgacctttaggagctcttcctctatagaaaacaagtgtcttcttcatcccaacaagtgatttgcctcggtatatctctttatccttcccggtcgccttccaataaccggcttcagttgctcggttagttcttaaaccggtgggatactttctgtctctcacacagaaaaaataccattctttctcacccatttttgccatccctatatacacaaaaaaatcaatcttccaacaacattagctctcaagaagaagacaaagagaacacttgtttagattcagaaaaaaaaaagactttaaaacttgaaatcctgatttatgatcaaaacatacatggtaactcccatggctctgatttgtttaaatcaacttcaccgatagctttagctgagaagctggtgtcaagaaccttcttatggagatagtgagttatgagttcttcatctgttggatgaaacctgaacccaggaggtaaatccatctgctcttcctccttttgaaacccacaaaaagtctccatcgtttcttccccaagaaaccttaaacccttaaaactgaaaccaaaacctgatttttttttttaatgggtttcttgatttgatcttggacgttttttttttttgaagatatagattcagagagtactatgcagataaatttataaataaagagagaaaaagatgaacagagaagttagggagaaaggttaggaagatgaagaggaaaatataaagggaaaagagccaaatgaaactataaagtttggaactttcaaggagtggagaaaaacgaaattgcgatatttcattttcttaattataagaaaattacgtcaaaacgaaaattttgtttttttaagaatttggaagaataaaaagagtatatgtatttcccaatttttttgtgtgagaagaaagatacgtagtgtgtaacgcaacttgggtaggttgttttagcactttccccttttaaaaaactttttttctgagctttttaaatattcgtagaaaataattcaattttgaaaaaaaaaatattagaccttttttaaattaaggaactgttttgggatagttataggagctagaaaataaataaatcaataaggaaataaatatctgtgaattaagttaattcaattaacaagagaatggaaattctttgaatctaacgcattaagcatggttactataattgtattgaaatatacaaagaatgatctataaccttattacgtcggttaagcaaatacaatgaataatgacaatgtcttagaaaaacaaagttacacagaaataactatgtggtttttaatatttatggtggcaacacttaattcagtgattagcaaaagagtttagagttcatattttccattatatttcatacgcaagaggttttagatatccttttgtattcgtttgaaaagaataatggatggtactttagggggtgttattcgttaatggattttaatagaattgaaatccaatactaatccactgttattcaactaatgattctaaatccaactttaaaatctagtgttattggaactcatatttgtaaatgatgctgaatagattttaaagtttggtgttattcaattaagattttaaatatttcattaaaatccaatgttattcaaaactaaaagacttgtaaaatctttatatattaattgatttgaaatgaaacctctttggagtttcatgagtaaatcattagaatcaaaatccaaaacatattgcagagattttgaaattcatacaaacatattcttaaaaacaatatcagaaaacaaatctaaagcttaaagaattgactttaactccataattgaataacaccaccttagaatcttaaattatactaataaataaatgttgttattttttcggactttcattgaattaaactatcttgtaaaatttgccaaaaaaaaaaaaactatcttgtaaaacaataccaacaaataatctgtttcactgctctataatggatataattttttttctttaataaattgtatgacttcccttatcatttgtatattgaaccatatctaaccacttttgagatcaaacagatcttataattttaataaggaagtctgtgcttgttggcaaataagaataattaaagttgaaatttagatgatttagtaccagttgaatacaatgtaagatagtaatgttttagcataaaataatataactacctttaaaactctctttccaaaagaagaatcaagaaggcatgattgacaaatgatgtttctgctggtacttttattggttctttaatcttgttacctcattcgtcaaagttttaattattattacgtttttaaaaccagttagaaaaggtcaaagaaatataataaatactttaggttttattgagagatttctatttcgaagagtgaagtgcgttcggtgtactattaacaaaatttgattttggtaccataaggttgcagaaaaaaaaaaaaaaaaaaaaatttggtaccataaattggcatttatttaggaataaaaaggtgctcagggtggatgttcccctagaaaccaattagtctaaatattttccttgtgtctgtctgtatatattccaaaatatatatgacggattccacacagcttaaaatgaatattgtgtcggccattttatacaatcttacatagtcgataaagatataaacaattttttcttttcagatcaattttaaaaattattgttgatcgactcaaagatattaattacagatattagaaaaatactcaaaggtatttttttatatttctgatcattaactatgaaccggttgtgcctcgtttcctcatgtaaatacttttggaattttttttggggtagaaatagaaatcttgttttgttttgccacccaatagagattctttttatagttattggttgtaataacattaattgattagaaacatcatttggaaaaagataaagcataaatgtttaggcagcgccaattcttatttcccattcgctatatttaaacatatattaaaatttaataaaagagtggtaattaagcacgagaaatatttccattttatcatcatttgcatagttgagtttcaccaaacaattaggattggcactcggtttacatttcaccatcccgcgatccttttcttttatgaccaaaaacaattacaaaattaaaactattgaaagaaatctctattgctacgagtaagttatttatatgctaaattgacgtttcctttgaccgccattatactatttacagagtattttagtaaaataggtatgaaatttgagagttatatattggagtattttagcactataggtatgaaatctgagagttttcaatagccaatgactaaacttattacatacttgggttaaatatagtctttaagacctattcgattcacttaacgttacaactttatagaaaatagagcatattccatacaacgtttctcattatctttacttagtttagccgaaccagagtgacactgcattacgcacagttaagtatataaacatagtttgaagaaagatcatttacgcttctttgtcgtccttaacaatattatacgcactagaaactaattccacctgattaaaaaactagcatcatattatgcacaaaatgtcaaacatgtcgataatatttttaactattaaaatataatgtcatggtggggagagaacatgaccaaatgaaatatttggtagtctaataaaattagaaatctgcttatagtgttgcaaattaggtggtaagaaagctactaatatttctatttaaggaatagatccagtaagacaagaccacgtattgtttatgccctcgtttgcaaagactttctggtctcttcgctaaatcgtaagcctttgattttgtaaattttgtattgttgtagtcaacttaaacctatatttgaatctgctacgtcatctttagtttcctaatacccgaaaatttagacgaatggccatgtgtctatatgttgaaaagacgattagtattgagaaataaggattaaaccgactaatgagtgattaaatagaacttaataaaactctagggttgaggttgaccactttcatgttcgtgcttccgactccgcctacatatggtatacgggccacaaggccagactcgtttttttttgtatatgggccactgggccagtctcgttttttttatgattgtttatcaaaggagtggcagattaagggagctagcttttatgttgtgatagcaatttgactcatttggatacgttgggctcaaaattgtaggcttgagtcgaagtgctttaaggatatggaccaatcatagatactacattactagatatgtacaatagcacaaagcacaataagaagttgttatttacagtcttaaaatggaaaataaattagagtggaatggtttgcattagtgtttctagcatatcataacttagattcaagatcgataatatgggtgtgtaagttggagacgataaaaaacatataaattatgtcattgtgtttttttttttttttgtctagtttgaaaaattatcaaattgctacttgctagtagcaaatagcaatgtttaccgactttgcaatcaaattttgcccatcgtttcgtttctaggcattgttttggattaaaatcctgtgggccgcttttggagtctctttggaccatgttttactgactaatccagaataaaggtgtgggctgcattctttatttttgtcaaaaatatctgataatggataatgcaaacaaatccaaatttcattatattcaaaagaaatgaaatctcccaatcttcaaatgctaatataataatttttccaagtttgtatcatgatcaccttaaaagtggcaatttcttttattttctttttgacaacaatcaaattttacaaaatgtgtttgacaacatttttgttttgttgttgttaagaatatgtggttttaccttcatattagattgcaacaatatactacaattatgcaaatacgattgtatataaactaagtaggacccaatccaacgaggaaaagcctcatacacagtcagcaacacgtttcatgcgacgaccctgacaatgatgttttttacttttttcactcctctttctcataaggaaaaaaaagatacagaaaaatcattttcaaagaaataattctgttttatttagtggataagtttgataatcatgaaatcatagtaacacataatccggatcttcagattggtcaacaattgttaatcactatgagtgagttaattatttattagcacaagttcgtaatcaacggtgaaaaatggatatggggaatggaatggataaagtcaaaaaaatctaattggataaacaaggacccaccttacgagtaaattccagttttgtcttaaaaacaacacaagtttctgcgtaactgtacaaagtgttctcttccaatttgatgtcgagaggtcaataaagtgatgagctttttgtgattttttcctcattcaaaatctttgcactttttcactctccttcaatctcaaatttctgagtctttcttggttcactttccttaaacacgatttgacatggatgcaatttcatctcttggaaccaattgtgttctttctggggtttctccattttcacaagagaatcaatcaaaatcgaaactttctccgtttatgagtcttgatttgaaggaacatccaatggcttcagcagatttcaccaaccaaaccttaaccgctttctcttcttcctctgcgtctcctgtaagcaaaaacaaaaaacaaacatctcttttttgtttctttaatccaaatctttggtgactttatagattccctaattgacttgtgtttgaaaatggttagtttcaggcaaagacatcatcgattggtatgagtagaggaatgagatggtgggagaagtcaacaaatcacaacatgttagagattcaatctgccaatcatcttgttgactctttgttaaacgctggagatagattggttgttcttgatttctactctcctggttgtggtggctgcaaatctctccacccaaaggtatgaaatatgaatagtgtacttttttgtggatagattcagtgaatctggttttgtgtattgatatgttgtttttttgtatataacagatatgtcaattggcagaaacaaacccaaatgtgatgtttctgaaagtgaatcaagaagagcttagaacaatgtgtcatggtctaaacgttcatgtgctgcctttctttaagttctatagaggagcagagggtaaagtctgtagcttcagctgcactattgcaactgtaagcaaatatatctgatgatcaaataacattgtgctggttttaatatcattggcacttaggtagtaaactgaaactctttttgattgaatgtgcagatcaataagttcaagaaagcgttggataagcacggtagtgaaagatgcagcctcggggatgcaaagggattagacgagaaggaactcgcggctttggcatcggttggtgaactgaaaatgaattctttaacaatgcatcaagctagcaacattggttataaaacagaggagcaatatcaaacgatggtgttataaagagatgacttttttcattaaggttcttattgaattgtagatattagtattatttgtgcttggtttggcacttacattcattttagtttcacaccattactaccagtggcaatttcaattaactgataagattgaatcaatctttggctcttatgattatattgtgataaatcttgtagcttcaacttttttaatacaatctcttttacaatatgaaagatcaatggattaagatcttaacacagtttcaagagcaagatttcaatattgttgtaaagaaactcttaacaggttttgttagatccgaaatcagctatctaatccaatcagataagaaagttttggttttgactaatctagtatatttaaaaacaggttatgaaaggctttacctcagcgtcaagattgtaatcatgtatatcagatctgatgattattttgaaatccatcattggtaaagcctttttcacttttaaaaatcaaatcaaaaacaggttttctaaaaactgaaaataaatgagataaagttttatgcatcagagagattcccattatagactatagtcaacacagaatattttctgatgtccctgtctgttaatcgtcacttgcaaacaacacaaatctaaaacaccagatgataccaagttgaaaagaacctttaaacttgaaaaaaaatcttcaaagtaattaaaagttataaaccatcaaaggtatcaacaactatcagcaaccaaatcctataatactactaaattcaataaagaaataagattcaaaatagagaaacaagattgtaatgaagaaacggcgtttagaaacagagactaaagaacagagagaatgataagttagggttatggatgtttgctcggacttataaagaggttggttcttgtagttaaggttgggccgggccggaccgttatctaatagaataaaatatgtaataaatatatagtttagtgattaaacagcaatggggatgtagctcagatggtagagcgctcgcttagcatgcgagaggtacggggatcgataccccgcatctccatctttttattttttacgtaacaagaagcttcctatattcgtcctacgacttcttcggtctcttattatgaatttatgatc

SEQ ID NO: 941 - DNA, 15607 bp, Arabidopsis thaliana
atgatgggaaatggtgtgttctgccaaaaaaacaaatgagactaatccatgtctcaagagtgaatgaagagtatctccacttcgttgactcaataaataagaggcagagccaaaatggccccataaagttgacaaatgtaggatgaggataatcaaagcaccaagtgcatgcatgaactttacatgtcagatccatacctaggggaagatccgattatgtcagattcttatcttattctgaatggacaatttgagtaactacagtattagttcatgcaagaaattctctttgtttttttataacgagtgatagctgacactatagaatacataactcgctaatctcaattgttttaactattatagtttctgaggtatagaaggtgactttagcctccttaagacttcttttgcatgtgtctcacttcggagcctcgttctctgatgatcgaatcccttcctcaatacgctacaaacacacagaagaatatatggttactgtttatttttgttgagaatttagactttcaaagctttgaatttgctgacttcttcttacctgaagaagatagttgtgaagccaatctagtgtctgtgggaatgtggtggccgatatatttacaacagtcaccccctgattcacgaatacgaaatgtaagaacctaaaaaaacctgaacagaaattttgattgatgaagaaccaaacaaacctgtgaattaaaggaacaaaggtagtcttcaatggtctttaggtttgttattagtctatctttctcctgcaaaaaaaggaaagccaaacaagtgttcatacaactttcaagttcagtttagatctctttaagctttaagttgtataatagtaccttagtggtatatttctctccagatgtacgggaagagatccactcctctagcaaagcctgagaaaatgagattaaagaaaataaagaactgagaaatgactacttttcgagttatatagcttgaaagaaacaaaattttgaatcaccttatgatcgaattcagacatctttaacacaatagatatgactattggttcagggccagatttcgtctttccacttccatctgcagatttgcttttcttttcagcatcttttgaactttcagctgcacacacacgaaacgaaatagaactttacactcacatagaagcaaatggaagaacaatcacaagaagaaaagactacactgaaaatactttgaagcataccgtcgattgtacattgtgtaactttttctgagaggttgttcgcttctacagatgccacagcttcctcatgagaatggggtttcacagcactattgtcggtttctttcgtgtttgaagaacttgcctcgggatttttgtccgaggttagatctttcgaagagtttgtttcgctgctgctcttctcgggatcatttgatggagttttgttctcatcattcattaagtatatgcttggatctaaatgtcttccctgtgattacttggccaagattagaaaacaggtgtaattgccgaaatataatccaaatgtatggagctttcacaaacaaatttacctcaattataatgggtttcccatctttcattgctttcttcaaatcaccaccaagtcctatacaaccccaagccattgagtaatgtcaagaaaaaataatgtagagagtaacaaatctacaaacacaaaatgaaaacaaaaccaaatgaagcatacaccaaagaggaagtacctttccgaacaattctgcattctctacagaattcagtaatcaactcttctgatgagccgaattctcgagtccatacaggggttgatgtcaacggagcactacattaaacataaacaaacgtgcttatgcgctaatctatagcccggattgtaactcttagactagaggataacaatgtacataactaaaaaggagaaaaacgtactcagttgctgttcgaagcagctcataaaccatgtctgtctgtgtacacaaaaggccacatttgaaaataaacaaacataagaaaatgagaacaaactgatgaagaagggtttaggagcaagttacttgtaaaacgtttggcaagttaagtctctgagcaagttgtgtagctatagtggacttgccaacacaagctgttccgcaaacgagtatgacaagaggtactctttgatgatgaaatctacaaaaccaaaagtataacattcaaaaaatatgaactttgagaaaagattttcaaacaagtaaatatcatatactagcgttttactttgtcatcatgttataacgattaatgtactcttctccataaccacgtcgctccattagctgcaaatttcaaccagtaacagattacttcaatgttcataagacatccaagataagttttagcgaggatctaaagatatgtaccttaaacaaattggtttccaaatcagactgagagctgcaaaaagagacaaagcaaattatgttacaaacaagatcaaggttatgtaaattgaatcgataagaagaagaaggacgaaatgggcatacacatcaagaagactgttgtcaattagaagcttcttgagttcaagagaaatctttatagcttcatgatttgggatctgagtcaaaattggcaaatattgtaaccaatgttattatagaattattcagtactaaatcctagaatctgaagaagacttagatgtcgaaattgaacaaaccttagtaacagttaacattctacagactaagaatcgagacagaacatagtagtgatctgcgttgtctccaagccatactttgaccttaaaaaagttgccgtcaacaaaaaaaaaaaaaaatcagaaatttgaaaaagaagaagaatcaaaaaccacccaaatcgaaagaaaaaacgaaccttgacgaaatcgtatttggaagaagcgttacgaggagaagaaggaacagaagagaatgatcggatgttgatatctcgaggttcgtgttcgccgttgttgattattccattagttttttttgttgtcattgaagaagaagacgatgatgattcctctctgtccttcatcttcaaattttgagttttttgagaagaggaaatttcgatctctctgattaataatctgttgatgtttccgacaatctgacttctttaggacatatactctgttttctttttcctttattttttttgcttaacaaataaaattacagtatgattaacatagatagcccaatatcaattatgattagcccatattaagaattgaatccacgtttatttgggccagcccataataattttgttatttgttgattctgcttctttgatttttgatttttgatttttttgggttttgattctttcagatatatatgttaacaacttccaactaaaacttactactcatacccattagcttacatgaagccatctcaagttcaaagtgaattctatcctaaccatgtgcatcgcgtatgagggtttcaacggtcatccaccagttacataacgttatttatttaggtccctaagcccaaatctacaacatagtggcagatttccaatatttataattttactggtttattggcgggatgagccaggcccgtgcagtagtgcaacgcatgggcgactcgtgaaaacccagatagcaagctaccttagtgggttttctcccttaaaaaatagagttaatatcgtgtgggccgatggcccacatatcagatattaaactgataagaacagatactacacttgatcttagccaaaaggccgagaaaggtatgaattgttcgtggccgtggcctcgttatttatactactcgtcttgtcttcacctcttaaattgttagcgatgtgggactttggaacgagttaaaagttatttaaaataaaacaaaccgcctgtttcttttagtgggctttgcacgactccccctaatcggatttttaatccacacgtagcccagataatatcagattttggtttagcgtaaccggaccaagatttatattcaaattacatgtatattgcatagcaatcacattgtttttttttgtagcaatgacattcttaagttcataaatttaacatttacaacgtcaaaggtagaaaagaagtatgaacagtttataagtactcaattttattgcctcatttttcaatggatgctccttggctgtcatatgtattagagatgttgatgacactagcctttatcgaacattcaggatgtacttaaacttgccaaaaagaatcagaaactatggacatttcttaatccgaagcttaaaagttacttagtctttctgctattgtcctcaatcactagtctttatcactaggaaagtaatctgtcacacttggtcgatctaaaaatgataattataagtcaataaaaatgatatataatacagttttaaaatcaaagtttgacaatatataaatgtcataaaaagaaatgagagaaaacaaaaaagggtctcactcagcacctgtaaattcaaatcaatacaccatgaccatggatgacaaagctcttctcaaacttcccatcagctcgtcgtagtattgactcaaagccgaggatgccctgatgagtcccgtaaagaaacacataagtgagaactggcgaaaaatgcagacacaaaacataaaatgcttgaatgggtcatgcaagcaaaattgtgtgtacctttatggagctatacaaggagagtttttttttgttttcaagaacgaggagcagccatttgctgtttctttatcctctcgtgcgacttcaccatgctgtaaaagagcacaagagataaagagtttcatccaagttattcacttcacagactgagttccatggtttttgaaattgatcggttggttacctgatatcatgaggggtgatgaacatccactgcgatccttctccaattgcaaaatccaccagtgcgtccaagctaattttccgactgactgcatcctatatttcagaatcagaaagttaaaaatgttagtctcatcccaacgtaaagctcgtaaaagagagaattcttaaaaggacataataccataaacacatcaaactcatccattgctcgaaacggggcttctgtcatctcgtgaagagctagtgcaaaacataaagttgagaaagaacgttctccgcctagtataatgagaagagcgttacacataggaaatgtctttatatggcaatgaatcagatgtatgatttttaagagtgtggaaggatgcagtacctgaaagacctttggtgtctcgaacgacattgcttgttgcgtcttgaggcattttaacctgtcataaagaacgatatcaatcagatgacgtaataatatgggcacgctagtagcaaaaaccgtaccatggcagtgtcaattacctctatggacaaagttttattttcataactgactttgatgtgtccgctgatacctttctttcccaagtgagcgttgaatctgcttagaagattaacgtcaaagaaagctccatatggaaaaaaaaatcatactaatctcaagagacaaccgaactacagatttatctatgtaggtggcaatggggaaagcgactcttactgccatgttaactggcgccgaagaagagatgcatttctttgaaatttggcccaccgtgaatctagagcatttttgcaggcctgatcaaatagtgatgaatacattaaacgataatacgataacaacacaaagagctttaacataaacagatctgcagactcaaccatgagtttttctcgatggtcttgataggatttgcgcttctttgcaatctttcgttctaggctctcatacatcatcctaaggtcatcaattgattcagaaaacctgcacgaacaaaattgaagcacgtaatttactgtcacaggtcgtttctgtgtgaaggaaaaaagctgaaaggcaatattaaaatacgcactgctgattctctcgatgaagtctctgattcattctggtaatctgagcactgagttgctcaggagtactcccatcccagggacccaaagattctatctcactctcaggacaaatttcagaggccttctggtcactttcctgaaatttcagcacatgcaattcataaccacagaaaaatgaaccctgggcaataataacctacaagataaaaaaattctacagctaatacacattactccagtagctaagttccatagactagacaacatgtcataccgggtttcaaactggccatttccttagagagggtttacaagagattaagagaggtatctatatatatatatatatatatattgtgtgtgtgtgtgttgtatagaacggaaagaagttgcaaatgtcatttcgaaaaatttctgagtaattgcttattatatgtacctttcgcttatttttaagctcctcgtagttagcctcagcattcttaatatcaggtaggaccttgtttttcattatgttctcgtaatggattttctcctgaaacagaatcaagcttacattctacatgcaaaccaagtaaaaaaaatcttcacgtcgaaaaaagaaggggtaccgcttcggcagactgaaggtctttctcaatcttctttagctcattctctgcttcctcaaaggcatcaatttcacccttggctgactctacatgcacgttttgagaaaaagtaagaatagagtcggccactcaatcaagaagatctattcatgttcgaccacaccacaagaaaaagatacaggtgtttcagaaacagtggtctatcacacacataccacgcatgttctcaaataaagctgtaagtttattagcctttagctcagcttctttcaagcagttttggagcttctcaaggaaagcttctttctcatctatctcttctaggtctttctggcatattaattagaaaagaagaaaaaatacatgaggagaaggcgaaaacagtaacaataaagaaaaattccaacaaactaaccatgatttcacgttgaagctcattaacacttgaagaaggtaatgcttcgatctcagcagcgactgtattcttcaaatcgtgcatctcaagttcctttgtcgtcaaaaccttctctgcttggctgcggtgcttctgcacaagccgaacaaagaaaaatatggaaacggttatggatactagcgaactaaagctttgtaaattcaagctaatcatttcagttaagatatataaagactgggaactctagtttctactggattaatcaatgagacaataccttcagttggcgcactttcaactcaagttcctcaagattctcctctgcctccctcttacgtctcatgcattgatttatctcgttttgttcttttgaagcctctatttcaagatccttgatctggtcatcaaaagaagcacagagtcgcgaaggtctacgagaaagaggaggaagagtagtctgaactggcccacgaaaaaacctggggtaagagtagataaattagtgttatgattgaggaggatattcctatatcccttagatgctctcaagtcaatcccttttaactaaaaatgactcttattttacacgactaagatattgtagatgttgtagatgcaagacagtcggatatctcatattctggtcccttcaagataagttgaagggattttgaaaatgaaatatatcaaacaaaaagcttctattgtttgaagctttttgtttgtcttatggtggaaaattgatattggagaaatccagagccaggatacagaaagaggggtgcatgtcattgttcaaaattctatttcaaaagaaaagattatcccccgccatgcaaaggatttgtttttgtttgcaaggggagagatatagcgggattgtccatgccaaatctaacaaattacttacattttgtatccgtctaaagtgtaaacctccttcagatttgagagccttttcccaaatgcaaccgcctttccctcctcataattttctgcaagcacttgcctctcaacaccactctgaaatattcagaaaacaagactaaaatatgaacaccgtcataaaaggctgtaagaatgaagaaatttagtaagtggagggaaaatttgaaagtacaaacctgatccaccaagacattaaggacggttgggttatcagagtctatgacagagaatatagttgggtgttctgtctgaggcaccatgtgccttggtatatttaacctgcataaatgaagagatagcaaatatttgcgttataaagctacccattcatcaatgcagatggttaaaaggaaatatgaaaatgcttatttcgagtttgaaccttggtctcgaaaagtcatagatgataatcttaagatttctatagttagcttcattcgcacagcctcttagagtgagagaatctttgtgatcagtcacaatgaaggcatttaatagggttccaagagcttgttcaactgaagaagcccatttattgccattgactaaagtctgcagaacatcacaccattagaagagactttttaacccacaaaatgttcacatcaaaagattgttacagcaacagttgcacatgtcaatataagataacaagtgaaatagtttgtttggtgcacagattgcaaacgaaacgagtagaaacttaccacatgggagccaataggaccaattggtggttttctaaatctacgatgatttctctcaatagcctgcagaagattaatgactctgtcccctccaaatgcagtaacctggtgagcatgtatgtatttgtatgcctcttagatatttccgaaagaggcttgacaagatccagttgaaacactatattttgtgatgaaataactatgatgcaccttatttgtttgatgtttcttcagatcattaatgttcgaggttatgaatctttgcctcttttgatggtttttaatctagaagcaaaaaaaggacaacgaaaagattgaggtgttaattgcaattgtaaacaacctgcatatgaaactgattgaaaaaaaagacttcagattcatgtgtaagtaataggtatagttgtaccatatcctcgatgtgttccatctttttcctcccttcaaacgctttttccaagaagcagttctcttcctctttcaatctaaagtatcaatctttaaaacatgtttaaagacgagagagaagactccgaaatgctaagcagacgaaaaggaaacagaaaacttaagatcataacctggaacgcaatgtttcaactttctcaacctcctgctccaaatattttagtttctcctcgatttcagattgttcagcctacataattatcaacctatgagaaatatgcacaagtatatctgtccatgtatacacaccttcacaatatcttgatcgttaagccaagacactcagcacaaaagaaacatgacatagtttttcctttttaagatatgtgactgatattggggacctgtgtgttcttcattgtctgttcattgatatctccaacttgccgttcaagccttctaacacgatccttaatcttttgaacataattgcacttatgattgaattcttcttgtagagcaattttttctcgtacagcctaaaataagaacacacaaagatctatcaagaacacacatacaagatgtggacaattacttataccgaaagcaacttttcaaaactaatctaaactaataataagcatattagagccttgcagcccatttgccaaaatccagtatttttatttgcttcaccctcttacaaacactgaacaagaaaatatattttgttaaataagggaagataatttgtcaattctttaggcaaaattccacccactagatccctcttaaaactaagtttacaaaccgtcttggctgattggtgaaaactctctatctctctcttcattgcagttgattcatccatcagacacgcaacttgagctttcttcttggtcaacgtatcccttaatgattccacttttccctacaaaaaggtcaatgataatcaaccagtctgagctcgaaacatgaattaagcaatcattcactcatcagtagacccctacagtaaggcaggcgaaggtttgcgctctaagaaaattgaacatgttagaggcaaaacctcacataaacatatggaaccaatatggcacacattaactatgcccaatgagaaagttttacgttgggaataccacaagactctacataatcaaactctctcttttatacagctaaaaactccatttttatcttatgatggccaggtaggatatcagagagaagttacaacttgtaatgcacccagcatctttacctttcgatttttgtagccatccaaatttcggatgaaggaaagtatgtattacttaccagttcccaatctattttagcttggcaagtcggtatacgttctttaagcttcacaatcttctcagtctgttcctggagctgcctatccacatcatatacccatgaccaagccagtttcttcttcaactgctgcaacctttgagctatttcttcaacttgttccatattctttatctttccacgcaactcactgatctccttttctattggtttaattgtgttctccaattcatcgactatagcagttgcttttgtcaagtgttcgtagatactttggagaagatcattgacttgctgaagaagggttgccttaaaaaagaactagatagcgaaaattttcagccataataacaacatggttgactttgatatatatatcaattcacgtgacataccttgaatttatctttgtcatttccagaatgtaagaactccctgcttttgtcttgactcattaccacacacggattttcaacatcaatctacacatgtaaaatataataagaatacagtactgagtatgccaagtatctgatatcacttaatactttctaaaattttgaatgaacggccaaaactcacattaaaatgttcaacaagttcccgtagctcgtcccttttgttacttactttttttcctgcagaaaataagaaatcagaaaaacattttaaatcaatagttttatatatatgcacataacacaaagatagagttgttggagaagaaaataagaacggagacaggcatcacaacaaacacgggggctatgagataaactgtaagtcaaactataaattattatagagagtacaatgaattaacctagataatctttgagaacagtagctgtagcagactcagttatcctgcgttcgataattataacgccaccataaatttcaggcttaaaagcatcctctccactgtttttcatttctacttggacaacggcatagctgcaaagaaatccaaccaaattggaaaggaatttcagtcactcttatcattagtcatctcctaatcaatgacaagagacaatctaaaaaatttaagaaagaagaataagcgccactaaacatgtcctattttcacttccaatctgcaaatctgatatttagacaaaacacagtgcaagtgtacaaaacctgcatccagttttaatgaaatcctttagagtggcagcacgctgagtccctctcgctcgacatccaaatgcaacacatagtgcagtcagtattgcactcttaccacctaagatttttaatcaaaagtccagattaaaactcttggtcatgactgtgagaaaccaattctaaataaataaaaaagacatttccactacctcctaacctgaatagtgaacacaattgaatcaaattgaaaaatctggatatcaaaattaggcgaaacccaattcccaataaggcatgcgtgattaaattcagtcaatcagagctctaaaaaacatttttttaaacagaaggagaagacttacttccgttttggccggtgatgaaattaacccactcgccaaactcaatctggagattactatggcacatgaaattctcaactttgatcctcagaatcgaacccgacccagaacgttgtttgatgaatgaatcactggctcgagcaccagattttaccatggcttttcgcgttctagggtttcttctctcactcggttgaaacaaattagaatagagcaagttccattgatgcgactgcttagggcgggaaagagattgctattgtacgtcgcgtgtactatattccgctgtctttaccgtacgatgatgatgatctcgagatcttatgaccgaacacaaatgggccttaaagttccccctaatatggcccattagctacagttgtttttagcccaatagaccctttttcttttggtcaacagtagtgttcactgtaagaaagaaaaaaaattaaaatcttaactaaattaaaataattttatactacaaaagtgtatttgttttacggtgtgattaaatagattttcagatattgtgcataattttccggaaatatcatgcacattcctatcatgttcacgttgttcgattcaaatacattcgattataatttatacgttaaattatctatagttatttgtataaaacacgaaaaaactactgttactttttttatatactttttctgttttaatttgattgtctttctaacactaaaattttatttcgtaataatcgtcattttagattttcaatataaatatttgataaaactttcaataatatccttattgttcaatgtcgtaaccaataaaaataaataaaaaatttaattgttttcttaacttttatgtaaaaatcctaaacgacgactattttaaaaaaaagagagtaagaaaataaaagattagcttgtatataattgttgactttgttttttttgaccagaataaaatatgcttgtaactaaatgtgagaacataatgaacaaacacttatgttaagtggttaactccttttgaacagaaattgtgttcctccctctcatgcatctatatatatatatgagtatctccactgattcaaaatcacataatattcacaaacacttttcgcattaaaaagcaatcaaaatctttaacgcctaaaaattttgtagttttttttttgtgtttttcatcgtcaaaatgtattcacttctcaagaaaacaaaaatctgtcaggtgtgcaagaaatcattttcaaacgggaaagctcttggtggtcacatgagagctcacactttgaaatttttccctggatcatcttcatcaactggctcgatcactccatcactacgatcatgcaacaaccttggagcaagctttagaagacctaatgaaacagttctggcgagatttgtccacaccagtgaagttgttggtggtccaaagccagatctaaacaaagaagctgagcaacgaacaactgtcaagaaaaagatcgtcgtggatttggaagaggaaaattcgatagagtctgaaagcgatataactattgaagaaagtgctttatgtcttttacaaatgaaggatgacaacatgtcagaatatcttcagaatctgaaatcgattgatagtttggtatcaactcgaaaaagaaaagatactgaaaactatatcgaaatagattctgatgaaaatcacgaagatagtgatgatgagtacgttgttgaagatgaagatgaagacaatgaagatgacgatgttaagtctctcacttcagatgtggaaaacctaataggagacagcgatgaagatgatgatgattatggtgatgaaaacgcatattacggtggaaaaaggaaaaggggtaagaaacaaagtaaatatacgtgtgatacttgtggaaaagttttacgttcgtatcaggcattaggtggtcatcgaacgagccacaaatacaagcgattgaagatttccgacaagaattatttcggggaagatgggccaatagttcgacgacaatacgagtgtcaaatttgtaacagaatgtttgcatctggtcaagcacttggtggtcacaaaaagattcactatatgttcctagctccagccaagtaacttgtcgatttccaccaagtgaccatagaatctatgaagcgtacctagatttgggtgactagttgagataaacaaataataaaaagaaacatgctttcttttctttctgttttccgactaataaaacatgttctatgtttttatgttgttaaccctttttaagtttattttcctacatcaataaaagttgttttaaattttactctgaaatatatttctccaatattttattcgtaaaaattaaactaaatttttttttatcaaaaataagttttgtttgactagctataggcaaagatatataatccaaatatgtcaactgattaaatattaacaatataataagaaacataaattcttaacatataaactttaatgtagatgcaaggaaaaatatctatatgtcaatgcatgttagttttttttttgttttatgcatgttagtttgctccaaaataggacaatgatatacagtataccacattggtgcaatcgatgcaaagaatacacatgctgatgatagggccaagataatggacgccaactctctttaaatataaatctcttactcttaagcccaaaaaatgtagttgcatgatcgatcttcctcaaagcaaaattcgaaacattccgatattcatataacgaaaagaaacaaaaatacactcatatcatatatactagtaacacccttaaaaaaaacctacaattacattaaaaactccaaatacaaaaaaaatatatatatataaacaatcacaccccaatcctttgacatttaacatcatgaccaacatcaacactacaaacatcttcgaaattgacatcattaacatcaccaacgacgatcacattatcccctactgtcttcctctttggctttgcctcttgaagaatcaacaacacatctctcatcggcggtctgtctgtcggactccggcttgtacacaacaacgcaattctcaacatttgtttcatctcttctcttataagactacacgacctacccatgcttttgtctagaacttcttctacatcttctttcgtcttcaactttgatctaacccaatccacgatactgttaccttctccaaattccggttccaccgatctttttccggtgattatctctaataaaatcactccatagctatagatatcactctttttatccacttgtaaagtgtaagcatattctgtaaccaaaacaaacaaaattaaaattttagtcatatttgtcagatgttgtcatcccaacaaaaagaatgtttaacaaacggacaaaattcgaataataaaaacaaagggacaaaaaagtacaaaatttaaaatttggggaaagtaaagaataatcaaaaaaagttaagggtacctggtgcaatgtaaccgtacgaaccggcgacgacggacatggattcgtcggtttgaataagcttcgcgacgccgaagtccgccacacgcgcctcgaaatcggcgtcgaggaggatattgctaggtttcaggtcacggtgtacaatcaccggatcacaatcatggtggagataacagatcccttgagccactccaatcgcgatctgatacaaagccgtccattccgccgccgcggtcatcgtcttatccccaccgtgaagaagatcgtct

SEQ ID NO: 942 - DNA, 69142 bp, Arabidopsis thaliana
aagcttccattaggcatgtattcgtataaaagcatcgtgcaatctcgattcgtgcaacatccaaggagacgaacgatgttccggtgacgtacgttccctagaacatcaacctccgccaatacgccgctcttccgccgccggattttgccgttctctttgttttttccccaaagttttttcacggcgattatttctccattaggcatctctgctttgtacactgttcctgttgatcccattccgaggatgttatcagtctttgagagacactcaaccacatcatccgccgtgaagtttagtctctgaaaagccgttagcttccacggtcctatatctccgccgtttcttccaccaccgtcgactctgtttccgtagcttttctggaagcatctagtggcggctacaaggacgaagaatccaaccccaatcgccgccgccaatatccaaacaatagctccggctgttttcttaggtcgttcctctttatgatgaccgtctatatctgcatttccggcgttaaacctatcagaattgcaaggttttccgacgagatctccacagagtccttcgtttgaggagaagaacgacggattcagatgagcgaaagaaccacttggaatcggaccgattagctgattatacgaaacgttgaaggttgtgatcgtcttagagcttccgaaatcggaagggattgttccggttaagagattatgagaaagatctacgtcggcgattgacggaagagttgaaatctcccatggaatgattccgttgagatgattttggctgagattcaaacagagaagcttctcgcaatgtccgatgtcccatggaatcgttccgttgagtgagtttccttgtagttcaatcctgtagaagcttttgcatccaacgtaatttgggatttcaccgatcaaattgctgaaactcgctgagaagatctgtagattcggagctttccatatgttttccggtagtttcctgtggaagaaattggttgagagattcaagtactgaagaacaggagcggtggcgaaatccgccggaatttgatcggtgaatctgttgttgcttaaatcaacgaaagtgaggttacgtagagagccgaatccgatcggaattgtgccgtttaatcgattgttttgactccgaaaccgccatagagattcgcaacgagtcaagctctttggtagctcaccttcaaacatgttggagaagaggatgagtttgtatagcttgtttccatggcagagagaagaagggattgttccggtgaatgaattgttagagacgtccattgtctcaagtttaccgtttgatccaagcttgtgtggcaaaactccggtgaagttattgttccatagaaacaatgtagtaagctcagggagttcaccgattccttcaggtacttcacctgagaggttattgctgattaagcttagccatgtgaggttcttcaaggtcgagaagcctgatgggatactaccagaaagctgattactcgaaaaatcgagaagcttgagggatttcaagttgctataactctctgggatttcaccggtgaaaccgttttggaatagaaataaagtctctaggtttgagagattcccgagttcttgaggcagagaaccagagaggctgcaattggaaacgtcaaagtacttgagatttgagagtaaggcaaactccgaaggtatgtttccgttgaagtgattataaccgatttccatgtgttggagctctgttaagagtcctaatctaggaggtagtttacctccgaggacatttccagctaaatgaataaacttcaatctctgtaaaccaccgtaagctgctggaatctctccttcaaagtaacttccaccaaagttaagctcttccaagaaacgaagacgagacacgtcactaggtaatagaccttcgaagttgttgctgaacgcattgaagacttttaagaacttaagcttggagattccgggaggaaaactcgagtcgaacgagttacggctgatgtcgagggtagtgagcttggtgagatcaaagatagaagttggaaacgaaccttccaaagaattcccactgagatttaagtagagtaagctcgacaagtaacgaatctgtataggaatacgaccagagaggttccggtgagagaggtcgagggaaatgacttgagccgttacattatcacagactacaccggaccaagaacaccaaacggcgtcgttttgaccgttaacggggactttccagtcttgaaaggcagagggagggccagagagagatgttttaagggaaaggagagacaagagttgaggtgaaaacttgagagctaaggaattgaaagcaaagaaaggaagtagaagaaggagaaggggatgaagaacaagagaaggagaaatgttcttctttttcatcgtagcttttagaaagaaattaaagtgaagttgtttgaggaagtgtggtgatattgttgagaaaggtgttagtgttgacaatggtggatttaagggtttgaagaagaagaagatggaagaagagaagagaagaagaagtcatgatgaaggtgatgattgtggagtgcgtctaatggtctggcttttgttggttaaggcattatggtttttgtgtggggaagaaaacaaaagcaaagagaaaaaaaaaactcaatccattttccactcttcttttacttttcttacttttttcaaattactgtacttcgtatactagtacttttttctgtttgttacctttattaattatgaaccaaaataaaacgtatatactataattgtagattttgtttttgttttgccatcatacaagtattgggtaaaatcagaaaccaaatcacacaatgccactcatattaaaaaccgattaattagatttgctagtatcttttctttgtcctttaatttcttctcctcattaaaattcttttttttccactatggtattctttttaaaaaaccttttgcatacaaattgaatgttcaatggaatgtatacgcatgcagatgtacaagtacatagatacacaataagcgaaagtggactgtatttatcccagtcactcacaggatccaataaagctaaaatcctctgtctctccactaactctcatgcccactacatatatgtgtgcgtatataagtttttacatatatatgaattacggtttttttttttcgaacaacaatctcgcgcctaaaagattcaagattttataacaaatttattacaccattctttttttatcctttcatcagaccattcatacgtatagatatatacgcgtgcatctctttattacttttagtgaaatgatattacattgggacttatttttcagttcgtttatatatatgccaagtaatacttacgatcactgaaaatctactattgtctaccaaccttagaaaaacttgattagattaggattggagttgagagttttatgattttaattttatcgtagtctaaaataaagttattttatacgatagactacaacattccatcctaagcattagcttaattctcagcatgattcaaatcgtagtgagataatttcaacattaaattctacgcttacatgataaatctttcaactattagactactataagaagaagaaaaaaaaaatcgtttttcttacattcttgatatttacgagtttatttactcgtgaattcataattatgaacatgaattatctcaatcacctggttctgctctactaaaaataatgtgtcgagctaggtctcttcattctttaatttacatgttaatcttgtatatacatcatcatattatgaacacaagttatattctcatatttttctatttactatttctattgattttcataaaatatctcaaacacatggtcccgtaatcccgttctactagaaatattttgtctcatttatttatttgatactactaggaaatccaagctatgccttttgcttatacgtattttttttggggtcacgatgtctatttcttatgatattttttcttttctttactaaaaacacagtaacacaatgaaaaaaataaattatcttttgtcaatgctatatatataaagttatagctgtagaaattgacttaagggcatataaggtttgtatcatgatggttgcttgccattatagattcacttttcatcattaaggttgggtgaattaaatatctcacatttattcgatgatccataaagttccaaaaaggaattcattatttcccaactaatcacctaaattatcgcttatgcatacatatcttaaagactccgtacgtacgtgagtgagcttaatgctatactatattttgaaatcacacacattcatttctattatatatcgttaattctttacccgttgcatcatagtttgcaactgcattggttcgaatataatcactttgtaagtgtggttaattagaagtccaaaatcaacttctttttctacgtgatgtagtggaagaaccgataatatctcaattagaacgattatacgttttacaaactcgtcctataaacgatcaacgatcctaaaaattttgggatgttttaaaaaacaacaagtagagtgcaataatgaaaagaaaatgtatagaggcatgcgtcgttacatttctcttttgttagtgttttttggccacgcgtgtctttttcgcaacaacagtatggtatgtttagccttttctcaaatgacggttttacccccaactgaatttctattacatgaaatgtgatcaagaaattatattttgcaatatatgtatgagtgtattagagatttagaatatttttttgttgatgtcataaacaaaaattctgacttaagagatttaaaaatattatacttcaaattgtaggtttctgactttagaatatctattattgaatgaacatccttcaatttttcatttttctgtgggttttgtatgaactgagttatacttaaagtagaattcctgttgttaaaaaaaaaaaaaagcaaaataaaatgtagaattcctcggtattcaaaatttgtaacagagcaataatactcaattttgcttgtatatgtaaaatacatgaatttagaggaaattgttaaatctggaagtacacgagacgtaaacaaaataaagtagaaaagaaaagtaaaataattataaaagtttctacaagagaatgatgaaagaattgaacattcttcaaaagtaaacaaagaggatgaaataaagagagaaagaaaccgattgatgggagtgaggccatttatataaacaaaatgttatttcaaatgtgactcatttttagatttatttttcttcttaaataccaccgtttattgtatttgacatttgttgtgacacttttggattttatatttttggcgaatgaaatgatttgtcatctaagtgatgataatctacagtccaatgagctaattattcaaataaacagttcaattcgtacaatacatgaccaccacaaattcaacatgcagcatctctaaacttacaacaattttccctcatgatctacgaaaaaaatttatagtaaatttatagtcttaggtccatttttttttttttttggaatttacattttctaaagaggaagtagaacatttttgctgagatggttgaaaagaatcaaatttcgtcaacctcatcatacttgaagacatttttttttctttgatttgacactaataaaacatattgctcagatgaagccaaattagatgtcagttttgtctatagtttaagtagtctgatcatccccactaaccaaatctctttttggtttgtatgaaaaaggtgtgttaaaattagtttctgttattggtgtaatttaaaacactcaaattagtttataaaccgaaaacacatacttgagcaaattttaattaacatggcccatgctttattttgtcttatgtgttgtgggcacatagatgctttagcttgaagttaattatgatcaaatttaaagtaacaataatgccttatcattaacctataaaattccataacattttcaaagctgttaagcagattagatgatagaatcaatgaaagaaccaaacaaaaattattatatcaaaacttgtaatcattttgttcatgaaaaattagatgttacactttttgtgtgtaatagatgagtattcattcattcccatgggatcctaaatcaacaatactaatcatcattttctcatttcaaaatcttgtcctttcctttatctatatttcccatttgaaaataaaataaagttatgattgcatgtgggattaaaacgggggaaaattggaggacagcccatatactatttaccccttttttatacatatatataaatcttttctataatcacagtcgatttttattcttgatatattttatgtctataaacgttatatatattgaatgggtcttaaaccaattaatctgaataatctggtacaagatgacagtatgttagtgttttgctttgtcatagctgattgttggatgactgctgaaatgttgaatcctcatttagaaagaaacaaaatcaatattgaatagcccacttgaaccttattctagcaaaggaagtttcccaatgctggaaaaagtgaatgttggagatctgttacctccaatccaagtctttttaatcatgaatgtatatatccggtttgctatatcagtcaactttcccgaaacaaccagggccttaaaccggatttttgattcttcattggtgcatgatcttggaaatcattttagatggtagattgatagaaaaagaagaccatgctggaaagagtgaatgttgaatatctgtacttcaagtctttaaccatgtatactcagtttggtatattagtcaaccggaaacaaccggaagccataaaccggattcttgattatcggattcaaaaacaaaactaaaaaggcttgagaaagcaattcaaagtattttaccatcagaactagtgggctttggaactgctaagattcaagcttattggcaaattggaatgggctttaaatgtacaatgggtttgttgatttccaattgcataagtagacggctgatttagaaaaacgtaaaagtatgaggtctaaaagaagaaataacgtaaaataagaaatagaaaaacgtaactaaagcaccgtttccttcttccacagcaagaaaagttcaaccaaatgggaatcagaatcggcgacggtgacggcgacaaatacggcggcacagaggagctagaacttttcggaaaatctgatactgttacagtaaacagtataccgcatatgtctccgtcagtttcttcgtcatccgcatccgcgaagatgagttatggattcaacgaggaagagtttgaatgggtggctgtagataaagagattgatcttgttacggataaagctccggaacttgacgaagttgatgatgctttctctgcacttcaattgtgagttttccaaagtcggtttttagtgagaatttgagtaaggtttttgtattgaaagaagttatcgttatcgtttaggatgttcaatgatgatgatgacgaagaatcaggagaccaactttcagagtcagagtttgtggattggattgagccttcgttgcagctttgcaatactagccttctacagccttttatgctggacagactctatgacgcctttcatgtgtttcagaccgacccatctgttcaggttctctcttttctcgcagtcttgagatccatggtttgagaaacaaataactgagactctgagacatacattggtgtctaatgttgcagagaatggttatgtcattgacttcagacaaggctgtttgggatgcggtgatgaacaatgaggttgtccgggagcttataagcaacggtaagaatataagatacaatgggctatggttctaaacgatgattatgtaagagttttacttgttgtataatgcagctgagaggtcagaagaagactctggttcagccgcaaatttcttaagaaggttgtttgagagaagtgccgtcaaaatcatggacgcaatggagagagtcacaaagtatgtcactgaccttttcaacgttgttcctggagatgagacggttgtgttagcctcaggtgctgcgcctaagatggagaagcttcaaatgacggttctgctcgccattgttgtcctgcttatcgtgttagttacacgagtaacaaggtgtagatagtatactacacccagccaaactatgatctcacatttcagggtctgctgtacaattgtaattgcgacctttggctaaaatcgcagcaggaaaactgtaatacttgtgcttactcttgtttaataagaatatagtgatttgtcattttaaatattaagcccaacttctccaaagcaagagtgtattaaacacactaaatcacattctgttttttgaaccacaccgaatcagttttgatcaaatacccgttttcagagttttgtcacaaattactattcatcagcgtaaactttagataaacgagtgattaaaccacaacaccttaaagtttatcttggagagaaatgaaagtgaggactctgttttatgtacagtgcagagccatccagccatccatgagaccatacttgtttcccggattcacgagcacatacttgtttaaatctggtaaaacacaaaaagcaaaagtgtgtccaagtttaagataaaagctttaccaattaattgtgtatatgaagataatagacagtgagaaggggatctcacctgatattaggtgcttgagctaccgagatcaaagtccattgtgtaatcgtactcaattgttggaataactgatgccatgaacttcaagaacaggaagaggtacctggcaaaatagcaacggtgtaaccagcaagcccaatgaactataagcgttatttgcaattaaaacacatacttgtcgacttcaggttctactccacgcgacattaatacatcaatgattttcttcataacagctccatgccgacatggatgaactgaagcatgtttaccaggcaagtgtggatgatcttcgattgtgacctgtgcatttttgaaagacgatcacaaaaatactctacattggtcagattcagaagacataagtcaggaaaactttggtggaataacaaaaagggtaattgatgcagttgagattgtcttccttttaccgttttacgagcatggtcttggctaacatcctccattacaagttcaggttgcagcagcatccttgactacaagatacatcgtagcttttaagtagataacaggaaatataaacaagcaacaaaacaaaacccatgaattttaatgaaaaacaaaacgaaacaagacataagtcaggaaagacgatcacaaaaatactctacattggtcagattcagaagacataagtcaggaaaactttggtggtcagattcagaaactttggtcagattcagacgatcacaaaaatactctacaagatacatcgtagcttttaagtagataacaggaaatataaacaagcaacaaaacaaaacccatgaattttaatgaaaaacaaaacgaaacaagtatgaaagagatgcaaacctcatcataaccggtcagccaaacacgaggagtttggtaatacttatcatacctgaaccaaagtgagaattataagtttgcttactactggaccaaatgtaagaaagctatatctaaaagtcaaaacgcagtactacactttgaagaaacccgggatgcttacgttatgctgagatcatatgtccgagttcggagaatgttatcgtcatcaggttcatgagccacaagataagttgactgaagagttgcctgagtcaagcatgtaaaaagtttaaaactactggtagaaccaaaaattgggaaaatggaaatatgctttaaaggcaaaatacacacacagccaaatcataactgatgtgataaacccaagatcatatcaataaccctttacaaactttgcaatttcctagaaacttgcaaattcatgtgcataattcagaagtatttttcaaagagaaatgacaaaaagctgagtgcaactgcaaagacaaatgggatagtgagagagagtaaagaaaataaaactcaccggatcattttctaccacattgtcagcctcatcgaactcctccatgtctggaatatcatcatcctcctcacctccaaaatacgtaggtattgattggatagtatttttctcgtttatatccaaggcatccatggatggtaagttatcctcttccttgcctttatctatggccaaaaatcaagacacaagttgaataagagataagtgaatttcagaggcacaaatctctaaatacaaaatgtacctttcggtttcccatgtgtagccagccaaccatcattatcttcatcatcaaccaacacttcacctccagcagcttcataatcctctgccacagaagcagctctccgtagacaaggtactgtcaacccgtaaaaagtccacaacataatgtgcaatcagaactacaaagccaacagaaataagctttaaagatttcaaatttaccatttctagtaatcaaaaactgtttgtccgagggcaagtatggcttccttttgcttgcgtcaccagattccctaatcaaaagtaaaagccattgtgtcaagcttacccattcaagcaaagatatagatatcgccaattagcttgaactagcagtcatatactaaagcgtgaaaactaatatgttatagacatatagtattgagcagcaagataccaaagatcacacttgttggtctactcaactaatcgaatatcataaaagttattaagatcaaacttgttggtccattcaaggaagttgtgaccttaatgccaccagaaaagtaacaatttgattgatcccatcacaatctcacataatttgtataaaagtcaataactttcgccaacagagagagacccattcacccataatcatcaaggatcaatttcacatatcatagatcacaaaattcacaaacacaaaattgtacaattggccattgctgtgtattcaaactccaataaaaactcaaaattcaaactaaccaagaccaggtgggacacttggagacgagattatctccggcaagtacgaactcgctgacgctgagaactcccttctccttgaacgccgagatcgtacgaggacctgtgatcctctcaactgttcctttaaatgcttcatgaagcttttgcgaaagcaccatcttttgagctaggcgacgaattaggatctaatcagtggtttctatatcgaggaagaatttatcgtatcgaagaatcagagatttgagattgtgagccctaatccctagggagaaaattatcttatagattccgtcaaattttaggaagatgatttggctctttgtaatattttaagaaaaatctccaatagtactcatacttctgtatatttacgtttttaccccatctattttagatgtttcattaacgggtcccgtttccttgtattctcaaattgtcattcaggtccaaaaggtacatttaatattctttccatcacaaaggaatctcattgcccttattgaaagatactaacatcattgtatatgttttcatggcaagagcacaacggagccagaggtgatcctattctcaagatctgcgtgggcgtcagcgactcgagacaacgggtacttgtgattcacacgagcctttaagatgccggaggtaacattagcgaaaacctctcctgcacattccaagagctcatctcgagtttcattgtaatgcatcatggaaggtcttgtcaagaagagcgactttggagcaagatcagataatggaatcggatctggagatcctgaggattgtccaaagctcaccatgtatcctcggctcttcaaacatgctaacgatccctggaaatttataaaaaattcattataagaaatccgaaaaaccagctaaagaacataaacagtctggctctttgtgacaataccttaaaggtgtcttttcccacagagtcataaacaacatttactcctttacccgatgtaatgtcattgactcgggaaacaaaatcctcgttcttgtacataataacatggtggcatccatcttctttggcttgagccgctttctcattggtcgagacagttccaatcacagtggctccaagcgcatttgcccattgacacaacagagacccaactccaccagctgcagcatgaacaaggattgtgtgcccaggttcgacctttccaaatacaaataggacttgagtcatatagtgaatagatctttgaaaaacgcgaccaatataacaaaactctactctgttcaacaggcaagaagacacaaatcctgctcttggtcttcttattaataacttcctagaaataggaatgaaaactaaccttgaagcaacggcgaaggagaaactgtgcagtcatacccttgagcatgattgatgctgcaacgataggatcaatagatgaaggaacaggaaccactttatccgctggaaggatttgttcctcagcatacgcacccatcggatttccagcataagcaacgagatcaccgatcattctgccagtcaatcccgacccaacagctaccacctctccaacagcctccatacctatgatcagaaatggaccattagttcagaaaagaaaaaaaaatcttttccgttctctcattaggttctagtaatgtccatacctggtgtgaagggcatagaagctggcttgtaaacacctttcctgaagtaaacatcaataaagttaagcccgatagccttgttcttcacacgtatctcaccctcctttggttcccctacttccacatcttcccatttcagaaccttccaattaaataaacaaaaccgctataaatactgaaaaacactgatcaaacagaatgcgagaaactatcacaagtctctaaatcaaagatatcaaagtaaccaaagctacgtttgaaatacacatcagtgattctgtatataaccatcaatttcgactcaagctcaaatccaaaacctttcacctggaaaactagccattgaaaaaagctgaagcttatagggaatctcaaatcatttgaactataatcacacgagcacatagaaacagacacaatcgcaatctaatttgatttcaatgatccaaatccgacccggaacttcaaaatcgaatcttttactcacctcaggaccgccatgctcataaaccctaatccctttcaccatcttcttctcggacgactcttctaccgcgactgtactcagagctcttacagcaaacacagtgccacgtgtagataaagaaaaactcgagaaatcggcaagacttagacgaaagttgagatctttgacgggatttcgtggaaagctcgagaatattcggtgatatagacgacgtgacagatgtccagacgcttgaagacacgagtgatgacgatgatgatgatgatgatgaagagtcaatgctgccattttcttatggcccccatttcttctctgcctcctaactttattttctatttcccatctttgtcctttaacgttcaatatattacattatcactatcctagttttactatatttataaaacacccctaattttaattccaaacacaaatcgttatttcacaaacatataagtgaaaaaatgaaactatggctaaatttacaaaataatttgaacaataatcgaatcttggatcatgtgatttgattattgttacgtgaatagtaaaaaaatatccttaatttagtttgaactttgaaaattttaaaacttatatgcaataatttttttggcaacaaaagatgcgtctcatctcaaatcatgaggtgctggtttttttattgttttcaatggctaagaatggtggtttcttggatatcacgcttgctcgtcattctcctccaaaaccaatgcttctcccaaagtccaaccaccttctcgattggaacattcttagtctccggcaaaaacagctgcaccgctaccgtcattaccaccaaccaccctccataaaagaagaaaatcccagctcgaaacttacacaacatcggtggtgcactttgagccaccgcaaaagtaaacacaaaactcactgccacagttacactctgcgccaccgatcttatctccaacggaaaaatctcactcggtacaagccatcctaatggaccccaagaccaaccaaacccggccacgtagacacacaccaaaaccacaaccgcgtaaccatacccttccttgatcacaccgtcgtgaacatcagccaccataacgatcacaccaatggtaacttgcgacacgagcatctgtaaccctccaatcaaaaacagagtctttctaccgattctgtcaacgacaagcatcgacaacaacgtcgacgaggttcccacgattccagtcacgagggtcgacatcaacgaaccactctctccaaacccaacggttctatacaaaaccggtgcgtagaaagcaacaacattgattccagtaacttgctgaaagaaaggtatcaccaaagccatcactaactcaggcctatattttctttgaagcagtttcaaaaacgcgtttgaatctgtatcagaaccagaactcgcttcaacgagatcagtaagctcatcttgaacgtcgttagttccacggacacggcgaagcataagctcggtcttgtgaacatctccggtggtctggatgatactattcggcgtttccgggagaaacagtgatcctaaagtgaggattgaagcaggtattgcagctgtggctaaagagattctccaaccatgtttgatattttgggtttcgtagtttattacatttgcagatagaaatccaattccgatacagagctggaaaccattgctgattgctcctctgtattttgccggcgccatctcggagagatacagaggaaccgactaaaatataaaacaacaaaccagtcaacatacagagaaaattgaaacatcattaatcaacttgtcttttgttacctggttagcgaatccaactcctacgccgagcaagagacgcgcaataatgagcatagcaacgttttgagcagagccaccaagagcagcgccggcgagaaaggacacaccgccaagaaatatagagggcttgcgaccccatgaacgagtcacggacgaagctaacagagtagcgatgagaccggaaacgtatagagaagatgtgaaggatgtaagaagttggctattgaaaaggcagtagtggttattgctattgcctcttcttcttctatcttcttcttggagcttatacacttttgggaaaaatctttttagaaatggccccattgacatcactccacctacatatttatatagttacatgtttgcatttatgtttaggtttagagaaccacaacatttcatttaaatattatgaaaaactaaaatgttttctacttcaaaaatatgatttattctttttgcaaacgcaaacacaaacacaaacaaaaaaaagaaagaacatatatatcctaattagcaagaatatatatgtgaacctgaaaccccgatgtcgtagccgaagatgacaccgcccatggcggccatgacacatgaagccaccacaaaataagtaatcttcccgccagatactgatttagccatggcttcttttcttgcttcttctgctaccatgtttacctagagagacactcaaacacaacacacctactattcaagttcggtaggtgtttttagatcctgtatttttgtatatcaatcatccaaaggttgagtttcaaggtagacgacgaaacttgttggaccattggagtgctttaattgacttgagtgtgggacttatagtttttgtttgtttcggttctggctgatgagatatcgaaagtggacaataaaagacatgtgaagaaagacttttcactgcctaccttcattatcttcctcttttttttttttttttttttttttttttttttttttttttttttttgaaaatcgatagaagaaaaagatggctatacttttttcaacgactgaatgataaagctctttcgatgatattggacataccaagttgcaaactttgattgtttaattccataatactgatattttgttttggaatttgactatgtagaaaaaccatcattttctatatataaatactgatatacatgtggaattaagttggcagaataattactatcaatcatgtaaatttatggaatcatttttacattcactttttataattataattttatagtaaattttattttttgcttttaattttatagtaaaataattttactctatggtcaaaaaacttaaaacattaaggggatgataagctgtgaaattagaagcttaggtcacaaatgagatactaaaagaagatgaaggaccatttttgtgaagagaaaaacttattacacgtggcaccaacagaatatttattaccgtcacagtccgtgacggagagaatatctgtgatttgcaaagggaagaagactttcctattcaaaattcaaagccgactttttttttacctaaacagcaataatatctttttttctctgctccagggggaaattaaaaaagtggaaccttttcatctcctggagcgatcaatttctttttcatcatatcgctgactctcgtcttcgtcgtctttgatcgtatcgaggaattgggtttagttcgattcgatcatcagctatctcaatttttctggggattgttctaaaggtttgatgatcggattgcttttgttctatttgttctttttgattctcgtatatgattgattagagaatataggattagggtttgtgttccttaaaagttatctccttttggcagttaaagacttggtttttattctttgtcaagaaattcattccatggttgacgatgaagtcaaggttttggttttcttttgtgtttcttctgtatcaattgtatatgattagattgaagatgatttcatgtgatgaagttgattacaacggataataccgcttgtgaggttgtatcataatttgctaagaataagtatatatcttcccatttgtttcttgatgcaaacaggtttctagtgacttgtttaaagtggttggtattggataatgccttctctcatctcacagcaatggcaggagaggactagtggattcttttcttcatcaggtttgataatttctatgctaacctcatttcgtttctctctgtgagtgtttatggtggaaagcttactatggagttactgaattaggaacgaagcttagggaagcagggcagactgctggtagttttgtcggggaagttgctaaggatgcgaaagtgaatgttgcagatgttgcagaaagagttgggtcgttgtttaaaagccggtgggcaattcttcagcagcctgcaactagacatgccgtgcaagaacacctcataacagctgctgccacaaccgggacttttgtcaggaagggtataactgagacaaaggaaaaggtttctgttggaaagatcaaagtggaagaggtattctagacacatagcttctcgaagttactcgacaagaatgtatgtatctcgtttcattcttctaacttctgacagctaaattctttgtatccatgttttctctttaggcggccaaaaagactgcacaaaagagcaagaccattttgacggatatcgaaaggtggcaaaaggtatttgactattagagtctgaaatctgattgtatgccgttgatttgagtttggtctctaatatctattctttgtaattctgcagggagttgccagctcagatggtaagttgatcgcaatatatggagagattacagtttaaacgtttgttaatcgaaaattcaatggattctttgatgtggggatacttaattatattaccgttcttgagataactattagtgattgcgtgtctgaaatgctgtgactttctctgtatgacaaatgtttttggcactcagtgtttggtgttgcgattgagatcactgtccagcggcaggagtcaagcaggcctattcctctgatactagttaaatgcgcagattatctcatattaacaggtaataatgtttggaccaatggagcaataacacttttattgctcacaccttctcatatcgagttatcaatgtgatattttcctcttacccaggacttaattcaccgaacttgttcaaggccgaaggagatagaaagttgattcaacaattggtttctgcttacaatcaaggtagcaagatttcttttcgactcttatggctcatggagaaattgtcatttaattgaatcacttgtttggcagatcctagggcgtcaatacctgagggtgtgaatccagttgatgtcgctgcactcttgaaatactatcttgctagccttccgacaccactaactacttttgagctttataatgaaatcaaagatgcacggtcgagcatacacagaatgagacagtcactccagaagctttccaatgtgaattataatacattggagttcataacagcgctattgcttcgtgtgagccagaaatcacttcttaacaaagtgggaataagttgttataacactaatctctgattctagatacttaagatgatccttttttcaggaatcatataagttatctgaatattgggaatcatttgtttgcattttgcagatggattcgcatagcctagctatggaaatggctccagtgatcatgtggcgagaagacaacaggcctgaatcttatcgggaatactggagacgcccgtcaaggagtcctaagaaaagtaacgactttgaaactgctactccatgggacttgctctcaggtaaacacaaaaacacttggctcctatactctttgaagcacagtttcattacgatcattcttctctttcatggttaatggttataaacagatgaaggagaaggtccagatgcatcctcatcaatccctctagatgatatcgcacgagttgattttggagcggtcgaggttgtccagtgcctaattgaacaccacaatgcgattttcactgatgcagccgagactgtatggaggtgaaaccaccacagttaaccaatattgatctggttacaagaacatatgcattttgatctggatgatgattgactagtggtttcagtaaataagatgttgtttcatatttggttcttctgtaacaatttttagactttagaactctgatgattaaaagataagtttttcttataagaaaatcaagaattcggattgtttcccaatcatataaagcaacaaccggatgtgaccgcaattcgttaaaactcttatccaatcgggttatcgaaatcgaaatgaaaccaaaccgatttaaccgaaccgtattgactcatgagcagaccaattgaccttagagtcaaacagagcaaagcagagcagagcacagacatacaaatttccatttttgtagcttcttcgagctcacagccatggcgagaagcgatgttttgatttttgtttctactcttcttctgtttctgtctctgcttacggtaagcgctcgaaatagttctatcttttttctctgaaagtctcaagtcgaatggaactgggaaataaaaatcggatctttaatcattttaagtgacaccagattaaaagcgttttgggtttctacttcttggtcgagatctctctctgattttcgagattgggacaccagattttgccaaatttgagtgcttttcatattttggatatatattgcttgtagagattgaatccttagatgttggttggagttggatatactttaatgaactaacttttgggtactgatttatgtatttctatgctcaaatgccaaatcatctaaattcgtatttaaacctgcttagggacttgacaattctcatagcacaaactgttttttttatgaatgtgggttggtttcaggtagctgatgcggaattggtgaaatctgacaagtttccggtagtggtgagtacttggcctttccttgaagctgttagagctgcttggagagcagttgataatgggagctctgcagtggaagctgttgttgaaggttgttctgcttgtgaagaacttcgttgtgacggtacaggtcggctttttggtccgataatttgaatttacttctttaatgttactacttctgaaagtgagagttttctttgttggtattgatagttgggcctggaggaagtccggatgagaatggtgagaccatgattgatgctttagtcatggatggggtaacaaatcatcagtaccctccgttttataaagccccatttgcattaagatcttgaagaatgactcttcatttgggttattctaaggacattcttaggtgactatggaggttggagctgttgctgcaatgcggtatgttaaagacggtataagagctgcacatctagtgatgaaatactctcaacacacgttgcttgccggagaaggagcatcagcatttgcaatctccatgggtctccccggacccatgaacctaagctcccctgaatctgtaaagaagtggtcggactggaaagagaatcagtgtcaacccaatttcaggaagaatgtagtccccgcaaatgactgtggaccttacaagccaaacaatagtgctatgaatgtttttgtagacaaaagcactgaatcttgcgagatgggggcgattgagtataaacctcctcttgttggtcctcacaatcacgatacgatatcgatggctgtcattgacagagtaagatgggtttagttatattctctatacatttttgttgcaaggacgagagaaactgagtgtgctctttcaatagatggggcatatagctgttgggacatcgaccaatggagccacatataaaattcctggaaggtaatgccattaaaaccgagcattatctctgacctaaaccgaacctatctatctcacatgcctcctgaatcctgattgttcaaaatgtgcaaggaatatgctcaaaatggatttccatgtgttatcaatatagattacttaatccatatttcatgtaaagatttaaaaaactttcaaaccttgattgttaaaaacagggttggtgatgggcctatcgtcggttcatcagcctacgctgatgatgaagtaggtggatgtggtgcaactggagatggtgacaccatgatgcgcttcctcccttggtaattacccaatctccttgaacaattttgtgttttgtttctatctcaatgcattctaccgacctagacaggtctttctcagtggtcaccaatgaatcttgccttatttttgcggcgctaaaattgaatattgagcatgtaaaagtgaaagggttattatgttttatcatgtgttaaagcaaacttcttcttcttggttggggttttagttaccaagttgtggagagcatgagacaaggaatgaaaccagaagaagctgctaaagatgcaatctcgagaatcgcaaggaagtttccagatttcgtgggagcagttgtggctgttgacaagaacggatctcacgcaggagcttgctatggctggacgtttcagtactcagtccaaaaccctgacatgaacgatgttcaagtctttacagttcttccatgaaacaggtaaattatatctactattagtcctatagaattagtaatttattttgttggcatcaaatatagactacttatgtacttatcttatcaagttaaatctcttgaaatttggttataggatcataggattgaaggtgtctaaaagtgattgtagtaacaacaatgaaacggcaagaagttcatgtctggaaatacggaatggcaagctcgtttggagtattctaaaatattgttttgcttttataaaaaaaaaggattttcggatttgtctgaattgatcagacaaagagactagatgatttttttttttttctgtaaacatgaacatagttgactttctgtaattttagtgattgagaatataacagtttttttgtgaaaacacgagcacataaaattaggagaattccttggtatatcctcgacgactctatatctagctatttaattattaaagaatgataggaaaaatataatatacaaagttatataacttttgtttctattattataaagtttagtaagaaaattgtataaaagagaagacgtgacaaaaacgaggagcaagtcatgcagccaactaaatcctaagtttagacataatttcaagcttcatcctaaatatgtaatcatatgctaacagtgaatcaaagcgaaaacaattctcaagcctttattgaatatttatttgtttgacttcgttttttaaagcgaaaactgcaacctgagggatatacctacgtagatcctaaagaaataaaacagagaaagtctgtattattgtttcaatgtatgaagaaaaagtattaaaattttatcaaagaaaagaaaaaaataaaatgatttagtgagctgactatgtatataatgaggttgtggcggcaacaacgtgcttgcttgtgtcctaatccttctctctccgtcaataatttcatctcaagaaaatgtcctaagatcaccaaaccaaaccaaacttagggttcttctttgttctctgcttcaacagaactacagggtaagctctgttatgtctgaagctccattagtctgttatatttacatctaaattcttctcaattagccctcaaaaactccatctcagactcttatttctgcaaattttacatttccatcttcttgcaggagtttgaaactctgtttttaagtttcagattaaacaatggaagagaaaaaagtagtaagagcgttaagcgaacacctatcactacctcctccaccatctccttctgtagcggtagccatcaacgggaagaagaagagcaaatacgtcgttttttgggctcttgagaagtttatacctgaaggtttcactgatttcaaattgctctatgttcgtcctcctgtctcttacatccctaccccaagtaagttgtgacttaaaaagattcataatcttataatttatgcaaaagatctaggttttgggtacaaagatcgagttttattttgggtacggttcgatttcagtggggattgcggtagcggtatcagagcttagagaggatgtagtatcagcttacaaacaagaactggattggagcgcaaacgagatgcttcgtccttacaagaaaatgtttgaaaggagaaaggttctatctctagaactaaatcttaatctctctttgttttttttgttctgttttcccaaattctgaaaatgtaccatattgaaccaaaacaaaggtgcaagtagaggttttgttgctggattcacttgagcctgcagccgcgatagcggaagagattgctggaactggagtcacaaaactggtaataggaatgtctctccgcggattcttttcaagaaagatcgatatgtcttctttgatcgcaacagctgttccgagattctgcactgtctatgtgatctcgaaggggaaactagcttccgtgcgtccttctgagtcagacgctagcggaagcataagattcgagagaagcagttccacaagtggctccactgatagtcctagactccctcctggtaaaatttaacatcaagtaaactgaatttgagtcttttacatgtcggttttctgacttgcaaaacttgaaaaacagagtaccaagactttctctccgctgtttcggaagcacaatcccgagtctctcctttttctcctgctctgaaacattcgatgggaagcaacgcagtggctcagatggatacgagttcgagcgggacggaccaagaggaagtatctacggggagagggatggagattgtccatagcggtattgaaggaaagaagaataaggatgagagctttagcgcttcgttcccaatgggtacagaggcttacaactcgatgagctggacgtctaaatggagagatcacgaggataggagagagatgaggagctcttcttcgagtaacaaccacgatctagtcaatatggactggggtgccgtggttcctgagaactattcttgggtttctcatactgcctctcacatgtctgatggactcctcagtgtccattctattaccgataatcaggtatcattcttgattatttgtcattgatgctgtcttatgcagagaaaacagaacggctttgttcatttctctgtcttatccatatgctttggttcgaagctgaaattggatctaattgtgtaggtgaatctgaactttgagatagagaaactgagagcggagctgaagcatgttcaggagatgtatgccatggctcaaaccgagactgttggtgcttcaaaaaaggtttaataaaggtcttgaaccacatagaccgtggcgtttttatttttgttaacatttgtttgttcttgcttttgttttttgttgcagctgactgagctaaaccagaggcggttcgaggaatccgagaagcttgtggaactgaaggaaaaagaagaagtagcaaaagatacagcttcaaaggagaagcaaaggtacgaagaggcgatgaaggaagcagagaaggttaaagaactcatgatgaaagaggctttacatagaagagaagctgagttcaaagcagagcgcgatgctagagagaaagataagctccaggcttctctcgtctctcccggggtccaataccaacattatacctgggaggaaatcgcagccgcaacttctgacttcgcagaaaatctcaagattggaatcggagcctatggatcagtctacaaatgtaatctacatcacacgaccggtgctgtcaaggtccttcacgctggagaaactcagctctcgaaacagtttgatcaagaggttagaatatccctaccaaacccagcaaaaaatttgccattctgagagttttcagttacttcaagttaatttcgcaattagagttcaaatggttttattttatctctgttttaacagcttgagatcttaagcaaaattcgacatcctcacttagtcctcctactaggggcgtgtcccgaacgcggctgccttgtctacgagtacatggacaacggaagcttagatgaccggttgatgctagtcaacgacacaccaccgatcccttggtttgagcgtttcaggatcgctttagaagtcgcttcagcgcttgtattcctccacaaatccaagcctagaccaatcattcaccgtgacctcaaaccaggaaacatcttgcttgaccacaacttcgtcagcaaactcggcgatgttggtctctcaacaatggttaaccaagacgatgtttcatctagaactatcttcaagcaaaccagtcccgtgggcacgctctgttacattgaccctgagtatcagcgaaccgggattatctcacctaaatcggatgtgtactccctcggagttgtgattctgcagctaataaccgcgaaacccgccatagcgattactcatatggtggaagaagctatcggagacgatgctgaatttatggcaatcttggataagaaagctgggtcttggcccatcagtgatactcgtgagttagccgctttgggactgtgttgtacagaaatgagacgcagagacagaccggatcttaaagatcaaatcatcccggctttggaacggctcaggaaagtcgccgacaaagctcaaaacttgctttcgagaactccgtctggtcctccatctcatttcatttgcccacttttgaaggttcaaaataagccctaaaaccatgattacttgttacacaagaaaccttgtttcctcattgattttaacctaattatatttggtgttggcaacagggagtaatgaacgagccgtgcgtggctgcggatgggtacacgtacgatcgggaagctatagaggaatggctgagacagaaagatacatcaccggtgacgaatcttccattgcctaacaagaaccttattgctaattacactctttactcagcaatcatggagtggaaatctaataaacggtagagagaaacagattccagaaaaattacaatcggttctatcaatgtgtttactctaatatgttttttttttgtgtgtttttctctgttccgaggattcctcatttgtctgatgacatgcacaattacaacaatatatatagagagaaatgtctttcgatataagtttattttgtttctattggtaaaaatgtaactttagtttgaacttccccaaagaaaaattcttggcttatcatccaatccagtaattgatttgtcattctatatagtccaaatataattattaatctctagaatgaatgtagattttggaccatccattagataaaatccttacctattgtcaatttgtcatgtctcaaacacgtccacaagttaaggccaataagttccacatacaaatcaatgataaagttaatactgtacttatcaaaggcataatttgtgtgttttcttctcaataacatccgcatctcagagataactatcacctgttattttgtccaaacattaaatgacctctactctcaacccatttaatgcacataataaatgctaaaaagtacacctgtgtgatccaataaattaataatatttctctgtttcataatactagtatttcataactttaaagaaatttacataagttaatacaagtatgaacaatgaagtatgtcaatgttaaaacagtgaacatatccatccgtacttgttgagttacaaaagcttgatgcttaaagtaccacaaggtcaaggtttaatttgtcttgtctagttgtctatagagcttcgagtattgttgttgcggagagatccaagctgaaagtgaccgggaggtgccgatgtagagaggtctaaaatagaagctttcatatcgatagtttcttccacttatcgaaaagagaaatcctctcctgtaaatcgaaaagaatctttagagttgactaaacttttgtttactttacctattcacataacttgaaatttattagtcaaaagtttagaagaaaaaacaaaaaaattcgcaaaagaaaaacacgataatatagctgaacaagaaaatcaaaaacaaaattgtattttggcagaaaatgaaacctatattcattcataagggaagggaaacagcccaaaaattgaaaagtcaacaaaattgaataaagaacaagttggtagtccgacaaaagcccagttgttctgactttcaacgtcatcaaaactaaggaaactaccggaaaagacatcacatattcacacgaactcttctagacttttttgacattttcatttctctcatcgttttcttttttatcattacttctttgaatctttggttataaccattaaagaattcaactggtatgcgcataaatttccgcataactccattaatataatcaggagaccaattcactggactcaaatttgattcgtcttcttcttctctctctctctccatttgtcaagaagctgttgaatcatcgtcccccacgagttttggaaaaagcttgcaagtcaaatatcaataggtactctatcttcaactctgatgattgatcatagccgttcaattggctaacaagatcttttatcttttgagtattttgttatctaaattataatattatccattaaggtttcaacttgttttgttttgttttgcccagaaaatgtctctgtaacttacatttaattaaacttaaaaaccagaccaattcatgactctctctctcttcttctctctgttttgtctctttaagcacgactagagattaaggaaacaaaagcttgaacctttgtagtcaaaatcatcaggtatatatatcttcaaaaatctctctatagtttcaacaaaaccctgatgatgataaagaagaatgatgatgataatcagatcttagccgttggaaatccagagatgggagacggagctttaatcgtagcggtggctatcaaagggaacaatagcaaaaccaaaggcgttgttcgatgggcacttcaagaatttgcttctcaagaacatgtcgtcttcaagctcttacatgtccaaccaagtaagttccttatattctctaaacttctacaaaagtaacagactttaagtcaaatttagatctgatattgttgagttaaaaacaggagattcgaattcggtttcaactacaagaaaagatttgaccacaagtgtttacaaaaaagatgttgatagaaaaaccagagagatgcttcttccaagcagagacatgtttgttcatagagaggtatattcgtaacttctctcacagatttgatctgttattttagtatgaatctaaaatcttgtgaaatgtgaataggttcaattggatataatggtgcttgaatcagacgatatagctgatgcaatctctaaagcagttcaagatcatggaattagtgagctagtcattggagcttcctcttcaatcatcttctcatggtaacatttaaaacacaatctcttagctttagatttccatcagattgtttaatctttttccttttgtaggaagttgaagagaagcaacttgtcttcaagaattgcagatgctacaccaagattttgctcagttcatgttatctctaaaggaaagcttctcaatgttcgtaaatccgatatggacaccgaaacgagcattgcagacgatagaagcgaaagccggttctcttcagatagccattcaggtaaaaacttactctgcagtacacaaagtaaaaccggttccaccagtttgatttgttacacattttaggaacagtaagttcgacatcgagtcatcaattctcatcaacacctttactcttccaacgaatccaagccctaacaaccgtgaaccagaaggttggaacaaacattggaaaacagaacaatgaaccgcatcatcatcatcataacagagctgggtctctagacgtggatgaatcaaagttactgaaccagaagggcttttatcgaacaagcagctccggaatcgggtatggaggaagtgatatcagtagctggagaagctctcagatggaagaggcttcaagctcaagtacctacagtgaccctacttcatctagtagccaggtttattttccttctcaaaaccagttgataatgagtgaagttacacattctgttttactaatgtgggattcataacaagcagatacataaagactttgagttagagaagctgaagattgaactccgtcacattaaaggaatgtatgcagttgctcaaagcgaagtcatcgatgcttctaaaaaggtttatttttgttacaataatttagaaagttgctttatttagatattgggaatgatttgtatcctctgttttctttttattagatgcaagatctgaaccagcggcgatcagaggaagctacaaggctcaagaacttaacgataagagaagaagaagcggatgaagtggtggaaatggagagggagagacaagaggatgcggaaaacgaagctgagctcgtgagagaatgcattgagagagaaaccgaagagagacttgaggcggaagcaagagcggaagaggttagaaaagagaagcagaggttagaggatgcacttgaaggtggaccgcttcaacgccaacaatacatgaaatttgagtgggaagagatcgtcgaggcgacgtcatctttctcggatgaacttaagatcggagtcggtggttacggaagcgtatataggtgtaacttgcatcacacgacagtagctgtcaaggttcttcattcagacaaaagtagtttaaccaaacagtttcaccaagaggtaaataaacattcttcacttcttaaacctccaagcaaaattactgttctcctaaaacgatggcgttctctttgatacttgttcagcttgagattcttagcaagattcgtcatccacacttgcttctcctcctaggcgcgtgtcctgaacgcggaagcttagtttacgagtatatgcacaacggaagccttgaggaaagactcatgaaacgccgaccaaacgttgacacaccgcaaccgccgccattacggtggttcgagcggttccgaatcgcttgggagatcgcttcagcactctactttctccacacaaacgaaccaagaccaatcgttcaccgcgatcttaaaccagccaatatcctcctagaccggaacaatgtgagcaaaatcggagacgtaggcctttccaaaatggttaatcttgatccttctcatgcctcaacggttttcaacgaaaccggtccagttggaacattcttctacatagatcctgaataccaaagaaccggagtggtaactcccgaatctgatatctacgcgtttggaatcatacttcttcagctagtcacagctagatccgcgatgggtttggctcattcgatagagaaagcgttgagagatcaaaccgggaaatttacagagatcttggataaaactgctggagattggccggttaaggaagctaaagagatggttatgatagggcttagatgtgcagagatgagaaagcgtgatcgtcctgatttagggaaagagattttgccggttcttgaacggttaaaggaagttgcgtctatcgcaaggaacatgtttgctgataacctaattgatcatcaccataacgctccgacccatttctactgtccaataacaaaggtaatgaatgatacgaaaatcttacattttatgtcagatttttgatacgttatgtgttttgatttggtttatggggtcattgatgaaattaggatgtgatggagaatccatgtgttgcttcggatggatatacgtatgagaagagagcgattaaggaatggcttcagaagaatcataaatctccaatgacggatttgccctttcctagtgattctcttcttcctaatcattctcttctttctgcaatcaaggagtggagatcacaactaattaaataaattaattaaaggttcttaaatttatacggctaaattcgtcaattaacatgaatcgttgtggtttttgttttgtcataccattcttgcgcacaaacgttgatgaaatattcgagcttttgtgtgtaaattttttttaccttatttgtttgattgtattataggttttgactgcatatttgcaagaagaatataatagtgttgatttttgttgtgtcgtattttcttataaaagtatacatatcaatactaacgaaaaacatatatgaatccaatccaatatgaatatgaaaactcttcgttttttaaaaatcttttagttgtgtatgattttattatcaaacatgagatagtatcgtaaaagttggcctatcgtttatactacgaagatacccatatcatttactattttgtatttttgtttgtttctctaacatctatcggtttcttagtgaaaaaagtctaaaatattaaaatggtatgttttgtcatgttggattttgttgaatatatgcaattgttaactaggttagtaacttagtatacatgagatgagatctgacacctaggccattaaattgtgtgggttctatatgatatagctatgaaagacataaatatggttatagaataataaatgggctagccaaacgaatactgaatttacaaaaataacatttgagcattgttcacacattctatcatgcacttatctacctggaatgatagagttttctttttcctttatccttttttcatatagtattagttacaaacgaagaaactttaacaaaggtaaacaaatatacgttaataagttcgaactatacgtcaattatgaattatgtctaaaccaaacgatgttcaaaacatagaagtaataagaattacattataacaacaaacagtatatgtaactatgtaagagaatcattgcaataatttatattctatatgtcgtttagtttgcacacatgcacacatagggaaaaagaactttatcctaatatgaagtgattaaatatcagaatggaaattatgcaatacaaatagaaaaataaaacaacaaagtaaaaaatctctaaaaaaatttagtaaacaaaagttgcaattgagttgtggttgttgaaaggggagtgacatgaaggtccccccaccaccttatttgatacgtatggtgattggtggggctatcaaaggaccattcgacgtcggagtataattttgtcattataatcaagattttctctaattgaaactctacactaacctttcttttgttgtggctaatttttgtatactttggacgtaatagttctgttattggctcttaaatgatgtggaaactattaagaaggttccattaagtctaagtgttaatttctcatttccttaaactagaaagaaggttccataaaaagttaaaaggcaatgtctagtaaagagtagttaggtagttttcacaagaaaaatacatcctttataagattgattagcattcctaacatttttttttgggaggtgatttcgtaccaaaaacagaaacaaaattttaatacgttttcacagtacaatgccaaaatctaattctaatatgacaaagttaaaatagtcgttccaataaattgacctatacaatttggtttataccagtaggtcataaacttatacaattggttgagaacttggcaggggaataaaaacacacaagttttcaataatagcgaacaaaaacaactcataagtccacattgatacaactaattaaaacatgtttcagatctctctatatcatttacttcatctccatcacataccatctacacatctctctgtatctctactgtaaacaaataaagtttcaattattcatacactttttcttattccattttgtattctcacacctaaagattccaactttaaatctcttgcttaatactcaaaatccaatttccttgtctacaaaagaaaaaccaaaaaatccaacactattccatgagatgagaaaatcccatttggtaaaactgatacttgcagtatctctaccaacaacattcttgatcatgatcgccatcatcataatcttcatcttctgtagaagaacaacaacagagaccaatgaagttcaatacgacgtcgaatctccttacgagaaacaagaattttccgataacggatccgaaacagaggaggagcttatcatcttcaacggtggagaagatctaacgatctgcgatatactcgatgctccaggagaagtcatcggaaaatcaagctacggtacattatacaaagcgacgttacaaagaagtgggaaagttagagttcttaggttccttcgacctttatgtgctgtgaattcagattctaaggagtttaatggcgtcattgagtcacttgggtttgttcgacatgataatctcgttcctctgttagggttttacgttggcaacagaggagagaagcttatgattcatcccttcttcggtagttccgggaatctttctgcgttcatcaaatgtaagtctctgttttctactctgttttttttctctcgagaaaatgcgaggaagctgaaaaagattaaaaggaacaaacttttttaattttcggaccaaaagagatgtcttgagttctctttttagctgtcttgattcgtggaatctcctagattcttgttttctgggaaacaaacagagtcttgagttctcgttttcccgggtaaatggtaaaaagtttttaacgcacttatcgttacctatataagatgtctctgtttttgaaatatctatatcgaagatttcttcgtcagatggaatcatattggtaactgtagtcgatccataagaaatcgtcttatcttttacattttcataaatcgtaacatggaattgtttttttttatctctgacaaacaaaaaagtaagtttgtttattttgttctaggatcaccattattgatctaacttttgtcggtaactacttttttttgtcacttcccacttagtttgctcattatataagacaaaatctttatagatctcgttcctttaaaatctgtagagcatcaacatcagcattaatttttctaatcaatattcaataggttgtcttaaaaacagagcatagttttggcaggtggagatgttgacgcacacaaatggagcaacattttgagtatcaccattggaatagcaaaagctcttgatcatctccatacaggaatgcagaaaccgattgttcacggaaatctgaagtcgaaaaatgttctactagacaagagttttaggcctagagtctctgatttcggcttgcatttgcttttgaaccttgcagctgggcaagaggttctagaagcttcagctgcagagggttacaaagcgcctgagttgatcaagatgaaggaagtaagcaaggagagtgatgtatatagtttcggtgtgatcatgcttgagttagtctctggtaaagagccgacaaacaagaatccaacgggatctgtacttgatcgtaataggttgtcggatttgtaccgtcctgagattattaggagatgtctgaaggatggaaatggtgtgaccgaagagtgtgtcctcgagtactttcagcttgcaatgtcttgttgctctccatcgcctactcttaggccgagcttcaagcaagtattgaggaagcttgaagagatcaggaaatgatgcattagcaaacttgactaatttgtggaagagacataggaagagaaagattcaaacaatcagaaacctttttgcaagattgattcaatgcgtagggcggataagagagtcttcataggatgatacaatacatataacaagttctagcttgtggaagttcacagagaagtagttagtctgattatctacagaagtaactgaagatggatcaaggttttgcttaggaaggacttttagaacagagttattggagaataactgagaaaagagccaacaagagactcgaagaactttgtaaggcctctagtaatcatagaacatcatctttttgaatgtaaattgtctttgcagttgtatctttatagccttgctcggtctgtgcagatatgattcttgagttgtatacctgaaatctccaagaggctctctctctctttctttctctatatatatatggttcttgttcttgaaggagaactttgcagttttaagcaaagtatcatgaactaatcttgtggtgtttgttataaccacagattctacactttttacgctgcacttttctccatcaatacattcagtgttttgtatatattatccttctggggatggtattgatccccagagcaaaacttgtggattttcccgggaaaatattcaacaacaactaccgaactaaaacacactgaaaaaagtaccagatttaaacggcacggagtgttataattcttattacgaacgtcatggtgttatactccttctttttcaaatcggtttattcttttttccgttaagtttgatttgaaccggaattgatcggtttaatccggattgaacaagcctagtcttcttcgttttggtgatctctctctctcctatgaattgaattccacagagagattctaaaaatctttcaatcccacagattcggatttgtactccatactcatggaagcttcgatttcgtttctggggtcaacaaaacccaatatttccttgtttaacccttcttcaaacgtccttcctcgtagagatttccctcttcctgctttgaaattgaagaaagtttcagtgctgcctcgaatcttgcaccagaaacgactcatcagagctcagtgctctgatggattcaaaccagaggaagacgatgggtttgtcctagaagacgttcctcacttgaccaaatttctccctgatttaccggtattcgattcttcgctgtttctgtcatgtgttaatatctttgtcaagttatgagtttttccatctaaaagtattaacttttctgttgggttgatgttacttccctaattgatgattttgtttctgacatcacagtcatatccaaatccattgaaagaaagccaagcatatgccattgttaagtaagttcaaatttctacatggcaaagtcactaaactcataaatacctttgagggttgtaatgtattgttcatatggtttctgtaggcgaacttttgtcagttccgaagatgtggttgcgcaaaatgtaagcttgatgtgtttttttctaagcttttttttttcgatttgcgggtgtttacttgctctcaaagctccctcatttttagattgtagtccagaagggaagtaagcgaggagtacactttaggcgagcagggcctcgagaaagagtatgatttcttctttaaagtgttaaacttttgtgagatttttcgcaactgaaacctgttaagtttttggttatacaggtgtacttcagatcagatgaagtaaaagcttgcatagtgacttgtgggggcttgtgccctggaatcaatactgttatacgggaaattgtatgtggattgaacaatatgtatggtgttaataacattctcggcattcagggaggatatagaggcttttactccaaaaacactatgaacctgacacctaaagtagttaacgatattcataaacgcggtggcacttttcttcaaacctcaagaggaggacatgatacagcgaagattgttgataatattcaagatagaggaataaatcaggtagctaacataactgatttccattttgtccataatttttatgtagtttagtttgtattgaagctgagccatcctaatattttgtcaatgtgtatgtcaggtatatattattggaggtggtgggacgcaaaagggtgcagagaagatatacgaggttatttcatatcacatattactgaatgctgaatgtagcattagtaattctactgatacttgcttcatattttgtgaaggaagttgagaggcgtggtcttcaagtggcggtttctggcattcctaagacaattgataatgatattgctgtaaatacccattgataattttcaacttaaggtctacttttctctcatgtggagtttcttatacatcttcttcatccattgttctaggtgattgacaaatcatttggctttgatacggcggttgaggaagcacaacgagctattaatgctgcacatgtagaggtcgagagcgtggaaaatggagttggtatcgttaaactcatgggcagatacagtggtaaatattctgtgacatatgttgattactttcttttgtgaatacgaagttaacttgtggtacaaattctgcaggttttattgccatgattgcaactttagcgaatcgtgatgtggtaatagattagtttgattgttaaattgtcactataaactttctttatttgtggtgtataacaatgggagctttgaaatgtgacaggattgttgcttgattccagagtctccattttttcttgaaggaaagggtgggctctttgagtttattgaagaacgactcaaagagaataggcacatggttattgtgatagctgaaggagctggacaggattatgttgctcaaagcatgcgtgcatctgaaactaaagacgcctcaggaaatagactcttgcttgatgttggtctatggttgactcaacagataaaggtattggtcgaaactcgaaagttaagaaaatggtttctatatgttttccctcaaacattcaagatgaatcttgtgaccactatgttgcaggatcactttacaaatgttcggaaaatgatgataaatatgaagtacataggtatatcttcagactcactgtctctatcttgttaacaacagttaacactcttctgtgcatttcattgacatgtacttgttgaacagacccaacgtatatgataagagcaataccgagtaacgcatcagacaatgtctattgcactcttcttgcccaaagtgcagttcatggagcaatggctgggtactcaggtttcactgtaggaccagttaacagtagacatgcttacatcccaatttctgtaagcttttctcttttacttctctaatcattcttagactaaaatcattgagtcctaaacctttgtggttaaagttaatcccatgattttttacttctgcagcaggtgacggaagtgacaaatacggtgaagttaactgataggatgtgggctagactccttgcatcgacaaatcaaccgagtttcttgactggtgaaggagcattgcagaatgtgatcgacatggaaactcaagaaaagatcgataacatgaagatctcttctatctaagaaacaggtcagttgatattcatcaactgttccaaatgtatactagatatatatgcataggagatatctttatcaaaaaaccatgaagtaatttcattgttataacttataagaattctttggttttagttattcctaataataataatcaacatccatctcaacgatgaggttgagatgttaatacatatcttcctctgtttacttttccatattgcaacttgtgcatctctcccctcttgagctgttgcgtgtggtccatccaattctttgtcatatttaaaaaatgaatgctgacttgtacccaaccatgagacaaaactctggctgctatattctttaaacttggtccctcttgcaacttgttcatctttctactcaattcactgattcacgctttctggacatgtgaactaattaatacctcagtgatatcgaatagtgaatactgaagccactgtacggtactgtttgtgtcattggagaaactttaaggcttatgttaaggtctttcaggtagaaattcgattttaagtatcacagtagattaataaataaatgtagtcgatagatttaggtcctcttgtcttcccaaatagtgtactctgaataaaccgaaaggacaagaactttgtttctagaaccttaagctctttaagacaagagaaaacgcagaagttccattgttacaggaactctttagtacatattttgcaagagttcttttcagtacactagtctaacaggttcttggctctatacatgatgcttcacatacttaagatattaacctatatatactaattaaacatcactattcccccattagtttgatgacgatgatgaagtacttgttgttgttccttgaggctgtggtacatcggttctcctcctttttcggcatgaattgaccggagcatcatactttccggcatccaaaggaaagttgagaacagcttttcttcccctgagcttaaaagctgcatagtcgtaagcccttgcagcatcaatatcactctcaaaagtgcctaaccaaatcctggatcctttctttgccggatctcgaatctctgctgcaaatttcccccatggcctccttctcacgcctctgtaatgtctcgtttcttcaaacctctttgtttttttccggtttgagacagtctcaacctcaggtgacgttgttgttgatgatgatgatgatgattctgcttccatttgcagaatctcttggacataggaatctggatcaagaacaggtgaactaggttccagtttcggaactgggttaaagggttctagagaccagagtccggagacaaaagcagtatcatcaaagacaaaatcttcaatgaaaccatcagggatcatcaagtcttcaaatagatgtttctgtataacatccaaatcagagctttcctcaaaagtctccatttcttcctctctcttttttctttagacaagacaggagaataagaaaaactgcaagtggtgtttgaagaaaaagttttgatgatattgttggctatataaagaaaggaatcctaaacatgtgttaacgcagccatgggtgaggtgtcaaaagtctctctctgtgtctctctggtttaactctgtggggccaagtcttatccattaaacatttatggaggcaacttaagatattttgtcaggacccttcaagttgtgccaacttgatcttgtctatgatgctgacaaatttcactaacatccattttattcctctagagtttaaaataccttgagctacccatggttcgaatcctaagctgaatgctaacaaaatggtgattattttttttaactagaattttgattgagttggttaaggacgtaggttcatttgaaattttaaatctaaaacataacacaaaccaaaaccaaaaagacttgaactactagtgtttataatcgtaacttaagtctttaaaagccaatctctcaaaagttttttcttttttttttttatcttaaaagttttatgataagattgatatatgattttcgtagtagtaatgactcactaggtaagctcttaaatatcaaaagatattttgcatattcacattcgagtaaaaagataagaagataatgactttcactcgaataaaaaggagagacaaattcatcaaattgcttgtcttgtagggttgtcttgctaggatatgatttgaagcaacttgatatttctttgtttctacataacttcgtatagggctccacatatataataaccaaaccttaccctcttgctcagttgcttgacaattatactcctaatctcataatcttttataatagcatgtaagataatattaattatttacttttattgatgctttgtagataatcttcgacagcattatccatttgattggtgttttccactattgaaattttgaatttgtttagatttgtatgtatttttaactaattaattgtcttttcgttgcacactatttttttatagctccgatttactttttcctgatccaattttataatctattgactatttagcagatatgaagtgtttagatatggacttaacgaaactgatgactaagaatgtttatacaatcaataaatttataacatcaacaaatacaaaattaaatttatattttcaacatccaaatattctactaaaaaaaataatgaataaaatgattggtactaattaaactacttatttgatatttgcacactaccgctacctttatattatacaagaataaatgaaatcatgagagtgacgcaagtgaaaacgtcatcgtacgttgacttttccgaagttttaagtgacggagataacggaaaagttgggagacgtcggagataacggaggaatactgaaaataccatctcctgctcccacatcccaaaaccccatccaacttgacggcgtcaatggtaccaccggctcaacctcagcctccgtcgtctccgacgtattactctcttcttcctccactttaaccctagccgccttctcctcttccggcggagaacccttatctcgctttcgtttccctaatccgataactccttccccagaacaagtttctgacgtaaccctaacatcgagagggaaattcaagattgcttttcttccacgtaattgaaacgccgcttggtcataagctcttccagcttccacggcagtgtcgtaagtcccaagccagatcctacaaccctttttgttcggatccctaatctccgccgcgtattttccccacggtcttcgtctcactcccctgtagtgcctctcttcttcctctttctctgtctttgttgaaaccgttctcgagacggatagattcggtaagggcggtttacgctggttaagagtcgaattcggtttaggggattggttggtgatggttctagggcctgtttctgagtgaaagttgtgaagttggttggtaaaaagagatgggtgatcagtttccatggaaacaaagtctgtgagaaggtgttggcttatgaaatcgatggctaaagcttcttgtttagttgccatcttcactctacttgattgactctcttgctctgttgtatatgtgtatgtgtggaagtgggaataagagtgacgaggaatcggactttcttatatagtggtaaaaaaacaaagagagggttcgagccttcgagggagtttcgaggatcggaccgagaaagatcatactaccttttcttggacttgttacttattttctctctttagatttcgtcctttttctttattttgtctttttgtcttattcctctacgtggacatctatcatttaaaagtgcttatcaagttatcatgtgattcttcttttagaatttttaaaaatgcaatatggattatttttagtataagtggagtttgattgagatgtattaaaaatttaaggagtttaaagaattcggaaaacctatcaaaactttgttgtagtagttatgccaattccaaaaggcaaaggacttggaatattcaatcaaacacaccttcatacatttgccaaaattctaaccattgatcctatatttctatttcacatcttcatctcgacaactcaaagttaatatagtttctaagttttttagtttcggtccaaaaccgatcacatgcaaacaatttcaggaaatatctttaatactgttttagaattatttcaaaaatagggaaaaattttatttaatgatccaacttttgaaaatatatgatatttttatatatcaatttcacatgtgttaattttttaacatgaacaatatgttgattaactgtttgaaacatgagaatgtgttgattagactaaaaaaccaaagagttatcaagcgataacagatttttaacactcgttggcacctgttaacgacttcgttagtcagcccaaaacgacatcatttaagctttgatcgaattaaaattaggacttttcccaaattcaaaaaatcaatcccaaattttcctaattcatgcttttgacgaaaccctaattatctcccacaatcttgaattcgttttcacgaataccttcagttagaaagaaaagcatcacatggaatattggattaccaatgcaagacgaattcgtagacatgcaaattgcaatggtaacacaattaccataaacataaaaaaaaataaaaaaaaatatgttaaattacgataagcataatcgtaattgtttcctttccataaacttatatttattcatatatcaagagaaatttaaacgtaattagtaaattgtagatatgggttcttcaagtttcttaagccattgaaggagattcgcgcttgcagacagacgtacagcctcgtttatcaagaaaacaggtcctcggtagtccggcacagcaaaaacaccatttttgatttctgtgttttgcacattcgacacgcagacacattgatggatctaattgcagctccgcctcagaaccttgtgcgtttccaactataacaaaagagaaaataggagttaaaactaactataattgcgatggtagatgatgagttatatgcatgcaaaaatgtatgtacttacattcatgtaaaggaacgaggaaaatcatgaagaggcaaaggatagcaaaatataatgatgacattgttgttgtgatatattcttcttaaaattataccgaaacgttgtttgttataggttggtcgaaatccacacaagtaatagggttttatatagtactaaactactaattaaaagtgcacgtctcttgttatagtgatgcacaaaaaaacgcttagagctagttgttttattagttttagttctttgctattccttagtaatatgaccttttctcttaaaagaaaattgtttttgaaagaaatactaatcagacctaaaaccattagaagtttaatttggtcgacaagaataaatgaagaatcatccatcaaatagtggtttcaatggaaactaaagtataatggaatatctataatttatatatatattaaaaaaaaaaaaattttgaatgttgaatttgtttcatccaagaaatgaagttgaatgatggcaaaataaataaataaaataaaatgaagttgaattgtctgaccgctatgactaaagaagcgaccactcatcaacgccatcggccatagctgttaattatttgttggatccacgaaggagcttacacatcaacttgccaaaatttacacttataattgcaatcaatacaaaggtttcgtcaatataattaaccacactatgctacatatcgtcgaaaattgaaactaatttatccggtaacattttgaagttgtagtttcatatagcctgcagatactgtggtttttgtttaattgcagtcttttgattcactctttgttcgtcgcaaacttgcaatacttatcagattttattttgcctgctaattatctctagttcatatctttcatttcacatattgtgtcgattttttcaaattgatatataatagttgagttccttttttcaaatttgtgtgtgtttacgaaagaagaaaagtaaacgaacgaggccaaaaaaatgtgaaattttttaatacatacaaaaaagatgtgaacaaaaaaagcgaagtaacttggcgtgaggtagagcaacttcactaacaaaggtgtcagttgcatgcatggacaggacaaatactctcttcagtcatgtgtcgtacacgtcgatctcaccactggacccactctttaatacacaatcagattacgttgtaacaaaatttctattactgccaaatgcatttctttggcacgaaagacaaagctcctatttatgccggtatagccgtcgtatccttcatgatcctcaccggtttaacctttgccggtacggccgtggctctaaccgttatgataccggttttggtggttcttagtccgattctcgtaccggcggtaatcacatcgagtttcttggcaacggggttcctagcttctggtagcctcggagcattggggatcgccctcctcatatggctctacaagtaattacttaagttaaagtaactaattaactcttctaatgctttgattgtaccaattgaaatttgttcatacatgcattgaccacatttttattttgtgtgttagttaacattatgtatgtgtgaatgacacttaggaaagaagagtattccagagctactttgcatgcacgaggaggtaggcctgatgggcctaacaagctggcagaaagtggcaagcaatcaggaggagataatccgttgaaggaagacaagccgccagaaagagataagctgccgagaaaagacaagccatccaaggaagacaatctgctgaaaggagataagccggtcgaggaggataaattgccggctgaggaagaaaaaccgccacaaaaagataaaccggcggagggacacaaaccgccacaaaaagataaaccggcggaaggagataaaccggtggaggaagacaaaccgccacaaaaagataaaccggcggaaggagataagcatgtggaagaagatatgcctttaggaggagttgagcatttgtcaatccctgagataccaaaggtactatattagtgatgttcaaattttttcgttaatgattttttcacatttagcaattgccgggaaaagaatttggattagcaagattaaacactgttctgctttaatattcccttcataaattaatggtaggttatggtggtggagcaaaacccaattgtccccaagtgttgcggcccaagtacttgtactaaaaggtgtcacccatttcgattcgccatggatgctaatgctactaaagcacgatctatttttatgaaagaataccaaaaagtcccccgtgtaggagcttttgcatataaatattttacatctcgtgacaaaaaatacgtaaaccattttcatatatgacatttgggacttgggtggttattattttaaagggtacgcttttaccttataaagagttcaaacgaaatttatcattttgaaggtattaaatactataagctaatgtgtttttgtttataaatatgctgctattaatgtactttagaaagcgtaaatttcagttatgaaaaaacacattaaacaggtggaatctctcaatttgtcagattaccatgtttttttattttattttaatatataaaaattgcaatcggaatcttagtcgagattaaataaaaatctaaaactcagaacctactagattttaatttttgatcaaactaatcatattttttaccaccgtagattttgtatgtgtcacacactgactgcaataaacaaataaacaaaaaaggtttccctaaataaggaaacgaggactttgttcctatattgatctaaatttccaagtatccaattagatctcaacgcgtttagattggatcgaattatatcacaaagttatttaaaaaaattatactctgaatttatcgcaaatatatataggagtatatatatgtaaaaactttggaagaaatagaaatatgggtaacttaggaaatatgagatattaactaatatggatgaagataaaagtaagtaaattccagttatattaagattaggattgatattgataaaaatatgggtaacttaggaaagaaaataaaaaaataaaatcgaatatacgatttaatatctctcctaaatatccgggatcaatatccagtacatgtttacctggaaaacaatctaacggctgattttccacgaatcctatcttaagaaaatgttaaccgtcgattatgatcctacgctgattctgctggatttttccttataatgacttgggtaaaaacttccaaataaaacaagataattaaggaaacgctttatctcttaaggaaaataaaaaaatgtaaaaacaccaaggacattcacaaataacagctcacgcatatccgcatatatatatatatatatatatatatatatatcattacacaagagagtttaaggtataaatacaattagcgagatcttgtgattctaattcttgtgataccgaaaacattggtggcgagagagagatggtgaaggagacggtgacggtggcgaaaacgtgctcacactgtggccataatggccataacgcacggacttgtctcaacggcgttaataaggcaagtgttaaactgttcggcgttaatatatcgtctgatccgattaggccgcctgaggtaacggcgttaaggaagagtcttagtttgggaaaccttgatgctcttctcgctaacgatgaaagtaacggtagcggtgatcctatcgccgccgttgatgataccggttatcattccgatggtcagattcattccaagaagggtaaaactgctcatgagaagaaaaagggtacgtaatcttctaatctcatcaatttgataatctaaattcaatgaaattaataagaataaatcaaattcagggaagccatggacggaagaagaacatcgtaatttcttaatcggtttaaacaaactcggaaaaggagattggagaggcattgcaaagagtttcgtgtcgacaagaacaccaacacaagtcgcaagtcatgctcagaaatattttattaggttaaacgttaacgacaagagaaaaagacgtgctagtctctttgacatctctctcgaagatcaggtacttatttaccttgtttctcaagtaatccattgagtcaattgatttgtctagggctattttttaatttagggtttaattgttttttcattaaacagaaggagaaagagaggaactctcaagatgcttcaacaaagactccacctaaacaaccaataaccggaattcaacaaccggtagtacaaggtcatactcaaaccgagatttcgaacaggtttcagaatttatcaatggagtatatgccaatctaccaacccataccaccttactacaactttccacctattatgtaccatccaaattatccaatgtactatgccaaccctcaagtaccggttaggtttgttcatccttctggtatacctgttccaagacatataccgattggtttgcctctgtctcaaccgagtgaagcttctaatatgacaaataaagacggtttggatcttcatatcggtttgcctccacaagctactggagcttctgacttgactggtcatggcgttattcatgtgaaatgaaatctcattttttgtgtgtttatttaagcatgatataggtatattgcttcttttttttggtgttgagttttatttgaatatatagctccatattcaaaagttttgccaatcggattatgtatcatttttatttcttcccagattagattaaataagaatatagatatatttggatttatatttagctgcttctttatcaaccaaaaacaaaacaaaaaaaatcttagttttggtgaagtttattgagtaaaatcaacattcattgggagaaaattaaaaaaatggtgttgattaactagtaaaatcctttgatcaatttcctagaagctcgtctggttctatcagtgaggtttggtttgtcaggatctccgagttctaaggtggcacccaagaaaccggtctgagttccatcgctatcattgtcgatgtctccttcgatcgtcaatccttcaatcttagccgcaatagattcttctctcatcccaacatccacatcttcaaaatttggatcgatgttataagtgccacaaagaataaagtatcaacatgtaacagttacataaaatatttcccaacttcacaaccgccaaatgcagacatgatctctctaccatttgcaatccaatttgatcatgttggattattgcggatgagttcgtggttaacaacatgcatgttttttctttcactttaaaaccgggcatggtttgatcaaacacaagcatgtttttggctcactaattgtatatacctggatttgagaagagccaaagtacgagagcgcatgcaaggagaacaaatggtatgatgtgaatggcgttttctgcgaatttggcacgtgacttctccttcttaaccatctcctctggtggattattgtaggaaggtagttcgttctcgtcgaggggaccgatcaccgagcccatccacaatcccttaggcggtgcggatgagtagtcttctggcactcggttccagctcgcggatctatacattttgataagtatttttggttttgataggtgtgttccaaaaactctatagaaattacgtttttaggatgttgatggtttttgagcttaatcagtttctttgttacattttagtcacagttttttatttcttagaagaaaaaagaatccggattgaattgcgaatttagagcctatggttttggtacatttggatcgaaataaggactttgtcaaatcgttcaatctaatcactcatttttccatttgagagtgacaaaaacaaccatttctttagattctttgttttcttcttctatttctgtgacattttataaacatatgatttgatcatgcttgaaactaactaatcttagttttaagattttaaagattaaaaaaaaaaaaaaaaaaaagattttaaagattgtcaatttgaactgcttgaatgaaatgtcaaccaaaactggtttctaaaattatttttatcgttattcaaaacgtaaacgcaaacgcgaattttatacctgtcagaatttggtacaaaatgttccgcagaatcagccgacgtttcctcttcaccactttcctctgtttctctgtttcgctctctctacaaaatttctccatgaacatacttaacaagctaggtataggatcaagtagacaaaccaacatggatccttctccaatcgcacaagtaatcgacgacgaagctccggcgccgggaaaccagtttactcaattcggcgccggttgtttctggagcgtggaattagcgtaccagagagttccaggagtgactcaaacagaggttggttattctcaagggatcactcacgatccttcttacaaagatgtttgttcaggtaccacgaatcatgccgagattgttcgtgttcaatatgatccaaaagagtgtagttaccagtcgctgcttgatttgttctggtctaagcatgatcccaccactttgaatcggcaggtaacgaaagttttgctctttagaatgtctgattttgtgagttttaagttttgattttggtgattgaggaagatttctagggtttctagggcttgcttgaaatattgagctctaaatagattgaaatctagggtttggatgatgtaatactttggattcatttcatgttctgttggtacaaaatttaggttttatgtttgaaactgaacagagagactcatacatcttctctttgataaggatgtgaatttggctatcgttcttgtcatctttggtcactgaaccatccttatgtgtattttggtagtttcttagagagcacttaaccagctcttatgcagaatcactatttatttggtagtttatctgcttgtcgtgcattatgttcgaatttgtttctctgttttaatgagtacatccttatctgatcagggaaatgatgtgggaacccaataccgttcagggatatatttctacaacccggagcaagagaaactagcacgcgagtcactggagcggcaccagcaacaagttgacaggaaggttgtgacagagatcttaccggctaagaaattttatagagctgaggaacatcaccagcaatacttgtctaaaggagggaggtttggtcttaagcaatcaacggaaaaaggctgcaacgacccaatccgctgctacgggtaaaagccttgcttctaaccgaaagcagaggatgcttccacttatctatgatagattatagcaattatcgttgaaaaataaagaagccgaggctacttatgtaacttgttcttgttcataaaactttttaagtgttcaatcctttaggtatatagtattgtttggatgttctcgattgaatttgttcttgtaagattcatcaaaactagtttgagtaaaacgtaaaatgattttttagtgtcttttactcagcatcagttttagttagtgtactaggctctaacttaaagggttaaattgatccaaaccaaagtgaactctaatttggaaaatcaaattaaaaatgatagaaaacattcttcatccaaacaaatcaaaacggaaataggcaaaattttgaacattgcgttagggtggataaccttttaagctatcagccaactattggacgaggagattatactccaaattttggaattgtatgtttttctttttgggttttaaattaatgtggtctcaactaatatgaataaggtaagtaaaataagcaccgttcatacaaagtacagaagaaaagataatggaaggggaagtcaagcaagtgaaaaagacagaagcgagagagatcttgtgataacaaaaatctgcttaaatagaatgttgacaacgtgttgttcattatctctctaacgtgaatagcacgaattttaagttcagcctcgcaactctcttacgtggctttctctcagtcgcattttcgttaattaaatgctaacttatgattgagagttcatcggtttcgtcccattcgtcgaacataaagttaattaaatgctaactatggacaattctattaatatacgataaagttttataatggtaggtgttttttggcgaatttaataaactgcatgttaagacttcaagcaaaaaatactattatcttgttccaaataaagtgatgattcacgaacgtcaactaaaagaaatttcgtggaaaaagaaaaaatatgtttcatgaaacatctaaaataaaacaattactaattgcaataatttaaagtaatttttgctagctagtttctaactcaattgtatgatttcacttcaattattatactatatattttcttcagtactttgttaagatatctttttttttggtgcgaaatgttaagatatcctgacatctatatttatattcagactaatagaaattcttgtaaagcttaagagaaatacgaatgtgatgaaaacttaagggctagtttggcaggtaaaccaacttaaccccaaggaaaaaccaaatcttaagttactattattgtatattctttctcaaacacaacaaattaatcatatcctcccaatgtttaaaactcaagcttaagagttttttttctcctgcaagctacaatcatttttgatagaaaatttataccttttgatggattcagaaatcagaagtctccttagtccttaaaaaaagaaagtttagtacgctaaaacaaattcaccctaaaactctataaattgcctatatttccattgggttttcccgcttttttcttctcttgtaaatttctataattttccatgttttagaagctaagttagttaatatcaccagaagtcggtttaattaataataaattctcaggccaatggcttaaccatgcgatgatcataatcactagattgttaattcaaaactaatcttgagtattcaaatgaaactacaaaatcaaacataaaatgcgtgatttgtgaactaccacatgataataattttagttgaagagttttaacgtttactagggaatatatttccatccaactatattttttcaaggatatacataaaataagacttttattgtttcgtaaaaaatgcatttagttttaaacaaaaatctaaaatgatacttgtaatgaatggagtagtagaaaataaaaattcaatgcatatagtaatagaatattcacaatcttatttaaaattccttctatataacaccaaaatgacaggcaaaagacaggtacaaaaagcaaaccaaaacatgtaatgtaataaactcatcaaaaacagagctctgtttatcttttcttccgtcattcgaatggctgatcagattgagatccagagaatgaaccaagatcttcaagaaccattggctgagatcatgccaagtgttttaacggcaatgtcgtatctcttgcaaagagtatcggagaccaacgacaacctgagccagaaacagaagccctcaagcttcactggagtaaccaaaccttccatttccatcagaagctatctcgaacggatctttgaatacgcgaattgtagctactcgtgttacatcgtcgcatatatatatttggatcggttcgtgaagaagcagccatttttgcctatcaattcttttaatgtccataggcttataatcacaagtgtcttggtctctgctaaattcatggatgacttgtaagtaaataattctgaggctaattaactttttgaaatttactaatgagttaacattttgtttaattgttaatatctttgtgtaacaattttaggagttacaacaatgaatattatgcaaaagttggaggaataagcagagaagaaatgaacatgcttgagcttgacttcttgttcggaattgggtttgagttaaacgtcaccgtttctactttcaataactattgttgttttctacaaagagagatggcgatgttgatgaagatgaagtctctgtttcttgaaccttcttcattcaaaatctcttctaagacgaaacttgtgatgtatccacacgaggaagactctttatctactcaccacaacaagaagcaactcgctgctgcttgattatatttatgcattgggtcgttatcacgttgtgtgatgtaaaacctttttatatatccgagggttcttgattagtgatgttagcttggaatttgttttgtacatctagagattggtttctttactcgatacaagttgaactaaatgcaaatctgataatatttgttttcatcaaatgatcaaacacataccaaaaacactaaatatacttaatattgataccaaaaaaaagaaagaaaagagatcacacttaagagacatgcagacattataagatacgtcgagcgcataatctatataaaaagcatacaaggcaaaggaagataagttacatttaacagaggaccaaagtccaaacctaataatcttttaatattgcaaacgcttatactcctcccaaaatattatagttgggagaaattaccaaatcaaacgtccttacggatgaatcttactaccatggctcaaagcggcaacttcaccgttgaaaccaccaccaccaccaccgccaccagaccgaccatttccgcttccgtaaccatatccaccaccacgtgctccaccacctccagaaccatatccatacccggtacctgatcccgatccagatccataaccgtatccggatcctcttccccatcctgttggtgatctacctgagcctgccccgtaaccccatccagatcctggagcagagccccaaccccaattgtactcccaattcggcccacggcccgacccactttcgcctggcatgttacctctcgaccatgcaaacggacgtgaaacagaagtctttgcagtgattaaaaagaaaaaaaccaacaagagccctttgatcattttcgatatattcttagggtttattttcttttatgttttacttcaaaatcttgttttgttatgaagttattgtaagaaagcttctgccaccatttataggcaacaacggtccgtaacaagttggtttgatagtgtgagatgggccagacacacccttttgttaagtcgtatctcgaaactaaagaaattttgttaggaaaaaagattaaacaccatttttttataattgtttacttagacataattatcaactgaaaataagcacctaacacctaacaatataattacaagttcaatcatgaagtcactagctacgaacccttttatcatatagatactaattaccatgacttagtgcccaaattttttttactatgattataagattattgttaattataacgatattgccaaaaacgaaatgaaatgtagcctctattatagttggtattaatgtattatacaaaaagtcaaatgaaatgatgactatttgatattattactgatctacttgagtttttttgaagtagaaaacattatccttcaagaaccaatttaagatgcatctcaacgtcaatcccactcacaaattttctagttacgggcctgtgatctgcaaatgatggtgataatcatcatcattgcaaggtaaaatacatctagaaaacacacgcatataaacatcaacaccattgacagttgtagatttcttttccactaattcgtctttaagattggctacgcagccgcaaattctaaatattaatcggaaatgatgagcaaatcaggtatatcgtgattattaaaaactatagaacacaaagaattagcaagcatcttatcgtctaacagttgacaaatctaactccctcgcaaaccaatcaagctaacatttgctatatcaaatttaaatggtttaactttttgaatcaaattgttaaagaaatttgattcaaattaaacaatgaaatccaaaacctagtcagcttgatcatatatgattttattagaaacttttatttaaaattatgatttattacatatgtacgaggtcatcatatatatggccctacatcgtataggtttatttttagaaaatttaacgtatatatgaatgattacaacattgaatatacataggttttgaggtcggtcggtgttttgtgatggtcttttgatatgatgatattatttcgcatgtataatataaaacgtgtgtgcatagaaaactagatagtttttgatcaattataatcgtatatgcagaggccaaaattaacaaatgtatatcaaaatttgaacagcaaatcggaaaatgctaatttttaatacattaatatatgattgatttaaaaaatttgtatgagcttagactcaaaatttcttacttttttttttttgaataaaaaattgtaagaggattcataaaatggacgtaccaaaatatactaataattttatccagttagtagaacacatatagtttacaatattagtttaacaataaccgacaaaaaaaaaaatagtttaacaataatcgatgcacgttaagtgacatgatagatttgtaatttgtttttgacaaatagatttataaatttagaagagcaattccaccttaattgatttgttctagtagtttatttttttacggattgtgatgtttatgtttgtttgcaataaatgaatcgattatattgattccacaagatttacactgttttctttgtgtgttcctgtaacgattgagatctatagtgcatacacgaatgtatgtttttggctctaggaaatatctaaaggatttgtttttggaatgatggaaacttttcatatattttcaacggtgaagcggtccacacgcacaactgcctacggtggagcaactaccatatgttatgtctaatgtctcttttacgatatgatcgaatatccatattacataacctatattcgtttattacatacatctaaaagactacccccaaaattttatctgaaagctcccaatccactatcgtcgaagtttttttttaattttttcttcaaattacaattattattattattattttttaaagtacaattattagtgtccctatttgttagtattcgtgtttcttagacaacattcctctgtttagtttcaaaaatatctagataatggatttacgtatatatggatcaattgtgatagtggacttaaacaggtaggcacattcctcttcatatcggagtataatttaaaatttcgatttggtcgagagcccaagggttctactagtaacaacattctgtgacgcttaagtagtgccacgtgctggaccctcactagtgactactatttccacccacttcctctattattacacacttagcacaaaaatgcatcatttgatttttatataaaagcatcatcacatgcatatgtgctttgactatgtatctctacgcgtttctaacattatattggtaacaaactacagatacgtcatataattatatctcttatgactattgtattcttaggaattaatgcgtgacagagatatttaacaaaatttgttcaagaacacgctccatcaaaaaaaaaaaacgctccatcggctagatcctaatttggaatggagggaacagatactttgttcaaacaaaaggtttctttgtttggtaacaggaagagatcactcaagccaattaacgtcaaatcaaagatcggaagagggagttgcggatcctcctcattgtaatctccaaattttagaatccaaaagattatgagaagaaaatcggaaaaaaatattcgaaaatatttgaagtttggaagaggagaaatcgctcagttcagcgggattatcgacacacgcaagactttccactaggaaaaatcctacattacggtctgttgagcttgaatatttccaagtcatcaccacgatttctctttccgaattaacaaaaaatcataatagaagaagaagaactaggaaaaggcgattgctaattaacccaggaattggattgatgatgaagattaattgaaattaatatttataggttaattgcctagggtttctccataacccttgtttgattagggcttaattgggccgaaatatttaagtaggccttactagttagaaaaatgtttataaaacccaccaaacatttagtttaatttgattcggcccatttgtatttcaaaactcatggcctatgtattcgttttttagacgtaaaaaattcatcaaaactgtcacatttttaaggctaatttggtaataggatccagaattggattattaatcttaattgggagattagtaggtcgtattatcccctaaactaaactcaaagccttgctaagtttgactattgtatataacacacaaatatgaatgttacaattttattttcaaagaacacataattttaaattagtggaaagtatatcttattagcactcacaacaacaacaacaacaacaaaaaaatcaattattcatcaattatccatttaaaaaaattccaagtcagcaacaaaagaattctgccaccacaagttttctcaaaacaaacctaaacaacaagacaagtgtgaaattaaaaaataataagcaccaatacgaactcgccacgtacatacagttgagcagagttgctctctttcggtctcgatttctcaattctcactatacaataccgaccatttaagagcaggcaaaactaatctgtatgatcgatcttgtgctgaagatatcgaaaagatgtcatctttgggtaggattttgtctgtttcctacccaccggatccgtacacttggcggttttcacagtataagctgtcttcttcactagggcgaaatcggagactcagatggcgattcacggcgttggatcctgaatcttcctcactcgactctgaatcctccgccgataaattcgcttccgggtattctgaatttgctttaaactacagagcttgattgtttgcgtattcattgataatgaaaggaagaatcaattttttttgttggattgctcaaggttttgtataatagaagggcctgaaacagtacaggactttgccaaaatgcaattacaagagattcaagataacattcgaagccgacgaaacaagatcttcttgcacatggaagaggtacttacttactagtacacaattgtttcttaaagtagaaacctttcttatactgttcctttttttttgtggtaggtgcggaggctaagaatacaacaacggattaaaaacacagaacttggtatcattaacgaagaacaagaacatgaattacctaatttcccatcttttatcccattcttacctccattggtgagtttattacaagatttgtgattcttttcaccctcccttgcatgattgaattgattataaaaatacatttcgatattcagactgctgccaatttgaaagtctattacgcaacttgtttctcactcatcgcggggattatcctattcggtggtctactagctcctactgtaagtgcttttgctacgccttgttttttcaagattggctttgtttgttccctctaatatagttttcaacgtgtactctttgccagctagagctgaagttaggtataggaggtacatcgtatgcagatttcattcaaagccttcatctacctatgcaattgaggttttaatacttgtttctttgagttttctttcaaactactgtcaagttttttcgcatcttcattgcgtttttcgtataatatttcttgaaaagatgcttaatctgtgtgttcatttgaataacagtcaagtggacccgatagtagcgtcgttttctggaggagcggttggtgtgatttcggctttgatggtagtagaagttaacaacgtaaagcagcaagagcacaagagatgcaaatactgtctaggaactggtattgtggcttactttttctcctttttcctttcaaacatggtttttaaaaaatgagtctggtggttctacaatatgtattcacatatattcttatataacacagggtatctagcatgtgctcgttgctctagcacaggtgctcttgttttaactgaaccagtctcagctattgctggtgggaatcattctctatcaccgcccaaaaccgaaagatgttcaaactgttcaggtgccggaaaggtaaaacacacaaaaaccaaaacatataaaacacaaaacctaaaggtgtggatactaagttgtatgtgtttgatgctcaggtgatgtgcccgacatgtctgtgcacaggaatggctatggccagtgagcatgatcctcgtatcgaccctttcgattgaattttgcaacacattctacttccttagaatctcattctgtcagtgtaactaaaaatggtatgtactgattaaataattagaaccgcatactttgatctgtatatacacacaattaaagttataatacaatgttagacatgtcttctctaaacaaccaacaactcgaaaccggcatgttgtgtacgtcttgtgagttgtgacagaaaaacggcatgtaatgtttgatttctccactaagcaaaaaagcttttttcatgttaacatattgttttccttcatgttacattatgtttttgtttctgagctctaaaacgttttcagttccaatgagaagaaaaaaggatggaataaggtgtgtgtgtgtggctcaaggttcccagccactcaagagagtggcgcgagtggctcatttaacaccatgagtgaaagctcccatacggagggtgcaggaatgagaatggtgaaacttgatgttgtgaaaggcacgagccatgtacttactgaagctgcgttttgcgtatatgtttggaagaatcaccagtactttcttcaccagaatctgcacgtagaccctagaacaagggaactttagaaaccaaactctttgggtaacatagcttcagtggcgcaaacgaaggatcaattcatgcagaattagtgtatgtcaagaactctgtttcttcagaccaatgaatgagcttacatgctctgtttcttgagagctagggaatataagaaaccttaagattcataaacttcaatctcttcaacattataccacggcgacatccctgagttcgtatctcaacttactgatcacgaaatcaccaagctttagcacaagattgatgaatgaattgggaaacagagcatttttgacacttttaaaaaacaaaaaaaagtttgctatttcagattttaatgtgagaattggagcattttttgaaaatttggtataagcctttttaaatattttccttcttttttcttgaagatcaaagctaagtagagatttgctaacacatttgtaaaccaggtactcttatttcttgtaaaagcaaaacactaaacaagcctcagcttctccaataattacaatatcagaaaaacaaaaaaaatgtaatagtacaacaagttacatgtttttgtgtttttttttcttcttccaaatatagtaatttaaaacggagtggttgattaatttggtagttacattagaaagaaggaggaggcaggagccagctagatccttggatgtagccaagcgagatgaagtacttagcttctatgtcatcaatgtcttgtgtatactttactctcttctccttgtgcgatcctgttcctgtgcacttatattctccatagaacaccgtcctgctcatcaatcagtgcattttacattaaaacttatgtcacatagtttttgattgatatactatggtttggactttggactatacatacttgtcacgtccggcctcgcggttttcttgccatccagatgggttcacaacacttgacatatccgtgtatgcataaacaaccttggggtggctcatccatgatcgacccaagtagatcccggttccagtccctgtaaccttgcagtggacgaacgagtatccgcttttctctgcagcgctttttcccgcatgagctgtgatcactctgattccatctcccacaacgtttagttgtgtaccctattttcattaacatacaaaacgattaacgttaatgatcatcgttattgtatatatacactatggagcaagagatctaattaggtaggtacgaggtacagagagcgtccgcttccaaagatgaaatcaaatgtgccttcgatgtagcagtctttgaagaaatggtttccggtgtcatcgcaaatcgtgtcttgataaccgtaaaatttacagttgtagaaagctgctttgttgccagagattctcatagataaagcttgtgctcccttcctcttaccatccggcataggcgcagaattctgaaaacaaaaatttatttatctcatttgtaaaatagtgccgttttttcttttttctttcaaaagtaatgtcacatgtaaggtaatcataaactgtccttgattagtccacatattttgagacatatcttacgatataaataccttaaggatgatgttaacagccatgaaatagtcggacaagacaatgagagttgcgctatcgactgtcccatattgtgctgcggtaccgtcgaatgtcaataccggcattgcatttggatgaccgtacagtgtgatgaatggcttgcttctatctatcgtgaccttctctttgtatacaccaggacctatcttgatgatcacacgcctagtgttccctgcccgtacactatttatcgcttcggttattgtcttgaaatggcctcttccattttgtttcacctgcattcgtagatccaaaatatatttttatgatgtgtaaaacccaaaatcctacatacaaaatgcgatatcatataaaatatcgcaatatcgaactaaaaaaaaatagcgtgttatatttgttgaaaattaacataagcaaaacgtctattaagtaatgtttataaatattatcatgccttgatgatgcgtggcttagcctcagcggtcaatagagctggatctgatgtgctttttctactagccaacgaagggacgttggtgttgaaccactgctcgattcggcctttgttctccggaattggtgctgcatcgttaccgaaaaccacgggcgatgtaatcaccacgagcaggattgttactatgagggacacataattgtatcccattgtactattaatatttgttactacttttctaaagtaaagatgattaactttctgcttcttcctttcttatggtatatatatctataccatctctaaaagcgaagaatacccgttgccgttaatttttgctaaattggtttctggttcttcactttttattcattttaatcccttaataaactctatatatattatgtactgttttaagtgtttcaatctaactaatttagtttatttgtctagaaaactaatttactttaaggtgtaaaaccgacgttagttttatttttggaacaaatgattagctaatgctatattactaaacaagaaacttctcaatactaaacatctaaaccgaacatggcgttaagatatcccaaatagtattgtgaattaggcataaatcgctataaaatcaacttcagcgactattgttagtaggatatcttcatatccttgactatatttttcaatcaaggttctatttatgtatagtcgtatattcacattaactatgattgtaataccctagctacctctctgtgtatatacgactgtacataaatataacattgattgatatagtcaaagatatgaagatgtcgtaatacaattgttaggaacttcatagttcatttgatcaaaaatagtgttattttttattcaaccaaaaaaaagtatgtttacatcatatgcaagttgcaaccttggataaaattcaaagctgaaaagaaaatagaaagagtttgaaagtgaaaacagggcaatttctatagcccgtcctctagaatcagattgtcgtgtcccctgatggagcataatctcttgcggactacacgatcaacgagattggcgacatattcaggagggttcgggacctcactgtgtcgtctagagttgtgctcacaccgttttttttttttttttgtcatcaaaatcaaatgcactatcacagaatatgagaggatccaaaccggtacataaataggaaaataaaggagcatgcaatcgtgcctgacgcaccaatattgaatttgcttgcaaatgactgttaggaatcaagttgatagagaaagaatcaaataaactctctttgacaagaaaaataaacaaataaactctctgaaaaaaaaaaaatcttgcgttttgattttgtgacgagtgttgttttaagatgaaataacgtaatggtgttcgtcttaagtgtggtcgttttcgaacgagttttaatttccttcgtctatttcttaggttgtgaatacatcatgcatgccagcaacttaaccctaacttatctgaaacactatatatacagtgtgcttacttttatcacattcaacaaagacaaaactcaatttaaactttttctaaaactttaacccctgtactatataggaacaactcaatttttcaccaaaaacaaactcaactttgttcacgattctcattttctaacaacacgaaaaataaatcgttaaatcataaatcgatcacgataccacgaaccccttgtcgtaggcttttatgtcctaatgcatttggtgatggtggacgtgtcaccggaacattctgtggtacccgcatctctgatgagtgtccagagatgcacatcgaccccgagccgtcttgttgccagtacacttccaccattactccacttggattctctgcgttttctgtatcagggatcccaacaaatcttgctcccacaggtatctagacataaaccatataactcaatttttctcaactctgcataatatatatatatatatatatctgcatgtggattttgatatacctctagtgagatgcctgatgctaactccaaagtgaccatgtttccttcagctgttgcgctttctagttcagcctgtcttgcgatgttgagaaacacttcttcaagagtcgctagaccaagttggatgtccgagattccaaattcagattctctgttttgtagctcctcaaaaaaaccctgttggtcattgagaccacagagaaagaatgatgaatatatatcatagatagatagatgaagatctataggattttgagagccttgtaccgtcaaaagattttctttgtcgtgtgggataacaaaagtcatgaaagctttgttttcttctgttggctcaactttcagatgctgcaaaaaaggaacacttaactctctcttttttttttttttgctagtatacttttgagtgtatgttacctctttaaaaaatttcttcaatggctcgtgcgaagctccaacaccgatgttattgtcatttttgttttcgatgaagctaacggtagcaacaaatcccgtgccaaagcgagattttaacctgattgaggttccaatgcagcggagcctgcctttagccatgatccctattcgatcacttaaaatatcagcttcctccatagaatgcgtcgttagtatgatggcacgacctttctttgactcttgtataatgtcccacacatgtctcctcgtgatagggtccatgccagtagtctagaatccatgtataaacaaccatcttaaaattaattgtttttatatatagacacatatttaaagaagaatgtagcaagttgacatgccggttcatctaggaagaccagcttgggatcgccgataagtgctaccgcaacactgagtcgacgtttcattccaccactgtaacttcctgctctaactttcgccgctcctgtcagttttacatccgccagtaacttctcagcagtctataacagaaacgaaacttgtaagataagttgcatggattggaaagttcaataaaatcatcagacctctttgcactttgagatttttcagtcggcctaccgatttgatcgatgctggtggcaaccctttgatgctagcaaagaggtggaggtgttgttcactagacaaagcatcccaaagaatatcaaactataaaaaaagaaaaacgtgtaagagatgattgtataagagacaatgctagaaacatttatgagattgatacttacctgaggacatactcctatcattttgcgaatgttagatatacccacagaacttcttatggagtctccatatataagagctgtttaagtcaatcacatggatattattagaatggttaaaaatgctttgagaactttttgcttcctctctaaacagatacttaccatcaccaccagtaactggatttatgccagtcaaacaactaatagtagttgttttccccgcgccattaggtccaagaagacaaaacaactgatctttggcaatattcatccacaaaccctgaaattttttcaatgaattaatagttgaataataaatgtaactgttgtaacacagggtacatgatcagctaggaaaagctttggcaaaaaccattcattaccggaaagatttatccatcggaagataatatacctttacagcatgaaaaggcgaagttttggtgcatttgcagcatccaagctttgtagttccaggatatgtctttgcaagaccatgtatttgaactgcaatgttaggatcagctattccgtccattgcttgttgtttaacttctgtctcttcttcaagcacatctttgtcatttggcgtattatgctctactagtggaactgaaccaacacagctaaaaatgctaccttctgtaaaatgtaatatttatgttaattttactaatgtttcccaacacaaagaatatttgttcttaaataaccttccactttgttgcctcctttgccagtccaataaccaggtgctaaaaagtagaagatcggttttcttacaccggaggcgttgggaataatattgtcaaagtagatagccagaacaaaccagaataggaatgtcccaaggagccactggtagataatgttctaccaaaatttaaaatacttgttagagaatgctattagacaacgtaactagtaaaatttattttgaatgtctgcatacaatagaaattacgcaagtcgcttggcccccttcacatacggctctattactccaactgattccagagcttttgggagttgaggttgcatcaagaagaagcttaagtcccgcagaaaaagtgttgggtggaaaaagagaccacatcacccggcgagaaactgcatatgagctggaataagggaatccagtagctgatacaaactgcaattagaattgtaaccaagtaagatattaaagattttgatcaagaaccagtttattaattactatttttagctagacaagttatcatacctgtgttataaaaccaatcaaaaacacaaggaaaccgacagttgttgccgaagatgatttgctaatgatagatgatagcgcaaatgctaggccaatctagcaacacaagtaaattgataacttaaaaactagggataatacattaaaaaaaaaaactaattagaaaaaatgaaggatttttaccatattaaactgaaaaagcaagaaaagtaggaagacaagaacaaaactgttcttcaagaaaaaatcaaagcggaatatcattccaaagaggaccaagaaaagtgaggagacaagggtaaggattccttcccaggttagccatgacaaccaatatgcagaatcataaacacccatcattgtcattgcctgccgaagttttagctctttctcggtgaccagggcaccgagttggagaacaaaaccaaacatggagaaagcaagaaagaacactggtcccatgactgagagtgcagaggtagtttcagttataatagctggtcttgcaaattccttaaatcccaaaccccaaccaaaatttggatctccaagtaaagaccttgcgatttcacgctctgcagcgacttgaagaggaacaaggaacttaaacgtaggatcttcagtctgaccacgtttactctccgatgaagaatttgtttgaacaccatagctgattactgaagcattcctttccacaaaatgcaaagctcctggaacttgcaagggatgtgacagaagccatgtatctacctcatcaggctccttgaacgactgaacctgaacaacatcgaatccaacacattaaataaccgtagaaacttaaccaagggaaaccaatgaagtaataccttgttggttggaattggtctccctggattgttagccataattgcagagacgatatcagtaacgcggcgactattgttcccactccacacaaagtcatagcaaggaagcttcacaaagaacttgtcctcacaaggaagaatcggtggggataccaatagtgtaggatcagtgatattcttgtacgcactcgaggatgcgtcgcttgctttcatggcttcctctatacaaaagatgagaaggatgaagaagaatgaagagaagatttgaagacacgtggctctcttgttccgccatgaaagcaatagattcttcccgaacaacgccgtgaactgctggtagagaagcggcaagccttcttgcaaaatcattatcaagttttttaaaaaaaaatctttctttttcgaagtaaattgtttgtcttagaaaaaaaaaaagcaaaattttaatctataaagttcccacacaccccacaaaaaaaggattgaccaatattaattagaaagaaaataaaaactatccagcttttgtccaattttttcgattgactacatttcatccccatcttgaaaaatgtgtaaaattgagacctcgcatatttttcgcatttaattggagaccacatatatatatttggcacttaaaacaagcgcaagtttaaaggaagaaacgattacttaaattggcaagggaaaaaaaaaagagacgacaaagtgcgactacctaagcttctttctttcttcatcaatggtgaatcctagcccagcaagtttttggacgcaagccaatgcgttacttaggaagaacttaacctaccaggtatgttttcatattgccgtttccggcaagttacttagaatatttttttttataacgatctaattgcctgaaccctgaaatggcagaggaaacacatatggacgaatgttcgactcatcctggttccactcttcctctgtttaattctgctggcgattcaacaagtgcttgatgccttgatgaagggtgtctctgatatgtctaattgtggaggcaacgttactttgcctggtggtatctgtcccatcccaaaccctccatcgttgcctccgatgttgcagattccacaacatgaactccgttccgttaagaccgatttcttttcctacaaagatctccctgacaagttatgcagagaaacaggttcttgtcccgtaacgatacttttcactggtgataaactgccccttggaaaagctttatccgcaaatatcttcagcacttcttttgtggttaattcctccgacctcttgcctactttagccaataacgttttggtatctctctccatctatctctgagtgcagttgcattgcatgattctcttatctctcaaccacttcttttactcgagcgagagatgatatgactttcagggttcaacagaagcagcgggggaagacaattatgaa

SEQ ID NO: 943 - DNA, 57246 bp, Arabidopsis thaliana
gatccggggattgcctcagatcttcctatttacagtatccaaccttcgtgcagtgcaaactctacatggccactctcgctcggacaaattcagacaggtaatttttttattgttttttgtgaatcactaagtggttctttagtgattctgggcatatcctctgagacatgttttgacatggatctagacgtaagaaatgcgtttttttttttttgttgtttttataaatcattttgatgatcgtttgtgtctatattattaattatctcagccgtgaagtgtgttcaagggttgtgtctctggagaaataactctgtagaggtcaatgatgagcttttcaagggtagttggaggggaaatcctgcggggatgccaaatgagatcgttgcaggtttgttaaaatcttccattagtttatatatccttggtggttacgttattatgccatttatattatgtctgcctttttcgtttcgttagcatatgatctcatgagcacggataggaaaaatttcaatgtgaccatatggtataactcaacctacaatgatgagtttgcaactggtcaggctttaaagctggtccgagttccccgctctattaatctggtaacaaatatatatggtgatcatgtactctcagacatggttgcatttcgccttcgatttcatatttatctcgtgctgcagatatcaaatgcttatcttaagtttctaaaaggccctgggacaaggatattatttgagtttctcaaagaagttcctaaagaagaaactaaaatgaatcaagacattgcgtccttgcttgggccacttttcttcacttgggttgttcttcttttgttccccgtaagttctcttacacgctagttaatttgcatccccattatattgtacgtttaataaataagaaatcttgcatgcaaatgcaggtaatcttgacatcattggtgtatgagaaacaagaacgtctaagaattataatgaaaatgcacgggctaggcgatggtccatattggatgatttcctatgcctattttctcaccatatctatgttgtatgttatttctttggtgggcttcgggtctgctataggactcaagtatttccggcgcaatgactacagcatccagtttgttttctatttcatctactcaaatctacaaatctccctcgcttttctagtctcttcgatattctcaaaggttaagactgtaacaggtataccacatttcctgaatattccactgctcaagaacatgtcagagttgaaatttgaatggatttctctgttttatggcttaattaatattgtagtcattgcttacatactggtgtacggaaccgggctcttgggtagctttcttttccaaaaaatgattgaaactcagtcattccccggtaatttagtcaacaacttgacaaacaaacaaaaatcaaagatgctcatgtttatttactatacaatgtatgtacgtttgcagaagaatggattcttgccatggagttgtatcccggcttttctctataccgcgggttgtatgagttctcgcaatatgcatcccgaggaaacgggatgaagtggcaagatctcagtgatagcggaatgggtgaagttttctgtatcatgtcagtagagtggtttcttgctctcatagtagcctactatatcgatcaggttttcacatccggaaagcatcctttctttttcttggtgaaccttttcaaaagtccttcttccctaccaaggaggcctactgtgcaaaggttggattctaaaagagtattcatagatatggacaaacatgatgtcactcaagaggtatgggagaagtcaagttttttctttgccattccatttttccatatttcaaagccctcatgataacaaagaaaataataatcagagggaatcagttcaaaaattgaggaatgaaggtagcacagggcatgccatcttgtgtgacaacttgaaaaaggtttatccaggtagagatggtaacccgccaaaaatggccgtaagagggttgtatctcagtgtgtcttcaggagaatgcttcggcatgcttggacctaatggtgccggcaaaacttccttcatcagtatggtcagttttgcaaacaaatgttgttttcagagtgtcaaatttagtaatctactgctgtgttttctttgctgcactagatgacaggactcctcaaaccgtcatctggaacagctttggttcagggtttggacatatgcaaggatatgaacaaagtatacacgagcatgggcgtatgcccgcagcacgagtaaatcctctaaatgatttttgaatttttttactaccaagcaaataatgaacaactttttgaaaaaatgttattctcttggtttcagcttgctttgggagacgctaacaggaagggaacatcttctcttttacggtcgacttaaaaatatcaagggctctgatcttacacaagtatatatgtttaccacctggctaatttttattttattttatatgtgttgttattcttgaagacaataacaagaatatatatatatatatatatatatgatcatttcaaggctgttgaagaatctctcaaaagtgtcagcctttacgatggaggagttggcgacaaacctgctggtaattatagtggaggtatgaaaaggaggcttagcgtggccatatcgcttatcgggaaccccaaggtacatacattcttgttagtcgagtgattttgtctagcaatagctcatgataattattaacaaactcaaggtctctctaaaataggtggtttatttagatgagccaagcacaggacttgatccagcctcgagaaagaatttatggaatgtgatcaagcgtgcaaaacaaaacacagcaataattctcacaagtatacatatattagtttctccacttacggaatgtgattgagtatgcctcctaaattatacttaatattaacgttaagacaagattttcagctcattccatggaagaagccgaatttctatgcgacagattaggaatttttgtcgacggaggcttgcaatgcataggaaactccaaggaactgaagagcaggtacggtggatcatatgtcttcacaatgacaacatcttcaaaacatgaggaagaggtagagagattggttgaatctgtctctcccaacgccaagaagatatatcaccttgctggtactcagaaatttgagctcccaaagcaagaggttcgaattgctgaggtgtttcgcgctgttgaaaaggccaaagccaacttcacagtctttgcatgggggctcgccgacacaacgctcgaagatgtctttatcaaagtcgctagaactgctcaagccttcatttctttgtcttaaaagctattttttacagttatagggttctctttcttgggtcaaaattctatgtcttgaaacacacgcaaacttaccaccatcttgagtctccttgtgattgctgctatgagaatcaaagaagcttctgagatcccagaaccatatgtgttattactttggagaatggggaaacagatgataaaagcttaaagaagaaaaagataaggtttgcgacatttgccactgggattgttcacggcctgcaaccggatgctatatctgatgatggtacaaattttgtcacctaaagacgttactaggaattctgttcttgttgctgcttttattcattaattattgcttcatgtaaatcttgtcgttgcaagatctttgttcttgtatgttggacaatgccaatgtgctactatcgctgagtgaattatacaaggacacagtacactgattatgaagattcttagagacaatcttactttgtggatcattcgtaagcatcaacacaatatacattgatcattaattgttcactaagttgtgtaattgacatgattataactctttggtcaataggacgaagcaggagatgagatcaaggaggcagaagcaaattaggtcttgtgcaagtgtcattcttgtttcactgtcttgtcggaaccaaagcatagttaattcacaaattctagtactctcttgattcaatgtattgtagcgagtaaaagcaaacatgtgcaagcaagagttgtttcttttggtgaatatgtattggctttgaacttataaggaaatggagcagcataacaaatccattgattccttccttgttgtggatttgctgtatatctccagaattgctgatttgattgaataccgtacgtgatgttatctgttccggtgattaaccgaatatgagatttacttgtggattcgagactgattatctgctgctttcaatctcatttagtctgttaattcgactgcttttagtttgatacatacttgtgtgatgagatgactgatatgaatcggacggatcacaaacttgtccgtgagaactagtacaattaatgtcggtcgactggtgcacgggtttctggttaagattatgggctggtttaatataaatgggcctatttatttagcccgaaaaaagagtgctcctccgtataaaaatctaatgcatactagagactagagagagacaagtccccgtttcttcttcaccgatttttaatgggttcttggtcttttttagtgttttgaaacctgaaactaatccaaaacttttcgacattgttgtggaatacgtcacagatttggtatttggaaagattcatgtttaacattacaaactgagagaaatagctagctaacaagtgatgttttaatatatggcagacacataaggctcaagaaagcgaggaagacttgtagttgatgatttcttgtatcatatccgcaaggtaaactacactatcgaagattgattgattgattgattgattgagacggattatggttttgtattccgtttatgacactttggcgtctctgatttatgcaggatatatttgccaaaactagtgaaccggtgtagacaacgccactctaaggaacatgttgattgacctttatttattttcaagactgtacgtaagatacttgatagatatttcttaattcactaaacttgccaaattgaggaataactaagtaaaaattgagattctataaaatagacttttggatccatttacaactagacaaattttgttttcttagatgaaatgaattatataaaattagtctactttaggctgtctcaatttcttttcttgattctcaatttttctcatcctccgataaaaagatcctaacttcctttaatccctaaacaatttaatcttattatttaactcccaatatttcaaaaactatcgtttacaaaaatagcggaatcttttcttcaagaaaacaaaaatctccctccagggagaagattttttgtttttccttaaaactttaagtcatctttctgatggagacaagaaatcagaatggtgatcaattagagatagagcaaattaaataaacaagacgactaccatgatgaagaagaagaaaaagtcatcacgtgggatgcacatgttctccgtcgtcatgttcatgctccgtcgtcgccggacctccaacaccaggttctggcggcgtgttgttgagtccgtacgtaaagtccgttccgaaattacgataatgccagtgacggagatgggaggagacgatggtgataatgaagttgatgatcgtttatcggagactatggaggttttcacggcgccttcctcttcatcatcatcaggaatctcgggatatggatcagccatgtccttacgtgatttggactatccttatgatgatgatattgatgaatgttatagtgatgtccaaggaggagatgatatgattgatgagaaagctgaggaattcatcgtcagattctatgcgcaaatgaagatgcaaaatcaggtttacactgatcgttgcaaagccaaagggatactgatgaatttttaatgatcttattaattatggttcgttcaattttacctcatcatcatcatcatcattcaggttttaatttcttggtcatttttgtttttcgtattataatttaatttaacgacattttctgtaatttcaattaattaatgaaatataggagaatgaacaagtatatgtatttttgtttgtgtggaatattaaatttgattaaatatttcatattcaatgtgttttattatctcatagtatcaatcagaaattggttatattaaatagcacatttgacccattcattgaattgagttcttttcgaaaattgaagaatttgacatatatatatattatgcatggacatatgcgtaagtgaaaaatcatcgtgagtgatgataacaattacacactttatttcatttcgtggaaattaaactcatagaaacaacggtgacaaatgaagtttccataaccaagaactggatcctcgccatacgattagcctaccgagaggaaccaatatagactataaagtacaaatgatttgaatgagataaccccatcgtcattcatgattcatcattatcaaagttataatcggaataaaagcaaaaaattatagattatagaaaaataaattgtattttttcgtgtgatgaaattccataagtcttctagttttcttattgattgtgtttcatcaaatcgagcaacctatcatattacatgatccatgttagtaaaaccttagctagattgttttgtagtttaattttgtgaacaattgatgtgttgaccaatgaaaacaaattgctgaatcaaaaaaatgctatgcccctatagagtcgagaggagtatttcaatatgtcctaactaaatttatcctttctaaaaatatatccagaaaaaaacgaatagccagagaaatttcttcgaatctcgtttacgatttcttaacaaccttaaatttatcaactattttattcttgttcattttaaataatagtgaatttaagacgtttcaagcatctatataaatccactcaccatagaaagcaaggtacaataaaaacaatttcaacgtttcgttttcctgtacctcttttaagaataaaaaaaaaaaaaagaaatgggaaaaatttcattagcgatatgtctaacgttgcttgtcacattaagcactgtttatgaaacacaagggacgttctcattacccctttacttgaaaaatttccccaaactgggcaaagactatgaggctttcgcaaacaaaggtatatcggactttttgggtgacctagagggtatgtgtcctaaaaccgcagagttcaaggatttctttgaaaacttgaaggattacatggccttcttcaattcagcagcacccgggtcaaaagacaaccagttcgagatgttcgtaaaatctgaaaagctgttcaaggctttgtctgctttcaacagtagtaaaggcggaacatcagtaagtttttagtttagacgtttaattaacattcatatatatatataatggtatgtttgtcacagttttaagtgaaaaaggattgtgttatatttttggtgataggaggattcgtggaagctggtggatggattgttgtcaatgggtaaaggtttggttgagatgaagaagagcggttcgaaggagataacttttgaagagagaagagatctgatcagttctatggtgaaatgggctagagccatcggtctattcgtgaaggcggcctctgaagataaaggacagtctattgatctggcatcttttgggattgactatgacaacaatgtagaatcccctttttcaaaaagagctatgtatgaaacacaaggaacgttctcattacctcattacgtgaagaatacccccaaaatgggcaaagccattgagcctttcgcttacaaaggtatgtcggacttcttgggtagcctagagagcaagtgtcctgcgacaccagagttcaaagatttctttgtaaagttggaggactatatggcctgcttcaagttggtatcacccgaatcaaaattcgagatggcagtgaaatcggataagctcttcacggctatgatttcattggatggtactaaaggcggatcagtaagttctaactagacatttataacatttaattatatagtgtgtgagacgtacgttcctcgcggttttaaatgaaaataaagatggtttccattattttttggccaggtggattcgtggaggatgcttgatggtatgttgtcaatgggaaaagttttggttgatatcaagaagagcggttccaaggagataacttttgaacagagaagagatctgatcagctctatggtgaaatgggctagagctatcggcctattcgtgaaggcggcctctgagcgtaaaggaaaatctattgatctagcaccttttggaattgattatgaaaacaatgtcggaaatggaaaaggtaactttagaaccggccctgttctcatagacgacggcagcgagctctaatcttccaacgaaaaaggctcccaagtaaacaagaaatatgtaacaatatatggagacagccctgctttgttaaacagcagcgtgctgtagaacatttttggttattgtaaaaactatattaatcatattactaaaataaaattattacaaatcttaactcgttaaacagaagctttacctctatatgtagatctattattcaacagcctttcggaacacaagtgaaaaaacatccgcatcttcagtttcttgtcttacacgctagttttggatcattatctaggtgtcttgaaacacccgtaaactttccaaccaaccaacctgtgttcataaatctcaagcaacctgtatctatattgttctcagtctcaatgttatacactctcttctaacgtaattaggattctgttttttactattctcgttactgttgtggatagagtgtaaacacaagtatttaatttttctcactgtgaaaatttgacaacatataactttctaattgtctccatgactgtttttaaactccagcgtaaaccaagtattttttttcccaaactgcccaagaagggaatgttaattgttagattcataatcaatcacaataccccgaactcgtcgctgtccatgtcctaatacttgtgatgatggttcatatatcaccgatacattctctgggatccgcatctccgccgagtgtccagaaatgcacatcgatcctgacccgtcttgttgccagtacacttccaccattagtcctcttggattctctgcgttttctgttccagggatacctacaaatcttgctcccacaggtatctgcacattgaggttagtttgtatccatttaaattcaagttcattaattctcaatagtgcatttcatcgacggttacatgtgaaactgattattttgatggaccttgtagactaattacctcgactgcgatgcctgattctaactcgagagttaccatagttccttcaacagttgcgctttctagttcagcacgtctagcgatgttcaaaaacacttcttcaagagtggcaagaccgagctgaatgtctgcgataccaaattcagattctctatcttgtagctccgcgaaaaacccctattcccgttaattatggaaaaatcattcatcaaatgaaagatctaagagataattaataaagctttttatagatggttaccttcaaaagttgctctttgtcgtgtgggattacaaaagtcatgaaagctttgttttcttctgttggctcaacttttagacgctgcatgatgtttgttccaggctcagaggtactagattatttactaactaaacaatactactaaaaaacttgagtgtacatacatacctccttaaagaatcttttcaatggctcgggtgcaccgtcttttttgttttcgatgaagctaacggtagcaacaaatcccgtgccaaagcgagattttaacctgattgaggttccaatgcagcggagcctgcctttagccatgatccctattcgatcacttaaaatatcagcttcctccatagaatgcgtcgttagtatgatggcacgacctttctttgactcttgtataatgtcccacacatgtctcctcgtgatagggtccatgccagtagtctagaatccacaaatgttagaataaaaaaaaatttgatgtttatataaactcatttttaaaattaaaaaaaaaaagaaaaaaaaaaaagagaggaatgttgcatattacagaccggttcatctagaaaaaccagcttgggatcaccaatgagtgctattgcaacactcagccgacgtttcattccaccactgtaacttcctgctctaattttcgccgatcctgttagcttcacatctaccagtaacttctctgcaatctatatatacgtaaaggtatgcttagccaaaagtttaaatcagatatttgtaacacacatgaatatgaagtatattttatgttattagggtgatgtaccgatttgatcgatgatggtggcaaccctttgatgctagcaaagaggtggaggtgctcttcactagacaaagcatcccaaagaatatcaaactgtaaaaaaagagtgatagagtcataaaccattttaagctagcataatgattagaaggttgttttgtgtgatgaggacaatgaaggaagaaaattgacaatacctgaggacaaactcctatcattttacgaatgttggacataccaacagagcttcttatggaatttccatagatttttgctgttttaatttagtcaatcaaaatggatcttattagaatagttaaatttttccaaaatcttgcttcattcagactgaaacaaaaagcttttcttaccatccccaccagtgactggatttatgccagtcaaacaactaatagtagttgttttccctgcgccattaggtccgagaagacaaaacaactgatctttggcaatattcatccacaaaccctgaatttttttcaatgaatcaatagttgaataataaatgtaactgttgtaacacttttatctcaagtcacatgagctaggaacatctttggcaaaagccatacattatcggaaagcaacatacctttacagcatgaaaaggcgaagttttggtgcatttgcagcatccaagctttgttgttccaggatatgtctttgcaagaccatgtatctgaactgcaatgttaggatcaactcttccatccattgcttgttgtttaactaaaatctcctcttcaagcacatcttcgtcctctggtgtaatatgctctactggtggaactgaaccaatacagctacagatgctcccttcttcaaaagtgtagaaaaacatgttttaacttataattagttttatttagtgcaatagagaaaaataccttccactttgttgccttctttgccagtccaataactaggttttagaaagtagaagatcgattttctcacaccggatgcattggggatgatgttgtcaaagtagagagccaatacaaaccagaaaaagaacgttcccacgagccatatgtagattttattctgccaaaaacacagtttgttcagagaatgatacctacacaactattagatccaaaatctatctcagaaaggttggcatacagttgtaataacgcaagtgctctcgccccctgcacatattgctctttcactccaactgattccagagtctccgggagatgatgtcgcttcaagaagcagctgcagacccgcagaaaaggtattcggtggaaagagtgaccaaatgacacggctaccaatcgaatatgcgcttgaataagggaatccagcagttgttacaatctgcaataagaagtagaaatcgtaagagtccaagatttaaataagaaccaaaatttcagctactatatatgttagcaagagaggccaaacctgtgttataaaaccaaccagaaacacaaggaaaccaacagttgttgccgaagatgatttgctaatgatagatgatagcgcgaatgctaggccaatctagcaacacaagtaaatatataataacttaaatgatacacaaataatatctttgaagaaagcagagtacataatttgaaaatgaagttttttaccatattaaactgaaaaagaaagaaaagtaggaagacaagaacaaaactgttcttcaagaaaaactcaaactggaacatcattccaaagaggaccaagaagagtgaggagacaaaggtaaggattccttcccatatgagccatgacaaccaatatgcagattcataaacacccatcgttgtcattgcctgttgagcaacaaagaaacaaaacaatgatccaatacgcaaaacctcaggctaccaaaaaacaagaacagagattattataaaacctcgcgaagttttagctctttctcggtaaccacagacccgagttggagaacaaaaccaaacatggagaaagcaagaaagaacactggtcccataagataaaatgcagaaatgatcacttcaccaccaatcgctggacgcgcaaattccttaaatccaaaatcccaactaaactttggatctgaaaatgtataaggacttgacttattattccatgttataagaagcacccacatatgtatacatacacactgctacaaaaatcttcctaacacaaattaagattcaagaatataaagtacctccaattaaagaccttgcgatttcacgctctgcagcaatttgaagaggaacaaggaacttaaacgtaggatcttcacgccgaccacgttttttctccgatgaagagtttgtttgaattccatagctgatcactgtagcattcttttccacaaaatgcaaagcccctgttacttgcgatggatgtgacataaaccatgcatctacttcctcaggctttgtaaatgattgaacctgaaagagaccaaaccacaccagaaacataactattcagattttcgtacattagagactatggaagatgatgaagagacataatcatgacaaaaaaccttattggttggaattggtcgtccaggattgttagccataattgcagagacaatgtcagtgacacgacggctctggttgccactccacacgaagtcaaaacatggaagtctcacgaaaaacttatcctcacatggaagaatcggaagagagactaatgctttaggatctgtgacattcttgtgcctagtcgaggttaagtcgctcgctttggaagattcctctatagagaagatgagaaggatgaagaagaacgaagagaagagatgaagacacgtggctctcttgttcctccatgaaagcagtagattcttcttgaacaaagctgtgaattgctgatgaaaaagcggcaagccttctcgcagagtcatgatcacagaggaagaagaagattagaggtttttttttttttttttgaaacaaatgaataacgtttatctttaattaggtttttcgtaaggaaacgcctatgaaactatggacaaagactcttatcaattattctagagaaaaaaaaagaagtaattttgtttattactctaaaaaaggtttgaaagttgagaattcttaaaaagtttttttcctagttttttccatgattttattcagttaaaggaaacgcgttttctgtatttgtaagtacacttaagttttttttaatctttccgtttctacatagtattaaatttgaaatgtttccaattagtatttattgacttcttgggaagactatctgtatccaatccatcattacaaaggggtaatgtatcagattgttgttacactgtatacaacaatcaagagggttttcttggattttcatcaactattatttgattaattaaaaaccctaaaaaaaaaatattagaagagaagcgttttggagaagaatactaaaaagtggtgtcagtaagaaaaattttaaagactaacggagctctttttcttcttcatcaatggcggatcctagtcaagccagtttctgggcgcaagcaaatgcgttacttagaaagaacttaacctaccaggtatgtgtatgtgtgacaaaattgttacgatcgttgtttgaaaacatggttttgaatcgattatatgacattttgggtgggtgcagaggagacacatatggacgaatattaggcttgtcctggttccactactcctttgcttatttctcctagggattcaacttttgcttgatgttgtggtgaataaggccgctgatttgactaagtgtggaagtcaagatgatttttctattggtgattgtcccatcccaaaccctccactgttgcctcccctgttacagattccagaacctgaatctcgtgctgtcagcggtggtttcttttcgtacaatgaccttcctgataagtcttgtagaaaaactggaacttgtcctgttactatacttcttactgggaataaccattcccttggtcaaggtatatgcgcttctttgatacatttactctctattttttgctatgtaacttatcagttaagtgtttctactacagctttatctgggaatatgtttggtggttcgtttgctgtgaattcctctgacctcttgtctagtttagcctataatgtcttggtacgttttgatatttctttcaatcaagcaagtgcaaacatttatctctctgttttagatttttaactagaggtcatgtgcatgtgagtgacttcagggttcaacactagcactaggcacaaacaattatgcagatcccgggattgagtcggattttcctatctacagtatccaatctcagtgcagtccaaactctacatggccactctcatttggaaaaattcatacaggtagttttttttttttatgttcaaagcttgagatgataaaatgaacagtgaaaaatgtggttttcttcactttgatgatcaacttagtggttgtgtctaatattatctcagcggtgacgtgtcttcaagggttgtctctatggagaaataactctgtagaggtcaatgatgagcttttcaagggtaattggaagggaaatcctgagaggatgacaaatgagattgctgcaggtttgtttcattttcttctatatacatatgcttaagaatcaagctgtgatttcttactgttgatgtatttttgttgtctttagcatatgatctcttgaatacggatagaaacaacttcgatgtgacgatctggtataactcaacaaacattgatgacccttcaagggcacctttggttcgagttcctcgcttgctcaatctggtatgaatctaagtcacgctgtagtactcttttacatgtttctgttattgaacggatccaattaatgttcacaccgtgcaaaacttgcaggtatcaaatgcttatcttaagtttcttaaaggccccgggacgaggatattattcgagtttgtcaaagaagttcctaaacaccaaactaaattcaatcttgatatcgcttccatgctaggcccgctttttttcacttgggttgttcttcttctattccccgtaagttatttaacaatttcttactttatgccattgcaagtactaaactcaacaaagtattcatcacattatgtggttgtgtgtatataatatttgcaggtgatcttgacatcattggtgtatgagaaacaagagcgcctaagaattataatgaaaatgcacgggctaggcattggtccatattggatgatttcctatgcctattttcttactctatctatgttttatgttatttctttggtgatcttcggttcagcgataggactcaggtacttccggctcaatgactacagcgtccagttcattttctattttatcttcgtaaatctgcaaatctccttcgcctttttagcttcttccatattctcaaaggttaagactgcaacaggtactaacatcacatttcttgaatcatctcacgaatatgttatatatcaacggcttcatgataaaaaaaaatcggcttataattgtagttgttgcttatacattggtgtttgcaagtgggctcttgggaatgtttctctttggtgaactgcttgaatctcccacattccccggtaagttaacaaaatcaataccttgaagaacgaatacacatgtttatgtgtgaccacttaagtaactagtatatatctatgttacagaaaaagggattcttgctttggagttgtatcccggcttttccttattccgcggattgtatgagttcgcgcaatatgcctcccggggaaacgggatgaagtggaaagatctcaaggaaagcggaatggataagctgttctacctcatgtctgtggagtggtttgtgattctcattgtggcctactctatcgatcttctttcttcatcagggagaagccctttcgttttcttcaagaaatcatcttccctaccaagtcctagtgttcaaaggcaaaactctgaaaacgttctcattgacatggaaaaaacagatgtcactcaggaggtatgaaaaacaaaaatcttattttctttccatgtgactccaacttcaagtcgttctgataaaaattgaaaatattcagcgggaaaaagttgagaaattgaggaaagaagggaccacggggcatgcgatcgtgtgtgacaacctgaagaaggtgtatccaggtagcgatggtaacccgccaaagctagcagtaagagggttatatctcgacgtgccttcaggagaatgctttggcatgcttggacctaatggtgccggaaaaacctctttcatcaatatggtgagtttttgcaaaaccactattcttactctaaattacgtttcagggttgagttttgtgacattgttctgctgcgctagatgactgggctcctgaaaccaacatctggaactgcgttggttcaaggtttggacatatgcaaagatatgaacaaagtatatacaagcatgggagtctgcccgcaacatgagtaattaacattttatcaattcctttaccatacaaataaggaacaattgatggaatggttttttttctttttttttctgtcattatcttggtttcagcttgctctgggggacgctaacgggaagggaacatcttctcttttatgggaggcttaagaatatcaagggctctgctctaatgcaagtaagtttatcacttactgatttctttatatgtatgttaatgttaattggatatcatacattttttaaggctgtggaagaatctcttaaaagcgtcagccttttcgatggaggagttgccgataaacctgctggaaaatacagcggaggtatgaaaaggcggcttagtgtagccatttcgcttatcgggaacccaaaggtacaactcctggtctcttatatgttatgtgattttgtaagcaatggctcgaatttattaacgaatccattgtctgatttgttaaaaggtggtttacatggatgagcctagcactggacttgatccagcctcaaggaaagatttatggacagtgatccagcgtgcaaaacaaaacacagccataatcctcacaagtattttcaatctctttctcactactcactcttctatatgtgatcctgattgatgccatgaaactgaacttattactcttagttaagactcattttgttaaattagaaagtggtggatattttaacctagagaagcttgtccctcacgttttcagctcactcgatggaggaagcagagtttctttgcgaccgattggggatttttgtagacggaggcttgcaatgtgtaggaaatccgaaagagttaaagggaagatatgggggatcatatgtcttcacgatgacgacctcagttgaacacgaggagaaagtagagagaatggttaaacatatttcaccaaactccaagagagtatatcatttagctggaacacagaaattcgagatccctaagcaagaagtcatgattgcagatgtgtttttcatggtggagaaggtcaaaagcaaattcacagtttttgcttggggactcgccgatacaactctggaagacgtcttcttcaaggttgctacaactgctcaagccttcaactctttgtcttaatgattcatgctacttagggcatcactgttgttattattgttcaagttagggcttaattattaacaaatttaatgccttaagagacacgttaactgcaatacactattaatcaatgttttgcaatctgatcaataatctggtactgatagatcttaaaaacattgcttctagttaataacagcaataagatgagtaagagaaacattctaaagctcatcaccgtcagtgaccctacagccagagccagtagctaaacacctcgtcatgatctttatatgctcttgatcgatcccaaaaacttctccaatattcacgactccaggattctggctattgtaaaacgagaaagcggtggctggttcaaagccaccgctcaagcagaaatgaagcaatcctttagggaagacaaaaacatcgcctttttgcagaaccgtttgaaaaatcttgttgttagtatccacaaatccagcaaacacgactcctttgaccacaaagagcatctcagatgacctcggatgcgaatggaacggcacagatccgtccctttcaagatcagtccgtgagaccgagaggccaagagtgttgagacctggaaactctaatgcagtgagcaatgtgacattcgactggagataattgtctgtatctccagcttctgtaagtttggtggacttgaaatcctgagcggtaatcttggtcgggttcttgcaaggatagccgttgatgaagaagatgctctgttctcccggagccgtgggacatgtgtcctgcatattgtccgaatccccagagacagataagaagattgcacaaaacacgatcacgacgaagaacttcatccttgtgattatgttacgaagagtactcaacttgtcattaaccagatttaaacagaaaatttaaagaaggccaaaaaatactctgtttctaggcgatgtggcttagggttgagtacactacttagtggcattttgagtaagattatgttctaaggtgaaaatcgcttctaagtaatatttttcactgattttccaacttattgatgttgacattattacttcttcaagctctaattctattctgtttacctgaaaacgcaattttgctttgctataacaggaaaccaaaaagaagcttaactgccttagcttactttcatgaaactctcgatatatttctctaatgagaaagtacaatggtttagttaacgaaattatacaattgaaagggacaaacgttcatgtccaaaacccaactagtccaagaaaggaaaaacttggagattatttgaaatggagccgggaagaacgacgtttctctagcgcccgttctcaagtagggaagtatcggtttcatcgtgcttttcaacgctctgaagaatatctttgatgaactttatgaaagagcagagtccacccaagaaattatggtcgatgacaccgtttccatcaagaacatgcgcgaaatccaccagcttcacttgtgcccgtggtgccggtgcatcatctcctccttgcatcaagattgattcattctcgtaaatcatcagaatcgagcaggaattgaaatggtaaagcgtttgggtttcgaaccaatctttaagctccaacaactgcgctaagatcccgttacaaccgccataaacctctgatgcaaaagcacagtttggtgtcaagttagagtcagcgggagagttcgatgacacaaacttcctcagagccaatctagcaccatctgcattatacccaagaacaagcttcttctcagctctccaaaaacttgattcttggtgatcaaaaatcttaaaacctgaaaccctgaaccccaacgaaaccgtggtggtctgtctatctttcttaatacatttcttgaagtattcttctgatacatccgggtaccatgtcctagatccaatcttaacatccattaccgacgggtttgcgtaccctgaaacaacatcatcaagaacaagatgaggaagcttgccagatccatcagatgcttcaactagctgagtgccgtgatacaccgggaagtatctatggatgtgatctggaaccttcatgttcgatgtgaaagactcatagaacttagcctcgtgttcgccacgagaatctccctgaagtggcttgaagaaccggccttggtcatctacgagtggaccgagcttcccatcactagcaatgtgaccagcaacttggtgttcagggaccttgagcatcttctttgtggaagagtatatatactgaagaataagaaatcaaattcaccgttaagaaaaaattgaaactttctcaagacatgttagatctaaatatttacagatcattcatcttaagtcaaagtagacgattagatccgagtaacaaattagggttactctaatcaaccaaacgcaaaatctaaaaatagtgtctttcttatgaatcaaattagggttcttcaatcctttccacataaaaaagagaaagaaagaaagaaaaaaaccaatcaagtctatcagaattccttgagttcatcgccgaagaagagtaataaaaagcgcgtaatgaaacaatcccagagtcacaccatgacaaaaataaacaatttgagatctctaaaagcgtacaaaaagtgaaaagtctttagattagaataaacattgtggaactttagaaaagtaacgatttctggtgataatacataaatattgaattggagcaacacgaagaactttgctcaaaggtaagagatttatcaaagaagaaatatattaccaaacaaatctccccggagaaatttttgagatgctcaaacgatagcaaaataagtgtaattgttgattgttctatgcaaaaaattcccaagcaaccttgtcgggaagacgaataaataaagaaaattaatttaagtaataattgaataaattctttatggaaaaagattgaatcactaaaccggacccgaatgaaccggattgtagagataaccggttttgaataaatagggcgtcttcatcagtttttacaaaattcagccgtcacctcctacctcagactctattactccggccggcgaaattagggttaggtaataatctctacttcgagtgtattactctctttttgagtcatccatggtttttggtatctatctgtagaagccctaatttagagctcattcactctcaagggttttaaagaggtttttgctttgtttatacataaatgtttcgtctttgtgtattcaccaatccgatttttcttctttacagaatctgtagctgtttggtgagataagaataataaatgggtcgtttcaaaaacgtaagtttgtgtttgagtttctctacgaattcgtgttcatatcttttgttttttcagtactatgtgatttactggtttgtgattgatatagaataagaagagtagggtcattgggaaacctattgcgaagaaaaatcaagaggatgttagtcatgtcactggggataagattcccaagagttttgtcttctcaagaatgaaacttgctggccctgttaaacaactccagatggatttgaggaagctcatgcttccctacactgctctcagtcttaaggtctgttttaagctcttgtctgatacgttgtagtattgtaagtgttatgtctcgagggttgtgattttgattgttgctaatgctagttgttccattttgttcatcatcttctttccaggagaagaagcggaacactttaagggactttttgaatgtatcaggtccaatgggtgttacacatttccttatgctttcgaaaacagcgtcttcactgtctcttagagtagcaagaacccctcagggcccgactcttaccttcaaaattcatcagtattccttagcatcagatatagctcagtctcagcttcgacctagatgtcctcaagatcttttcaagagtcctcctttggtaattaatctcacttctctaacgccaaaacttggttttgtaatatgttgcctgagaatgtaaaacttctcttggtttagattgtcctttctggattcggttctcaagagttgcatctgaaactggcaacgattatgtttcagaatatattcccagctattgatattaacactgtaagtttgttgcctagaactgaaaatatatgcttcgttattgattgtaacttgtttcagcaatgtgattttgttcttctgatggtgaaatatatcaggtcaagctctccacctgccagagattagtactcttgaactacaacaaagacaccaagctcattgatttccggcattattctataagacttcagcctgttggagtatctcgtaggatcagaaagtttgtgcaaaatcatcaggttccagatcttaggaatctgcaggatgttagtgattttgtcaccaagtaaggatctacattggttcagtctgtttgctgcatcgatgtggatggattaatgtgacatttcgtctttcttttttgttgtccctttttgtcagggctggttacggatcagagagcgaaggagatgaagaagcggcaacagtgacactatcatctgatctaggccgagttaacaaaggtgccaccaagagcgcagtgaaactgcaagaaattggaccaagaatgactatgcaactcgttaaagtggaggaaggattgtgtacaggaggaatcatattcagtgaatatggtaaatgttgatcttatttccttacattgtggtttatatctcatctattacaggaccaaacatctgacttttgggtttgtttcagaagatgttgatggaaagaaagaaaagttaaagaagaaacaggatgaagaagaagaagaagatagtgaagaagaaggcgaagagggtagtgaagaagatggggaagacatggatgaggattttgaagattgaaaagagttaaaatagagtaacactgttttcacatgagacttgagtgttgttcatcaaattttgttccttggatctctgagtagcgttgcatctattgtctgattaaactacaattacaaagccttttgtactattaaactaaatgtcttcccggaattcgtataatgaccgaattaagccttttgtactattaaactaaatgtcttcccggaattcgtataatgaccgaattatttactgttcttgtttagcaagttcgtatgaaatccgaagacaaaaaataaaagagtatctcagattgtcaatttttgaacttatcttactaatggatttgtctgcatattgatgtgaagattccatgtgttctttcttttaactcgaaaaatctaatctcaaactaactctgatcttcaacttttttgatgaatcattcaaccacttaagtcccatgagttggctgataatcttaactccaaacgaaaaagaaaattaagttcataaacaagaagagtaaaaaatttggtcaaaatacgaattccatgaagaaatttagtttagtataactcccaaaaaaaataaagatatgaaaatgatagaaaaaacaaactactgtaaatcaatgatatattatgaaaaatacatgaaaaaactagaaacagcatgtcaaagttttggtttaagaacacaaacaaacaaagtttacaaaaaaaagaaaggaacataaacaaacaaacagataagtgttttttagtcgcaaaagagaagaaaaaaaaaaacgagtattgaaaagttgagatatacgtaatacgtatacacacaggcagttcaagtacaaaagacgcaagtacaaatctgttgaggaaactaacggctttccgtctcgattcctgtgggctgattaaaattctgtagccataacttttttgtgatgccccccaaattttagttgtttctaaacatacacccctttgttttataattattttagaaaacccccatgtatcttcttcttcttttgataggatgtatcgggctcgttaatctaaatatggaattatccaataaaagcactgaaaaaaacaaatctaggaacatcaaatgcgttttttaaagatttaattagtgcatatatatatgagaaaacatcgatttttcgtgatttagttttagtttacttttttaaaaaaatcaaacatagcaaattttactagtttaaaatttgagaacatattaattctttttcaacaactaaattatcatcaatgagagatatctaagggtgtcaaaatgggtcaaaattcatgggtcaactcaactcaactcaacccatgaaccctaatgagttgaaaattttgactcaaatgagttgatgggtcaaatgagttgatgagtcaattggtttgatgagtaaaatgagttgggttgtaatggttaatggtttcaatggtttacccaattacccatcaaattttgtaaaattgaattaaaccaactaaaatctctaaaccaataccaatttaagtttaaccaacacatctaaaccaatttaataaaattaatatttttccaaatttcttaaatatacaagcgatgaaattgagaaaaagtaaactcgtaatttttccaccaaaaaacataaacccgtgattttcccgccaaaaacataaacccatgattttcctaccaaaaacgtaaatccataattttcccgctaaaaacgtaaactcctaattttcccacaaaaacgtaaacccgtaattttccttccaaaaacgtaaacccgtgattttcccgccaaaaacgtaaactcctaattttcccgccaaaaacgtaaacccgtaattttccttccaaaaacgtaaacccgtaattttccttccaaaaacgtaaacccgtgatttttccgccaaaaacgtaaacccatgattttcccgccaaaaacgtaaatccataattttcccgccaaaaacataaacccgtaattttccgccaaaaacgtaaacccgtgatttttccgccaaaaacgtaaacccgtgattttcccgccaaaaacgtaaatccataattttcttgccaaaaacataaacccgtaatttttcaccaaaaccgtaaatccgtgattttcccgcctaaaacgtaaacccgtgattttcccgccaaaaacgtaaatccataattttcccgccaaaaacataaacccgtaattttccgccaaaaacgtaaacccgtgattttcccgccaaaaacataaatccgtgattttcccgccagaaacgtaaactcgagattttcccgccaaaaacgtaaacccgtaattttctcgccaaaaacgtaaaaacctataatttttccgccaaaaacgtagatccgtgattttacgtacaaaaaacgtaaacccgtaaaaagtggaatccgtaaatatcttaagtttgatgataatgaattaataattattattatttattattgttttataataataattaattaaattattacttaaatgagttaacccatttaacaactcaacccataaaattaaatgagttatgggttgacccaaacccatttaacaaaatgagttgggtcaacccataactcatttaaccctatactcatttgattatgagttgagttgagttgggttacccattttgacacccctaaagatatcacaccctaaagatatcacaatctaaataaaattgagaaagaagacgtttttttgacaatatgaaaatatgagctaagtttcatcgcgtcactttttgatttataactgttgatttaatttgttatttttaccaaaaaaaaaagaaaagaggttatatggaaaatgactagtagctaatcgtattagcgttgacaacggatagtgtgatatatatatatatatagtcggacgattagctagctcataaagctaagtgacaaaactaattatcaacggtgaatgagattggtcggcaagtaggtagagcgtggacagatcaattttcagacagaattcaaagtattaatgaccaatttgatacccttgaatgaagaaccaaactaattaaaacgtgcaaggaaaaaaacgtgtatctcctcctcgtgtattcacacctcctatttaatttatcatggatttattacttatattaattgcagatatgtttttcctcaaaatcacatgcaattgtttcctcattcttcaacaaattaatattacgcttactactatttctcatttcaaacttggtcaaatttacatattcagttaagacaaaataaaattatatagttaatattttccaacaaattaaaaatatacatttatattaatatatatatatatatactattgttttggtaacgttatctagtttcctatcaaaataattttaaatgttacattaaaaatacaaaaatacatttgttacaaaatggtttgtattgctatattataagaaagaaatacatagaattgagttgttgacaaaaaaaaacatagaattgatttaatgtagcttaaaaaaagaacataacttttttaaaatttgttttcaccacataacttttttaaaaaagtttacaaaacccatatttttctaagaaagataaacaagtgtagtaaataatttaaattttttttcttcaaaataaactattttctgcgaaattaaatctaaaatatttaatggcataaagaggtaaataaatgaaaagtattagggtaaaattacatatataagtataatatccgatttctctcatgatgtccttgtttatatttcatccacctctcctctgcacaatcttcttcttctcagctctctctctctcaatctcgagatccgttctctttaaatctgtctctttctcttcaatctcattgtctttgagctcttttgttgagatcaatctcagattgaaatcaatcatcatagacaattaagttttgatttacgttttttttttaatttcttcatcagatctagtttttaccaataacggataaattcaggtatgttcatcatcgtagatctatctctgtctattgattcaaattggatgtatttagattcaatcctgatctgatcttttggctttttgcgatcgcaagttttgattggtgagaattcgtttttttctagctcgatcgaactctgtagtgtagatcgagacgaatgtagagtttcgtgattcgtttttggttatatgatgttatgttttaattgatgcatgtgagttttttttgttttttttttgtgtgtgtgttgtgattcattgatctgtgagaaaagttttctgaatcatggttgtgtttattgatttgttggagtatgaatcatagaagaaccaatgcaatcattttgaaaaggaaaacaaccttttttaaaaaactttattctcatttcgcgagtgtttttagtgattgtggtaagtgggtaacctttttgatgttaggattactattgtttgatgttttttttttcattgtttatcgtgcaggtcttagccaatcaccaacatggcgactggggcagcaactgagaaccagtggctcaaagggagagtgaaggctgttacctccggagactgcttggtgatcacggctttgacccacaacagagctggcccacctccggaaaagaccatcactctttcttctcttatggctcctaagatggtcagctttgttaaaaaagcattccttttcacaactctttttactaacaaaagttttcaatttcatagctacttattatgtttctcattgtttggtttgcctttgtttcaggctcgcagaggaggtatagatgagccttttgcatgggaaagcagggagtttctaaggaagctttgcattggaaaggtgctttgtttaaactctttatcacttatgtgttataagttatggaattgaaaagttttcttcatattaacagtttaaaccttttttttttcttgagcaggaggttgctttcaaagtggattacaaagtggaagcaattgccggaagagaatttggctctgtttaccttggtaacgaaaatcttgcgaagcttgttgttcaaaatggctgggcaaaggtgattaccgctttatttcatagatagccttgtctaaggtatgatgctcgcatcagctttctcatacggtggaggaatgcttgtactttatatgcacaggtcagacggccaggtcagcagaatcaggataaggttagtccttacattgcggagctggaacagcttgaagagcaggctcagcaggaaggatttggtcgttggagcaaggttggtgtctcttagtctgtttctctaaatttggtttatcaaaacacgtctagagttcagtactgaggaaaaacttgttgggctgtcgaagtttctaaaccagtggtataattctatctattgtctactcaaaatatggggaacaaacttgaagttatttgggtttttatctctgtgggattctcctgagagttttattattatatatcttccactgaaattgacttgggagagtttgacatctgtatttgatcttgatttggtgatggaattaacttgatacaggttcctggtgctgctgaggcatctatcagaaatcttcctccttctgccgttggagattctggcaattttgatgccatgggtcttttagccgcaagtaaaggcaaacccatggaaggtattgttgagcaagtccgtgatggcagcaccattcgggtttatcttcttccggaatttcagtttgttcaagtatttgttgctggactccaggtatgttatcttgtttccttgtttttactgcgtgaggagttgacattttaatttcatggtgtaagagtgctggaaattttctatgtaggctccatcgatgggaaggagacaatcaacacaagaagctgtcgttgatcctgatgttacagcaacttcgaatggagatgcttctgctgagacgcgtggccctctaacaacagctcagagacttgctgcctcagcagcatcgtctgttgaggtttcctctgatccgtttgcaatggaagccaagtactttactgagcttcgtgtgcttaatagagatgtaaggaggttttacaacaaattaacttacacgtatctgtatttgacatttagatgatctaagttgagctggattgtgcaggttcgtattgttcttgaaggcgttgacaagttcaacaatctgattgggtcagtatactattccgatggggatacagttaaagacttgggtttggagctggttgaaaatgtacgtgcctaaactagatggttatttggttttcgacatgattacatattgaactaattggccaacaaagcttggctttgccacaacgatgctggcgtaacttaaagatataagattaacgttgacctgttacttagtttgtggttttcttggtagatttgatacagcagttgtgatatacgaaatgcaaatataatctttggatggtgttgaataaaagttgtgacactggctactattccttttgctcagggtcttgctaagtacgttgagtggagtgccaacatgttggatgaagaagccaaaaagaaattgaaagctacagaacttcaatgcaagaaaaaccgggtgaaaatgtgggcaaactacgtccctccagctagcaactccaaggcaattcatgaccagaattttaccggaaaggtaatatttgcttgcacacatttcttggtaaatatatttccttccgcacatttcaccagttcttagttcttactagtttgtactctcttcaggtagtggaagttgtgagcggggactgcttagtagttgctgatgattctatcccattcgggagcccaatggcggagcgcagagtttgtctttccagtatcaggtctcctaaaatgggtaacccacgcagagaggagaaacctgccccttatgcgcgcgaagccaaggagtttctgagacaaaagcttatcggaatggaggtatctattgcgttgtgccttcttacttaaatcatctcggtgtgccacacaggtcacgatcactgacatccattttcccggttcaggttattgttcaaatggaatactcaaggaagattagcccaggagatggtgttactacttctggagctggtgatagggtcatggatttcggctcagtgttccttccatctcctaccaagggtgatacagctgtagcagctgcagcaactcctggagcgaatattgctgaactcattatttcccgtggcttagggactgtggttcgacatcgtgactttgaagagaggtcgaaccattatgacgctctcctggctgctgaagctcgtgctattgctgggaagaagaatatccattctgcaaaggattctccagccctacacattgcagacctgactgtggcctcggccaagaaggctaaagatttcctgccatccctgcagagaatcaaccagatatctgccgttgtggaatatgtgctaagtggacatcggttcaagctatacattccaaaagaatcgtgcagcattgcctttgcattctctggtgtcagatgtcctggccgtggcgaaccctattcggaagaagctattgctttaatgagacgtaagatcatgcagagagatgtcgaggtaatatggacatattacgccaaagatacatctcaatttttctttcttctcttttcttttctatgaaacttacatagtttcttataatcacatagattgtagttgaaaatgtggatagaaccggtactttcttgggatcaatgtgggagaaaaactcaaagacgaacgcaggaacatatcttcttgaagctggcctggcaaaaatgcagactggctttggtgcagacaggattcccgaagctcatattcttgaaatggcagaacgatctgctaaaaatcagaaactgaaggtaaacatcaatacatgatatattttactaaagaaatgcatcttgttaaaaaaactgtacttgctaaaccgcatgatgtcacagatttgggaaaactatgttgaaggagaggaagtagtaaacggtagttctaaagtagaaaccaggcagaaggaaacactaaaggtgaatttagccgtattattcgttctacaagtcattgaccggaatgtctcctttgtcttcgtctaaactaaaaccaaaacctcaattcactcttaattgcttaacacttcaggttgttgttacggaagtacttggaggcggtcgtttctatgttcagacggttggcgatcaaaaagtagcttcgattcaaaaccagcttgcagctctgagtcttaaagacgctcccattattggatcgtttaatcctaagaagggtgacatcgtccttgcacaatttagcctcgataactcctggaaccgcgcaatggtaaattataaagtttctaaatatgccaaccatgatttcttctttttttactatcacttatggttgtttattgtatttcgtatttgtgttaagattgttaatggacctcgaggagcagttcaatctccagaggaggaatttgaagtgttctacatcgattatggaaaccaagaaatagttccgtacagcgcaatacgccctgtggacccttcagtatcctcagcaccagggctagcacagctctgcagacttgcctacataaaagttccaggcaaggaagaggactttggtcgtgacgccggagagtatttgcataccgtaacactcgaaagtggtaaagagttcagggcagtggtagaggaaagagatacttcaggaggcaaagtgaagggccaaggaactggaactgagctcgttgtaactctcatcgctgtcgatgatgagatctctgtcaatgcagcaatgcttcaggtcagtgcttcgccttctcttcaactcctccaaaacttaagagttaagagtattgtctgaaacctgagagtgaaatgtgttgttatgatcacaggaaggaatagccaggatggagaaacgcaggagatgggaaccgaaagacaagcaagccgctcttgatgctcttgagaagttccaagacgaagctcgcaaatctaggaccggaatctgggagtacggagatatccaatctgatgatgaggacaatgttccagtcaggaaaccgggtcgcgggtaagtttcacaccggtgaaaactttatggtccaaaaagacatcatgaggaggaagagagaatccatcgtttctctttaaatgagttaaagaagcgagatgatgtttgctcaaactttttgtaacgtttagaactctttttttttttttcttatcttttttcttcttttaatttatcaatttttttggttatagacttcaaaagaaattttctatttaggagtacgaaacgagacgatcttcttgttctttatttttgcagttaccaaaatcgacaacatgtttgagctttctttattgagaaaatagacggtatatcactttcacttattcattctccttttctgactctattattctctttttcattcctagtggttgatatcgctaaaagcgattctattctgctaagtgtacaacttctgtaatttatagctaacactctttcaatcttcccaaaactttcgttataaaaactcttttgattcaaataagaaaactctaatgtttcaagcaaccagttgttactactgaaggggatgaaaaagaaatagaagctacaatttggctgtcaacaaaccgtcttcacatacatattcctcctttcttttcttcgcccaaagacaaaaatttctcaaacttggtgttacaccattataggctacagcagaaaacaacattcaacccaaaaccaaaaacagaaaaataaatctgaacttttctttcacatcttcgaaaactactttaaaatcttgttctaattatcacgtctcggttgccttttgcgtggtgccgcggtttcttccttcttctccgcctcatccccactctttgaactctccgctacttctggtttcttcttttccacaggtgccgccgcctataataccatatttattagattcttctcactatccacaaatgaccattgtgcataaaactctttatggaattttgtttttacctttttgccaccaaagataagcttgaggaagagcgagaagaatacaaccacaatggcgacgaggacaccaatggttaagtttggttgttgctcggctttctcaatcagttcctacaaaacacacatttcacatcatcactcaaggtcgagtcatcaacaaatcacatggtaaatgagggagaacttaccgtgatcttagacttgtaggcacttaggaaagataaatctgcaaccttgttcaagaggtcgaatacaaccttctgcaatatcatgcacataaatacagcggtaagtatttatacataaagctttataatatatcaatattaagtttaattatggggaaaaatcaatttacctggtagctcttgagaccatctgcagagccagcagcttcctcttctgccttttgtttctctttctcaacatcgaatttgggcttccaagtggtctgtctgtaagtctcagcgaccttctcgtctttcgctatcaagatgttgtcaaacaagataccatcttgcattgtccagatctcaataccgatggctgcaatgggttcgtaatcgggtctgtctagctcaaagtagtcagggttagggatatctctgggtttccagattcccttgtaagccgggttatcaataagaggtgagctccatttgcccttgtaagcaggattcctcttcattggtctcttccattcaccacaaccaggtgctgcttcacacttggggttgtcaattttaggagcctcccacataccatcttcctcatcatcccaatcttcaggcttggtcgcttcggggtcgtcgacctcctcaggctcatcatctaaccatccttcgggtttctcagcttcctcatcttcaatctccataggtgcatcctcatcccagtcctcaggcttcacggcatttggatcaggaatcttggctctttcgtcccaatcctctggtttcttgtcttcagggtcagggatggtcttggcagggatcaatgcaggctcaaagtcttcaccagagagtaaattggcctttttcttctcctctccatcaaccaaaattctaacctcgttgtcgggtttcaagatggcggtgtagacatgggaaagcttgtcataaggaacagagggagggaacttcagatggtgttcaacgtactcgccactcttgggattcttgtgcttcaagatgaaatgcactttgttcgtacctccacacttgtcaggcccaaacatgatagagtaaggggattcactatcgaatccctgaggtgtccatccagcttcctgaggacggaggtacttcaagtaagcaccaccacactcaagtccttcctggaaacgaacctcgtactgaagaacaacagttccttccttgaggtttagaggctcgtcaagctctttcacaattccatacttcctagccttctcactcacgagaagtccataatcctcatgtccttcactctttgcatgcttccatacacctgaaacagataaaatcgtctttaacaagaagcttcaatgcaaaaatggaaaatcatcaacaacttcaagtcttcaacaagaggaacatattcgatttgataaccaaaaaagcaccaaatcagaattgattaacatccacatagtcagatttgattcaaactactcgatttgattcctctataatgttgagtgcaatacatcacagtaagtaagtagtaattgaattccaaatacagatatagatcagaacgatacactaactacaatgcagtgggaattcaaagacaataatataccttcgtaatcactattcttcgaaacgatccagcggccatcaaaaggctcatcgaacgattcatacagaacctgaaacagaaacgagaatccaaaaccaaacgaactcagctaaacaatgatcgatctaaatcttcggatctacaaagaacagaggaagaatcgaaattaccgtttgatcgtcacagtagcaaagcttctggaacgaaacgaaagctaagagaagcaaaaacacggaaaatagttgccgttgtctcattctcggaatctctaaaatgcaaaaggaaacctcaggcttagatctaaatcggtgataagccggagaagtagatcggaacaaaaatccctcgtgaaggagaaagagtgatatgtatttttcggtttctctgaataaattatatattcaatcccgtagacccggtcgagtgtgtcattttgttgtttccaccaatcaaatctctcgccacgcgaagctaaccaatcataacaggccacgtcattcaaaagcgagctcttctacgtgcactgttattttgctatatacgtacgtacacatttaacagctagttgagcatagttattgggcctgggccattaaagtttttaagtccttactcttaatgattgttacattagtaatcatagtttattaattttaattaaatccaaactatgacaaaactttactaaatccaacattcttcttcactttcttgtctctgtctattatttctctaaccttaactacttcctcccatctctctgcgtttgcatacatttccaccataactttatacactcctccatcttcgggactcaacgccttgactcgatttgcggctttctccgcgatctctatgttcccgtggattctgcatccgcctaacaaaccgctccatgctaagagtttctctctgtttcctccatctttaggcatttgctcgatcatttccgctgcttcttcgatcaatcctgctcttccaagcaaatccgccatacacccgtaatgcttcatctctctattaacatcatacaaagatctcatttggtcaaaaaggttcctggcttcatcaactagaccagaatggctgcaacccactaaaacacttatgaaggttactccgtctggtttgattccagaactaaccatcttacggaagtaatcaaccgttagctcaccgttaccgtgcattgcaagaccagtgatcattgcattccatgtgaataaagttttatctgaacataattcgaagatctccatcgctgtatcgatgaaaccacattttgcatagaaatccaccaatccagtagctaagaaggaatcaatgaaaagtctcttccttttcgtgtaatcatgaatagctttccctttttgccaatcccctgattgtgcacaagctgaaagagttgaaacaatggcgacattatcgggttttagacccaaagcaaccatctcgtcgaagagtttgattgcttctctgcaatgattcatctgcgcataaccagaaatgagactattccacgaaaccaaatcacgtaagggcattgaatcaaacaactctcttgcacgaacaatctcacgtgccttcactaacccgtcgatcaacacattgtaggtaacaacatctctttgaggattttcgtcgaacagttgcaaggcactatcgattggagcaatcaatgagtaaacacgaatcagagtgttcaaagtgaacaaatcagataacaatccgaatctcaaagcttgacaatgcagagtcttgactaatgtaagatcaccattcttctttgctgcacaagccttgaatacgaaagggaaagtgtggaaatctggaggaacagagcgacgtcgcatctcgacgaagaaacgtttagaagacagagacgacggctcatgaagcgtacaaatcctaatgatcgtattgaaacaaaacgttgaagggtttgtgatgaatctgaaaactgaagtcgcgtagctcacgacctccttcgacgccgacgcagacggtgaaatagaggtgatggcgaagaggacattggcgaaaacagagttttgtttgaaatcattagagattctgccggaagtgatgaattgggcatgaaactgatgcagatgtttaagggttctacacagcttcaagagatatgaacaactactataatttatcattcagttgatcaaagagcttcaccagatcctctaaagttttctcttttaaagggaaacgaacgatttagcataaaaactattttcttaagaaatgagtgtttatggactcaccaaactactaaagaagaatcaagaatcaatcagatcaagttacattttctacactcgaatgacctttaccgaatccaaaaaaaggaaaacggaaagctcaagttttttttttgtcgtcaccatcaaggagttttcactgtatctctctgtgaacacaacattaggtttcttgctttttttaatcaagggcaagatttttcttcatagcttcgtagacaaggtacgaaatgcttgcggaaggaatgactttgaagaagttggggaagattcctctgtaaaaaccttttagaccttcgcctcttagcgttttcagaaactcttggcccatgcttgtttttgagctatcagcttgcattctgatgataaatgactaaactcagtttcaaaccaaaacgaagaaatagataaactcaaaaagctaaagattgtgagtttttaccttgttcttatgacctgtaatgggtaaacacacgatgctccaagagctccagaagtcattccacatcccagttgtatcaaaggacctggctctgcacatcatatacggtttagtatcatgagaaatatcaagaactttcaaggcacgataagtaactaacccgcagtgtcatgaagaaaatgtgcccttgataagtctttaagagtttcgtaagcagcaaggtcaattcctgcgtaagggataatcccaattagagaaggacaaagacccctgtaaaaagctcggggtccttcttgaatccaaatatcctttgtgagtttccacagctttggtgtcccaacttcactcacaaaagtctgtaaccgagtcttcacgagatccataggataaatagctgtttgagccactgcaccagccaatccaccagccaaaagcctcccgcttgtaccaatgtcaccatccgctcccccaattattggtttcagcatttcataagcagcaaactttatagcgctttcaggagcgactttcgctacatttaacccattacctctgaagaaacccaacaacttatcttctctccatattttcttaatggtcgggacaacacccaaatttgtccgttgaacttgcagagcaactttcagacggtccagaggcgcagttgcggttctagaaacagcccctgctattcctcccgcgagaagtaatttgcttctttgagcgtgtgcacttataccatctggtataacagcttgctctccaatgtctattaagcatactctttcccagtgatgataaatgttctcaattgtagcttcatgagggtttagcaaaagaaaatccctccactcctcaaaagttataattccgttgttgtccttatcaacatgctccataaaagaagcaagttcctcatctttgattttaatgcctacaagaccataactgtgaagttaatttactcacaaccaacggttttgcaaacaagggctatgtcaaaggaatggcagacattgttaatacgttgagaatctacaaatcaagacatttcaattttcaagggatcaacgaacaacaacacacaaattcaagtcaccaaccaatctatcagtaactaacaatttaagcaaaatccacaaccataaacccataaaagtttcctcttttgcttatggaagatagttgcaaagtaacagtagaagaatggaacagtataagaatcaaaaatcacataccagctttatcaagagcctcccaaagctccgctggacaaatgtcgccattgtgttcaatatcaatggcctgaaaaatcttgtacaactcaagctctttagcatccatgtaacgacgaaactcctggtagtccacacgcccatctcgattcgagtcgcagactttaagaaaatcactagcgtacctatactttggaggaatactaagcgaagacaaacctttctcgatctgggtatcgtctaagaaccctaacttcgaattgtcgaagaattcgaacagtttttgaatcctgatctctctcttctccttggtctctcgtaatgccaccaacacgtgctccattgttgcttctacgggcttcttacccggattttgcttggatttctctgcctccattgctggttaacgatcaatcgagaaacccagatgagcaaaattggaaagctttcaagtttcaacagttttggacgattctatggtcccttcattcttggaagaaaaaagaatttcggaaataatcaaaatcagaattcaaaaatgaaatttatttggacaaaacttttgtctctgagatttgaggtcggtgagcaaaaaatatctgcctcaaatcttccatggacagctggagtctccattattgttcgtggaccactcaaaactgtttccgacatatatgacacacaaaaaacaccagtcaaataaaaccggtctagtttgagtgaatcacagcaacgagtcagttttcaccggtttagctgctttgaacgagaacaatatctgggttgaaccagaacagtgacggtaaaagtttttttttataactaactctagtaactgaatatcaacttttgaatttttgatcatacagatgattttagacagtgaaacatcacaaatttggatgtagagtaattcataagttatagagattaaaaaaaattgtaattttgcaagtattaaagggtttggaaccaagacaacgaaaataatgttagtttattgtgtgaatgtgatgtatttgagaaagaaaagttcttcttacacgtaactattacagagatatcacatcagaggaagatgacaacaaaataatcttttattctatgtatacaaacagaattcactttgaagacatatatagagtcgacatggtttttgctcttttttaagtactaagtgattggtaaccatcttcccgtttctgtctccggtatatcacggcggctattaaaaccacaacagccacaactaccgtcactgcaaaaatggctaaaaagctcaagcttctcgcaggtgcctacaaggaagtgagagatattaacgtcagttaaataatcacatggcaatacactgtatatgtatcgtaaccggtttgaccttaaccgagttctggtaccgggtggagtgattacctcaaaatgttgtttattaggcaaggagctatctggttccggcagctgctgagcaacgaggatgtaaaagagtcccataactccggtatgaccaacggcattactgtaattagattccaaagtcaatgtctctccatagctcactttcactggatcagctggataacaagacgacattccaacaatgtaaccagcttcgtttccaggttcatctccattgccatacttcggcattgaagcgcatatcccttcaccgttctgatccacaacacaacaagagtctcaattcaataacaaagtttcaatcttttcgttttgcagtagcctaaactaaatcagtctcttagttacctctcggtatagagcaccaccgataccaccagcgtgctggtgagctaccccgtagacaatatacccatcaaatggcatcactaagctctttttcttaacgtcaacgcatccatcgccattggttttgcacggtttcacctcgtattccacctgaaaatcacaaagacccggaaaattattagagaatgaagtagaagtaacggcattaagcagatatgaaagttcttactgacatggcaaatatgttcttggctatctccttttgatctttcccaagaatctgtaacatcgaaaatataaaccttagcgggcaaaaccgagctgtcccaatcaacccatctcacggtatacttcaaatacagagttcttgttttctccccattgtcaaatccgcttttcacccgacattgagtcttatcatagcagcagtataaacctcctttgtatccaggccttatagctcgaccatactcatcaatggtaacattatacagatcacacaaacattctatgcatcctttcttatcttccacacctctggtgtctatcgcgtgaatgttaagaagccatttgaattcataaccatcaggtgtttcctcaggattaccgatttcaatagcgtagggatcaggaacatacgtcgaggtttcgcgggtttctgatcctaaaccaaagaaatgtctgagtgttaaactcctgcacaaccctccatttttcacaagaataatatctgacttggaatcaagattgctttcaggatcttccctggaaaatccatgattcctgaacatttctctctgtggaagcttggaacctttacgtacatagtatggctcgacaatccaatggtggagataggtctcgtgtagaggaacgggtttgcccgcttcgtcaaccacttcagcatcgaaagctttgaggccgatatgacctcttgggaaatcgatgtcgaataagtaaggatttgcaactgatcctggattcatcacaagttttggtgagtaaaagacagcggatttgatcttttcctctgtccctaggaagccttggctcggcgatatgcttaatgagagcagaactaagcacaagatcatcgatctcctgtggtaacgagccatcatctcctgtttcatgatcatatataaaaggaaagagattgattcagctaatcaaattcataaacatggataagatatcacaaactctaaacctagctcaaactatgaacaatagaggataaccacttgaaacctaattttaatcagaagattttagtacttgtgctgcttattcaaaattcctttgcccaaaaaaaaaaagtttgacttaccttttgaaagacgaacgtatccactatggaacaatctttcgtaatctcactttctagtttggtatttaaaaaacccaaaatttgattgtcaaattaaatacaataagagattcctaaacccagaattcaattgcgaaatcaaacagagacgatacagagagagcgagagagcgagagagagagagtgatttacgtgagaacgaatcggataaacggaaatttccagaagccggatgagtttcccgctattgtgatgagtaacaaaacaaattcgggagttgtctatttaatacttatcaatagcccatgaacgcagagacgtatggacgcgagaatcgttagtacgtgacacgtgtaaaccagtgacgtcaccgctctcgtcacaaacccgctagtattgtcctcttctattttatctcacacaatcatgttaggttatcatagtaccactaaacatttatgtgagaatggatggatattagacaaccgacgacaaataaaacaaacaaaagtagatagacgaccataaattaaactataaacgaagattgagggaaaaaatcattggtttagattttcgaacaaatatcgtgaaaagtttttcatcttgtagtttttgtaattaatggtgtatgaaaaatcattggtttgtttagttgaattaaatttcagtaaacggtttagagtatgaacccactcaataaagatttgactgccaagcgttactggtgtctggtggattgaatagttaagagtataaggtttgggccattatgtggtttttattaaagttgaaggtctcatttattaattccttagagctgatggctaatgtacaacgaatttgattcaggagtaagataaacggtacacccaaacacgcgacgcgagcgaagaagacgatgacgaacaaggagaaagctcgagagagaagggagaaaagaatgcaggagatctctctccttcgaactattccttactctgaccaccataggtatgaagagacctaatttgtccaattgtttcggcttctttgtatcctaagatctatcatcatttactctgcgagattctcaatttcacagcattcgatgtgttaatctctaatttcacttgcttaaatccatttcttagtgtcgcttacagtgtttgatgagtttctatttttctctatttgggagttggagactgaattggtattgttgttggtacttacagatttgtgtttcactaaaccaaaagaatttagagaaattgaaaatgatgaagtatgtgtctctcaagccctctttttgaatttgacttgtcattaggcgtcaaatgattttttaggtggtggtcttgtgaaaatgtagcagtagtgactggttcaaaccgcgggattggattcgagattgcaagacagcttgcggttcacggattgacggttgttcttacagctagaaacgtgaatgctggtcttgaagcagttaaatctttgaggcaccaagaagaaggtctcaaggtttattttcatcaacttgatgtcacagactcttcgtcgattagagagtttggttgctggcttaagcaaacatttggaggtttagatattctcgtaagatccttatcgattcgtaatcttggaggatagttctaatgttttcttagatttgaattacatgcatttgtgttgctatgtttttcaggtgaataatgcaggtgttaactacaatctcggctcagataatacggttgaatttgctgaaacagttatatctactaactaccaaggaaccaaaaacatgacaaaagctatgatacccttgatgagaccatctcctcatggcgctcgtgtagtcaatgttagttctcggctaggtagagtaaatggaagacgtaatgtaagaaactctttcactcatatctttgattttttttgaaaaaagaaaatctcgttgaaattcatgaattgcagagactggcaaatgtagagttgagagatcagctaagcagtccagatttgctgaccgaggaacttatagacagaactgtctctaaattcatcaaccaagtaaaagacggaacttgggaatcaggcgggtggcctcagacattcactgactactccatgtctaagcttgcagtcaatgcttacacgagactaatggcaaaagaacttgagagacgaggagaggaagagaagatttatgttaacagcttttgccctggttgggtgaagactgcgatgactggctacgccggaaatatgccacctgaagatgcagctgatactggagtttggcttagcctggtcctttccgaagaggcagtaaccggaaaattcttcgcagagagacgtgagatcaacttctgagggttgttgaatgtttgtaaacgttggaatagattgtgtcgtcttcgtttagtgccatagttttagtcaaaggtttacaaaatcaattgtaattggtaagtgaatggttgtagtcatgatacgcgtcagatttgccacaaaactaggagtttataatttaaatataattaatttttaattgcaattaacaaccgaccttagctcagttggtagagcggaagactgtaatgtttgcagataatctttaggtcgctggttcgattccggcaggtcggatttttttctttgatcttatactttttttcgcccaacgttgttaattgaccgttttgcccttttctatgtcagttctctctctcacttgaatggttgaaaacagaaaacgaaaggagaacaataatttttcttttacttgtctttctcgtgagatgtcaaaaggattctagttacattacaatgacaaagctttttcccttctacatagcaaaaaaaagttatgattctacaaaatacagacacgagaagacagaaaccaaccaaacaatagctcattcaatcaaattccaacactggtccttaccaaggtttcagatcagcgaccggtcctgccgtccagttcaacagcttctcacctggtctcagatacacactcctctcatgaggcagcttacgagccaacccattcaatacttgatgaaacgcatcccctggttgagccggttgcgggaacagcatggcttgtttcatcgacgggtttgccaacaacctctgttttctcagtataacctctggtgggatcgatgtgagtattgtgtccaggtaagggacatctttctcatccacaaacacaccaatatcttcccaagggattgcatctgcaaaaggtaacacgatgtcgtctgctatgatcacagggatgcaaccgaatatcactgcttccaccagtcttggactccatggggcccatccaagtgggcataggcagaagattgctctctgcatgtcctcataatatgttgttgggtgctctgttgagatgtcaaacagcggattgtctttgaagttttcccatacagctgctcttgcacccctgtgccagtttgacaaacaaacatcatcactgattataagaacaatccatggctctaaaaacagtctgataaattttccttttttgagttttatgtccaaaattccaaaccgataaagcaattatgaactgttttaggagatttatgaaatttattatgaacaatagctaagaactttcataagaaaaaaattacctcgcataataaccaccctcagggtcatttcccacatcataaaacaatcctctgaaataaacgaagatggatcgaggagttttttcgggaattaagtgtgactgcatcttctgtggtggagcatatggaggaacagtgattgaaccttctttcaagcaaacatgattcctttgtccaaatgtctgcaccagtgtagctcgttgaagcaagggtagtattcctcttcctattgccttctcttcctgccacagtcaaacacaaaacaagagatcagctaggttagcagtatcacaggcacaaatctttgttgtcacggctcgtgaaaattttctgctccatcaaaaaggctttgtaagttgattgccattttcgagagtaaaaaaatgagtatggaagcattaagatctactgaactagttatagacttctggttcctagttcagtccagaaggaactacaagagaacatgatgaaacgtgtgcagaactcaaccccaaggcctcagcatggatctttcaaacgaaaacagaaaatgtatctgaatttgaggagatgagtaggaattctaacaagatgtggtatggaacagttatttcttcacaacttgcagaactgcaaataatttagagtgcatgttcatagtagcacaccatcatttagaatagtgtagaagtattgatcaagcaagcaaagcctacttaggatagaaagaaaaagagactgagaaaagattctattgtttacttgataatggaaacaggctccaaagtcatgaggcacaacaaagaagtggtctgctccttctgtgcgattccagtatggccaattggaagcaataagctgaatggcacttctcatcattcgtggagatttaaaaggaagaggaagcccattaggcgtgagatcacaagtggtgtacacaggtacgtagaaccaatcagcttcctcgggattaagtgttcgaactgggctagataaaagaaaccgttgcatatatatctcagcagcaaacatgtggtttagacatctcggatccttctgaagtatcttcttgttgtatttacttggaagctcataaacaaagactttcagtcttcccacgggatcatcttccaacacatcaccagcactacctaaacatcagagaagaaaaaaacagatacacacttaaagttcacatcataagcaaggattaactatgtagctcaatcacagaacctgaaagataatgctcatcaaagtaaaaagttcaaaaacaagatatagaatcggcttattcaggcatgaatattgtcatatacaatttacaaatcagatgcatcttgatttacattttccccaggttcaacaagtgaaaacgaaacccctagtcttcattcgactagcaaactagctgatgactacacaagataactacggcaaatccctagaactaagctgcatcatccaagtaaaattatgaaacctgagaattcacaaaatccatagattaaccttctctgcatagactgatagatagaactcacctgaaattcgctcagttggttgactccgactcagacggaaagcagaaatcgaggagaatgtgttacatagaaggaagatcaaaacgcagctcgataacttcatttttctctctcagaaattttggttcctccctaaaaactcttcaaaatcccagatcatataaagtatataaagatcaactagaacagctgaaatgtcagaagaagtagttgctaaaaccggaaccccgagattgagacttcaaaaccggaacaaaatttacaaaattcgctaccgattgttagatctcactcacgcccagcgttgacagcgagagcccagcgattttcatttgaagatgcgaagaaagcaagaagaaagttgaagaagattcgtctatggcctatacgacgtcgtttgaaagggatccatttttcgcaaaggaaagtcgttggggacttgaacattccacgtcagcctcttttccactttaaaaaataacaatgtaatgggctgaccgagaagatataaacgcagcccattatttaatgggcaaaagtgttttctttttgggttaaagtgtgattccgttcttgtgaacctagttgtaaacttttgtaactgcaaagtgtagttcggtcttgtttatccggtatattgaattttgaaacagtaataaatagctgaattaagtcacttttgagttgtttttctttaatgtgaaaatgatactgagaaaatagggtagtaataggaggctttagaacagattattcagtcttttcaagattctaaaactccaacagttaaataacagtggtgaaaacagtatcaagagtacgagccgctactcgcaatgatgaagatgatgatatataatagtaatgaatttatatgttgtaaacttgtaatgttaaagattaataataaactaaatgagagaaaggacaaagaaaaggtaagaggaaactgagggagtgagacagtcaaaataaaacagactgagagcattaagaatgccagtctctcagaacttcgatttgacctgtcgtttcctcattggctacctttccaacattaaagttttttatcggctcaattccaatgttataattttttatatattttcacatcattcttttttttcactgtttagtcacaaagtttacgtaacccatatgtccaatcccacactttaatttgtatttttagttccaacatataaaaataacaaaataaccattgcttttttccccactttaatttgtaagttctttctgttatttaataaatttgacattaccaaaaaaaaaatttttagatgggtgaatatatatagaaatgtaacttatcaaattgattcggttttctgattttcttaacgactaaaaaaaatatatgtgtactagggcaataggggtaattacaaatcagggagatgacaacacgtaagagatagttgaagagattagaccgaaacacacctgacctcctctccttctggagttttcacactgcatttatcaattaatgtttcctaaaacgcagatagataaaggtttcatttattagcttatgtttatttaaagcaaaagaacaacttgtggctatatatagtagattaacaatctcagactcagagtgctgatatttcttatcatacaaaatttatcttcccctaacaatacttccaaagcttatttagatagacatatatggaattatggataatggattcccttaagttatatgaatcataggggaatataattttagtaacttatcgggcttctgcaaagattgtgcatggtaccatgcgtccatgccaatacagttaaagtttacataatacaaatttttacgtatttctatatatcatatatgacttacagattatcatagcttaatatagccagtattgccaactttccattcgtacctagaacttataagaagattggaaaggatattaaaattgaaaaagacgtaggttggccatgtatcttaagatagttaaacgatatcagcaatctatcaataatcaatctatcgtaacaaatatttttgtcataaatgtatttgtagatttttttttttatacttttagatggttaaatgttcaagaaatctaaccaaatggtggaatggttccgtttgatcgtgctctcatggtacaaacaatgagaccccccaaaaaaaaaaaacccccgaggatgaaattaaaacaaataacacagcttgaacaaaacatcaaaaacagaggatcatcacagtaaatattaatacttgaacaaaacatcaaaaagataggatcatcacagtaaatattaatatgcataaagaagagaatcaccacagtgaaaaccctaatcattttatattcctacgtgtcaaattatgaatggtcataatcagagtagagaaaaagaatgtcgatgaaagaaaaagtttgacttgttaagtcccaactgtcaatttcccagcaagacacatatcttcttttacatcacattacatctacacataaatgctttattgcaaaaatagcgatataaaaaaagaatatacaaaaacctagtatttattttctagattctttactgttgtatatatagaagttgctcgagtggtcatttttacaataaagcaatctgctcaaaagagtaaagaaagagagaaaaagagagtgatagagagagagagaaaaatagattatggatcctgaaggtttcacgagtggcttattccggtggaacccaacgagagcattggttcaagcaccacctccggttccacctccgctgcagcaacagccggtgacaccgcagacggctgcttttgggatgcgacttggtggtttagagggactattcggtccgtacggtatacgtttctacacggcggcgaagatagcggagttaggttttacggcgagcacgcttgtgggtatgaaggacgaggagcttgaagagatgatgaatagtctctctcatatctttcgttgggagcttcttgttggtgaacggtacggtatcaaagctgccgttagagctgaacggagacgattgcaagaagaggaggaagaggaatcttctagacgccgtcatttgctactctccgccgctggtgattccggtactcatcacgctcttgatgctctctcccaagaaggtacaataattatgaatacatatagaaatatcaaatatcgcacgttttataaatatgtgtatatattgttctcaacatttctatgcccgactttcaagaaaaagtatgtatatgttcacgtgactaatatagataactaatttatgaatcttaccatatgtatagtagttgctacataattttatgtttaagctttttttttggttaaatatattggttaagcttttgttacataatacaagataatatatgtcatatttaatttatatgttggatatatttacttgtatgatattgatttagagctactgtgtgtatagagtatgcagtcatagtctgatatttattaaatagacctagtgcaagaagtacgaggattaatgtcatgtacaggaattcaaagagtatatacgcctaaacttgaataattttttgtgattgtgacaatttatatgtagatgattggacagggttatctgaggaaccggtgcagcaacaagaccagactgatgcggcggggaataacggcggaggaggaagtggttactgggacgcaggtcaaggaaagatgaagaagcaacagcagcagagacggagaaagaaaccaatgctgacgtcagtggaaaccgacgaagacgtcaacgaaggtgaggatgacgacgggatggataacggcaacggaggtagtggtttggggacagagagacagagggagcatccgtttatcgtaacggagcctggggaagtggcacgtggcaaaaagaacggcttagattatctgttccacttgtacgaacaatgccgtgagttccttcttcaggtccagacaattgctaaagaccgtggcgaaaaatgccccaccaaggtatcttttgatttatcttctaagaactaatcctgaccgttcattatcttgaaatttatgtttcaaacaaaagtttaaaaaatggtgtcggaagttatggggtatggtaggggaactatagctataatcatggacagctgttctaaaagcaagtttgacaaatcacgatttctcagggttttcaattttttatttttttttgctatgtctcgcaacaaaatttaggttctaatttattaaatttttcattttgttttcatactgtcttcagcataaatatagttagatttcaatttcaattttgacagtaaacgtacgacaacgtgtcgagttagggaaaggacatagttgtttctttgtttttggctataacgacatgagatagttagatacgatatacaaatttttgcatgcattcacacatagtacacatagatattattagactttttgacaattaatagggatatttgttgtatgtatatattattatatctagttacagtctattgctcggcggataatagagggtcctctttcctctagtgatgatagtacagaatccatgagctctgtgccattgcttgtacagacgcacgttactaagaaaatctaatttatttgttttctttctaaatttgttattggttccaatattttgattattgtgttgtttttatcaaaaacctttttgttatctaattttttgggtttagttaagtgtcaagtctaacaagggttataaaaaatatctaacaactacggttataattttggtaggcatttttttttaatcattgtttaccgaattaaaaccaaacttattaggtttcatttttcctactatatatctcatgataaatgatttgtttgattatattgatgttggggaaaatgtgtaaataggtgacgaaccaagtattcaggtacgcgaagaaatcaggagcgagttacataaacaagcctaaaatgcgacactacgttcactgttacgctctccactgcctagacgaagaagcttcaaatgctctcagaagagcgtttaaagaacgcggtgagaacgttggctcatggcgtcaggcttgttacaagccacttgtgaacatcgcttgtcgtcatggctgggatatagacgccgtctttaacgctcatcctcgtctctctatttggtatgttccaacaaagctgcgtcagctttgccatttggagcggaacaatgcggttgctgcggctgcggctttagttggcggtattagctgtaccggatcgtcgacgtctggacgtggtggatgcggcggcgacgacttgcgtttctagtttggtttgggtagttgtggtttgtttagtcgttatcctaattaactattagtctttaatttagtcttcttggctaatttatttttctttttttgtcaaaacctttaatttgttatggctaatttgttatacacgcagttttcttaatgcgttaacggattttaaaaccaatttggtcaaactcaaaagtactaagatacatttgagttaagagcactgaaaataaccattcatacatcgagaaagaactgtgaaggtgtcatcagtataattaatcaataatgggccagtttgagacaaatatatgggcctggtttgagacaaatagatgggccgtggatatataaacttgtgtgtcagaaattgcaaacgaagaaaacaaaagagaatttgagaaacgactgtttgaaattcgaatccatttctcttcggacttgtgtgataactgatttcctcctacaatggagttcccgccaagagcgttttatccacggagattccaggcctctccggcgcaatacacggcggaggaaagtgctgcagcagtatcggcgccagatctccgagataagctcgcgacactggtcgatcgcaccaagaaagtgaaaatggcgtaccatcaactccaatcgcagatcgcgttcggccttgtcgaagtaaagataaatgctcttctctagtttgttagattcgatttctaagtagatctaagcttgattcaaacgaatttgagagaggtaatcctattatctggtttggtagattcgagcttgatttgaacgattccgagtgttgcgtactctttaaattggtagtttcaagcttaatttgaacaattgtgggtgttgcaacgaatttgatagagaatttgataatttaaaggcaggtgaagttttcgattctctggcgatccctttgatgaagttggttgggctgaaaacgtcggagatggagagtgaagggagacactccgcctttattttcaatactgtgagtgatatcaatcatcttcttgtagaatcatgaaattgcaaattttcagatcattactctaattttcatcaggaaaggtatcatcatatggatactgcacggtctggtgatctgaacattcaaattcgcagttcaaaggtagtatagtagtatacatcatgattcttataacatatgtatgcctagttataatgaagactgaacgtgaaccaattgatatgattctgaaactgttatgtgtctaggcaagtgtcattctgatgattctgtatatgtgtatcccttgttctactatagatgtgatgcgaaaaaagcaatatgattctgaaattgtaacgggtcttgtcaagcttcactttggtgattgcctatttagtatgactaattttactagatattgaatgtgaaaccaaacaatgtgatcctgaaactgtaaagcgtctagtcaagttttagtttggtgattccttatacatgtatacctaattctggtatagagtgaatgcagactaataaatatgatcatgaaactgtgatgtgcctagtcaagtttcattctggtgattcgttattaatgtttggctagttctgctatagattaatgagaaccaatagggaatatagtttagatgctgtcttctctacactttctgtttcaaattttaatcaattgcatcacaaagctgtttggaaaaccatttgtaccttcatgtgggtttggagcttgcagttaaatatataattctgcctactttgagtggatttcttcctcagaagttcatttgaagtatcatgattttgtaggaagaaaactatgctgctaaagccgaaacagcggggaaagagatcttgcacaagcataaggggcagctgagacagttagttcatatgcttaagcacattgaaacacaggtgaattcacatcgggaagatattctgcagatggttgacgatcgtagaaccttcttccaagaattcatccagaagtctctttattacctaagctcggttcacagccaaaaccatgacactttccctgtcacagtgaagctccttcgcgtactatttaataacatcaacgaggtgcttggttcagtagatactggagtcaatgattttatgcaggctttagcaaagaatatgtgtcacccgatgaccaagtacgtaggcaacttggctgctgaaataaagcatggcccttgtgtgcaactgatgaatgtagtgaatgagatggagagatcaaactcagatacaaggagagagctacaagatgctagagaaaggattagacttgcagaagagacaaagatcaacgctttatcaaagctgaaaaaagctgaagatcaagttcagaggatgacaacatctgccaaatttcttctacccgcgagtcagaagaaacaagctgaacattctattaccggcaaggtaaaatttcgataatgagttttgtttgtgaaagctcaaatgattaagtaagcgctaaaagggtttttgtttcatccttttgtccatgtagcgtataggcacagagggaagccgagaacacgaagagaaactactttgggaactactgagcaaaaggagaaagcaacaagagccagagagtccaatgggacctaaagaactcatcagacaatcagacacaaagcagaagacattggtgtacaatcgccgaaggactaggagccaagcactgttaagttctcaaaccgcacgccctgatgctttgatcccacttggtttgtcaccgtctgctagaacagtaacctggaggtaagtaaactaaagcacacgtctcactcattgcatcagaatctatcttcactacgctttgaaaaacaatgagatccagtagcttctttaacacttaagcaccttaaataaaatactcgtttatcttgtcattagttacactttaataagtcttggtaatttcttgagatggtgtttcaacagtcagaaacaaaacgtctttgttagagttgcaccgaaacctttgttttgtataactatggaccctagctaatcctggtgactataatgattaaccaacttaacttctaataaacacaatgatacatacaaacattatatttctaactacattgcataaatcgaaccatctaatctgttatgttactggatacattgtatcaacctatgcaagagttttcgaatgaaaagttgggatgatcaaagtttaattaatcttcaaaaaataaatagtggggccaaaatagaatttcttgaaaaacttgggggttgtacttcaatacccacgttttataaatagtgggcttaactttttacatgtaggcccaaatcatcttccgacgtcggttagggttcttgttgatgatatcacctgaaactctgagtttctctctccgcctccgtcatagaacgcagaactgggtggatcaccgtggtcgtcaaattcctagctcctcgactccaaaaaaaaatcataaacgtattaccgtctcttgttttcctcgtaaggttctcaaaatcgattatcttcattacactcgacttgtctctgtttcgaatcctacgtcgtgtttttcttttcagtattcggttacgagaaatcttaaaccgtacttacatttcaggtattatatcggtcgaagtctccaatcatcggtctgagtaatctctgacaatggtatgtgtaatttcccgaccgattgtttctctagtttcaaagtccacactttttttctgattagagccaattttattgaaatttcttagaagctcataaaaatttacaagtgaaatcatcactaaaatattgagaactgttgcttctccatgaccttggttatttgtagagatccttaagttgagctggtttttgattgaatattgttgcataggaaattttcttttttattagtgtatctttcaacaagaaattgttctcagtgattgattaacgtgtattgaaatttcttgagcatttgtgtgcaaggctgcaagagttttggcaagtgtgattgtgatgggctctggaatcatagccagggcttgtactcaggcatatcgtcaggcgcttgcaagtatgtcttttaattacaatgttcttgttttctttctgggcaagaatgaatttatcaaagattcgttgtattgtgtgtgtgtaagtgtaagttactttgcgaaattgttgataaacattgtttggaatggtttacagatgcatcaaaaaccggggttgcgcatgaagcgacacagactattaagagagggttgactataggtgaagcagaagctagacagattcttggtgtaactgagaaatcatcttgggacgagattcttaaggtttgtcttcacacttcaccccgggctggctgtgcaaacgcgaatagcggtttatagtttctagtttctactgctgattgaaaaaagagacccttattctcattgagattatatgttatgtttgtagaaatacgacacgttgttcgaacgcaatgcgcagaatggaagcttctatctccaatctaaggtccatagagctaaggaatgcttagagactgcataccagaagagtacaacaacaagcgcatgaacaagcaataaaacaataggagcaaatcaggaacatatcttttgatacaagttatagttttaggacagaagtttgaaattgagtggagatagccgcaaaagttgaaattgagacaaggtcggtgatggccggaatgctgccagtaaccgactcaccggcgttgttaaaagtcttgttattttgtttaataatattgacttttctagttcttaggtaaactagttgaattctagcatgtctattgaattatctgagtttgaaaaatccgtctacttcattttaattaccaaatatattgatc

SEQ ID NO: 944 - DNA, 45453 bp, Arabidopsis thaliana
accaacaaaatcgtagataaaacgaacacgttcctattagtctacgaaaaaataggacttgcaattttttttttttttttttttttttcataattatacatctttagttatactttttacgattttagtcatgtagattcaaatacactttggatttagtggaatacttctgtattttatttgatagtcaactaaattgatagagttgcactagctagtagctactaaaccaagtggtgtctgactttgaagtccaagtccaagacttcaagtgggtttaagagcgtttagcaaagttgaatcgatgtctattacacgtctaagccgatccaaacgagaatgaagctttttatatattttatgtcgaattgtcgaccgccgaatttcgtgatccacacactacaattaatgctgatttagaaagacttttaaagtcaactaaatattacactatcgatggtatgaaagtagactacattagtattgcgttaaagactggtcaaacatcaacggaacgtagttttctttatggtatttaattgcaccataatcgatactctatatttgcaatctgtataatgtatatcaactatctaatgcattttatcgtgcgttgaagttcgaatcggtgatgttatgttgtcatgtatgtaggagccaaaaacctccaagatattaaccaaaaaaacaagaaaacacgttcaataaatcttaacgcggaagacaaaaatgacactcaaaaacattcaggaagcatatgatcatctcaattttgacgggaaatgtatcattacttcatcacaagtaactgatcaaatctcctaattaatatcccgaatgaggagaggaagaagaatccccaaagcgccagaatctggcataatcttgctcttcttgttgcctagaagagccaccagaagacgaagaagttgtagcagcagtcgtagtactattatcatgagacattgaatatccggtaccactcccatacccaccgcccaaattaaaacttagcatatcaccactactcgcatcatgatagtattgattatagttcggtatactttgtggttccatttgtggaatttggttggaggagtaatatgtagagttacttccaagctgaaccctctccgggaaattgagttttgctttgcttcctttgaactttagggctgcttcatcataagctaaggccgcagattcagcggtttcaaatgtcccgagccacacacgtgccgccttttttgggtctcggatttcagctgcccactttccccatggcctttgccttacacctctataatgtctcctcctcaagtcccctttattgaaatcacaaaagttgaaatcagaaaatctttggtatggtctactcatacatgtgcatagtatgtaaactttgtatatgctcatagtttatgtgtataaatatatatcgtcacctaatattggtgctgaaaccatatactaccaacaaaatctccatgttaaaaattacattttggtaatagcctaatcgttttttcttttggtaaatgagtattgaaataaacagtataataataaccttttaagtttgagatttacttctgatatgaaatttgcacataatttcaatatatcctaacattgtttcaaccaaaaaagattcaaagatcgatatgagcatgtatatatataccttggtcttgatgagtaggcgcaacttgttgattagggtcttgtggattatacacagaaggatagttatcatcaatagagctgatgttatcatgagatttgctttgttggtttccgattacttgagtcaaggccgagaccataacacgcatgtcgtgttgagatcgggccgagaagaccgggaacaagttctcatcttcttccctttcttcagattcatcacctccaaaaggcctcttcccatacatccgaggatctacttttgcttgattttcttttaaatatagccttttcttccaaaaaaaaaatttgatataggatttatacagtactttagggttgttcagtttttctttatggcatcgttgaacatcaagaacaagaggatgataaggagaagaaattagattgaagtaaatgaagaaagagagagtaaagtatttttttgggggggtttagcaattttctgaggcttttatagaggaattcgttctacgtgtgaacatatgacctaaaacaaatatgttttaagtttgattttttttttttttttcacattctttcgtatttaataatttcttatatgtgtttgtttctgttatcgtatttaaaaaatatgcttgtacgaccagtacggatcaatgttttgtaatgaaggcatgtataatgagaatgtttgttaaacttttcttattgaggaaagtgcatgtgtatttaaatatcaaaagagaggatattttataaagattactataaaatactacacgagatgggaaaactaaacatgcaaaagtgaaaagaataaaataaagaagagaggaaaattgcgcatgcatgttcatgttttgtttaatcatttattttgtgtgaaaagggtttaacacattcatggaattgagggaaagatatagactaatagtgttttttgtctaaattataatttaaactataaaaagcactgtcgtggtcttagttgtatatgtaatttaaaccgacacattgtttttttcgtcaaaaatcgacctgcattctcaagaaaaaggtattaagaaaatctataatataatgtaaaccgacacccttgttgtggatccaaacgtgaattaaaaaggaaatatgagtttgcgtacgtaagaagtgaacctattaatttatttaaagactggttgactaaaatttgcaacacaaaagacgttttaaaaacctctaaatccaagtatcgtgtacacactcgaattgagttaaacaaagtgattattgttctatgtcgtagtatgatgaaattgattaaatggttagtgttacattttgtagaaattgtttaaattgcaagtgttagggttgtgtacacgtttctacgtccgaaaggaggtatttaatttttactcaatggagctcttgcctatctacatattataggcttgtatgtaaaaaatttgacatttgaaaaattattcactcaaaaaagtcaagagctaactaagttgacaggtaaagaaattatgtacaatgtgtgacaagtacggatataataatgtaagacttgtaaatgtaatccacagccagtttgactaacttgatcgatcatgtgtgtactgcgttggtgttaggttcaactaccacttccctaaccagctgtttatttatgtttatgatcaaaatttctctaaactgtagctttactgttaaatgtatttggtcttcactttggacaccctcatctaaatcttagatcacatgtgatacctaactattcatttatttgacggaaaatttatagtgtgatcaatagccatttgttcacgttttcaacattttgataacataattttattattttcaattatccgcaaataatgcaatattcattaagaaaaaaaaatcattgttttagtttttaagaaatgattctgatatatatgatacacatgtttaaaaatatattaaattaacaaaataacaactataaaaaaaaaatctacaaaaaattgtttttgggaattctatggttattatcagtctcttacataattgatataacagtctttaccttttactttttggacactttctccatatgtcaaatcattagttgaaaatgcaaaacaatattcatctgtaacttgaatgtttttttttttgttggacgttcactattctctatcaatagaagaaattaagctgcacaaaacagatatcttcaaattccaagtattgatgtaaaagaaatcaagacaaatgtgtacatcagcctcttcattcgaaacttacatcccacattcagacatttttattataaaaatggaaaaagcttatgtaatcgcgcaaaacgacagcgatttttaaccgccgcagtggtttatgtaatgtataatatgtacacacttcatttacacacgagacgagatcattcatggaggaatcggtttcatattacggattctcatatacgtcaaaaactgcgaaggcaattctgctagaagcgcttgtaccactgagatctctccatctacaaaacccacacacaacacattaaaactcaccaaaccaagaactagcgttctcatgcgtttccctaaagtttcactctaagaatcaaataaaactcacattggacatctcgtagtgccacaaactgaacaatgtctcgtgaagccaatcgcccgctcgaactctccaatctttctcctttatctgcgtctagtatctaaaaacccccaccaaaacaaaaaaaaagtacagtttacacaagatcatatgtagttgtaaatcttaaatgtcttattttttatttgttacctccatctctttaaaatcagctcctccaactcctacaatgaggattgataagggcaaatccgatgcactgactaatgcgtcttttgtttcttgaagatcagttataacaccatcctgaaacaagagtttatgatttatgtaaacaatgtttgatttgttattttatgtgatcttggcttttctttttatatatatactcactgttatgatcagtaagacgtaatatttccgtgaaccttgagctagcgacgcgctggcgatcattgcagcagcgttgatcactggaccaaaaagggtaggccctgcaagagagacgttgaaaagggcactggtgtatgaagtcatgattccttgaatcccatccacctgagagagagagagagaaaaaaaaaagatacttttgatgtgtcaatccaaaaacatcaaaatttagtcttaaagaccagcgagtcgagtttgtttacctcagagtatgaactgcttccatttagattaaagcaatgtgaaactggagcgtcgattggacgagctccgaatccccaggcagggaaacgtttgtctgagtcataaaactgcaacacttctccaacatccattattgcctgagttaaaagaagagatcatgaaggtttgttagtcacagtcgatgctagttacaagaaaatggaataacactgagtcctcactctctggtaggcatttaatcgtccagaaggatcaatgtagtgcaaagaatcagggaggcggggatttccatttgaagctgaaggacaaaagaaatgtagagatgtttagattatatcctttttgcatgatgtatacgtaacaacaacattacatacccaatcaaagtttttaggattttccacagtggtgcaatacatacctgtgaaatcgattgctaccataaagtttaactcaaatccagatgccaagtactctaggaatgtgtggtggacagtctcggtaaacttgtccacaaaaagttggctctttaacacctaaaatgaccataaatggtattagatagcttattgaaaaaggcatgaaaatgttaggagaccttttcgtattggtttataccttgttttgtccagcaccagtaggcaaagaaaaattgattccttggcccgccaaatgaagtttttctaagtctgaaagcgatttctgaactttcctgaccacccaaaataaacgagtaattatgtcagctaacagctaaagtcactccaaaaagaagatggactgagctctaagctgttgattacccaatcagactgtgtttgccattggagttaaagtctgagcattctattatcactggactgtcctgcattattacattctatgaatcaacttgcatctcgaacagagaaacatactttctaatcattcagttacatattactggaagctcacatatacgaaatctcccgtaccttacttcccacttgttgaacactaagaaagactggcttccaaatagggttaagatcattcttccggacttcagttttagacacgggaattggagttccatgctctacaatctttgataccaccaaaaaggggtcctaaagttgagccacaacaaaaaaaaagtgttatattgatgtcagaactagaattttattaaaatggtaaagagaataaacaacaaaacttacactttttgaaaaaagatccttagattccaaattcgaacatctaaatactatctctgttgaaatcttagaagcaagggactcctcagcatggatgataagctttccgtggtgaggctgagcctgtggagcaaagccatctttgcgcttgagttctaatgtgctcgtcctagttgattttgtgattatctgcgtggttgaaaagttaaatataaagtattctctctctctctctcttataagctaggcaataaaacaaaatttctgatgtgcctctcagagaaccagcaaaaacaagtgcacatatattgtcaatgtcaaaaatgatacctcagacaatgcacatgttgcctcaccaagaaactgctgttcgtcaagcttaagcatctgaaaagtattaacatattgagaaaagtgaacatcagatcaaatgaaaatgcaggcagtaaataaacaattacctcctctcttgaattttgaaatttggtgtcaacatcatacacacgaaacctgagtataaagaaaccaacacaaagagtcaggtaaaggttcatctctttcctcaagtcacacaagataataagaaacttacaccaatgtctgcacagtctcgaaatgataagcgactataaatttcttaatccatttcggagctaaagagttcaaaacaacttcactgcggaaaacttctgaaagtgttgcatctttttctttttgatatacaacaaccataggatcactctgcaaaaaaacaaaaaacaaaaagtttgtcattaactaaaatgaccagctatgaagactaattcaattttgaataacaaagtaaccttggagagcacgtcgcggtctcgcaaattcgaagctgaaaacgatagctgcatcaacaaaaaacagtatcaaacatgaatcctcagaatatacagggaaaatcgaatttcgcagttttcttctttcaaacgaagcacacacatatcattgttaaacgttttttggcggaagtagagaaaaaacacgagagatagatgatagtgaaggaacctctatctgcgagaagagtccgttgaaacctttggacttgagatagtaatcaagggcgtcgttagtcgcaccgagagcggcggaggaaccacttccaccaacgccggctgtagcaccagcaccggaggcgacatcggagcaacaattccccataatttttgatttcccaacaaaaaaaactgcggattcaaaagtacctggatcgaacaacagagacaaacatttttttgtgaggaatttcggaagaagaagaagattcagaagaaaatgataatctgggagagcagtaaatgggacccacttgtctaagtcgcgctttttcttttcttttaattgactcgctctgttttacagcgtctccttcttatataggttttttttgtttgttttcatttgattaatattgacttacgaaatatccaagaaacgttaagctgttttctgagaaattcgctctcttttttttttttgtatttattgtagtaaacgacgtgttggtcaatatcagattaacctcagacatatttaattagagcaattaacttctgtgacataatctttccagcttacaatatcagaatattgttatcgattataattgttatatcaaatacatattatctatgaaatcctttataatattttatatgacaaacagttggtctttaataattttatttgcaatgcactaatagtatatatataattctttttgccaactggatctgtgatgcttttagcgaagaattgtaataatttttttattattattatttacatgaaatttgagaaattttcagacgagtacaagtcgttgttgctatggggacataaagtgagcaataggaaatagtgagagagtttcacgtgagaacattttacaaagataattagtagtttattaccatggaggtcatactttgtttatctttaacacaaatcgtaaggttcacacaactcagaaattttgtagaaaaaaatcccacagatcatatcagtaaatgatgatagatggggactataactttcaaaaagtggataaagataatataatagacatctattgaaagaagccaacgttaactccaaatttatcaggaaaatttgcatttttcaattccaattaaaaagacctcgagacaattcagagagttggatctgatcatgtttttcccaatttcagtattttttccttcgtcaataatattttgatgatctgtgacacaaccaacaaagctgtaaacatacgggacccttgacccaaaaaaaaagaaacaagagggcaagaccagagccttaagtaaattctgtagcaaacaaaacaaagtaggtggaaagagtgagataggtgtcttttaaaatcttttttattggagaagaaagaaatagataaaaagtttttttgaaagagaaagagaaaaaacaaagaacatgtgaattgcagtgcaagtgctcaaacatacatagtgggagacttaggagtcttttcttttcttttttgtctaccaatagatatggcttagggtttaggccacttaatcttagagccaataagcatattcttggtccctaggtttcgtttgagagagtgtttaagatgaacctttttgaaggtagtattcttaatagcaaatcccaagtattaaacatgaccatactaaaagaaatgttttagcataagtaatgataacagagttataatatgttttattaactttaaatcccaatcagaattgcatttcagattgcactcctgaaacgggacttaaagaagttttgatggtttgaggaatttcctcatgcgcagctcagaaatgaatatgatcaaaccgtaacatagaacttttaaacttacagtaaacggagctggagactctagttttatgtccttgaccttcttttccactgagtgcaccagttcgagtccatgcttccgcacccatcacgcacaagtttctcagatcctgcaataccaatgcaaataggttttcagcaaatcgtttctcacctgaaccgaaacaatgctttaaatacacgagacttaacagaatcctctttggcataccagagtagcaacactttgctttaacgttttaagatgtttgataatacgttgtggttgcatctgctgtctgagggtaataagactgatgcactgcattccaatctcctgttgcagaatatgcctggtttgcagcattacaatcagttgtcccaggagcccttggtacagaaccttgcgtcacaccttgttgactgtatacaacagcgtgagcatggtattgcggcatgtagccaacagcttgagcatgtggttgcattgtgtattcaacagcttgagcatgtggttgcaaagcatacccagttgcggcagcatggggttgctgagcgtacccggtagctgcagcatggagttgcagagcatacccagtagctacagcatggagttgctgagcgtgcgcggtcgctgcagcatagggttgctgagcgtgcgcggtagctgcagcatggggttgctgagaatacccggttgccgccgcatggggttgctgagtgtacccggctgccgccgcatggggttgctgagtgtacccggttgctgcagcataggtttgctgagagtacccggttgatgcggcatgaggttgctgagagtacccggttgctgcatcatgaggttgctgagagtacccggttgctgcatcatgaggttgctgagagtacccggttgccgcatcatgaggttgctgagagtacccaatttcatgaggtttttgaatatatccaccagcatggagttgagtagtaggccccatagctgcataatattgctgttgtgagtaactatctgttccagcatatgattgtgtactttcttccacattcccaggctgtgaatgcgtgctataattacccgctacactttgaggttggtgtgtgtaaccaattgctccagcaggtggttgtgaagcttcaccatgtgccggtgtaggatagccagctgtctcggtatgagattgagcaacactaactgcctgcatatctggttgcatggactttgtagtattggaaactgttgatgcttctgggtgatggtaagtcccagcagggatctcatgctgctgactagcttccccttccttttgtgatgctgaattatagaactcacttctatacacactcccattagctgcagaagcagaaggatgctcactcccagataaagtcgaagggtaatttttattatcagaataaggtacagcaaactggtccttctctgatggtgttgccggatgatattcattttctgaggccaagcgatctgatgcagatccatatctgtcattgcaaaaaaaccaagccctatgattacacattcacatataagtaactgcaaagccaggaaataggaacaatgtaaacatctgaagagtggaggaacctagtagagttctcaggtttagctatgattttaaacatctgatggctacaacttcaggtcttcagtgagctatgatcgacatatttgggcaaagataaaagttcaccataggtacctccgaatattagataaaatggtgaggtatttgagttgaggatcctgaatagatgaccgcggaggttcggaccgaggagaatctgagcgagaagggtctccgagcaaccgtagttgccgagcttctgtaggataataaggctgattcaaatttgacagactttctctaggtggggtcgtgtagtcgtcttgtctaaagtaactatgttgaagcagagatgtgcggggaacaggctgatgggccataacagagccaagtcgtggttctacatgacgagcagacagaggatctaaaaccgatgaagcatttctaagatgtgtagccgctatgaacctttcctcaaacgatagagtcctaggtgctgaagctctggaagccaacctatgaggcaacaaatcgagttctggagacgtaaatgaacgaaacaatgataacagagacataacctgcaatccatgaacatttttgtttagcatatcataattgaaacttgaaagccaagccggaaagcctggaactttgaaaggctgtgttataaatagcaagaaaaagtgtattacttggtgaggagaaagttcttgcttaaatttggaacctttgtaattttcatagatagcagacttgaaagtgttttctgtcaagggtaaacagttcatgacaattctaaatccaacctgccaaaatcaagtaagaaaatagagaaaagaacaatcttaggcagtgccatataaacaaaatcatatgtgtttcacacacaggcttacttgagctggatatttcccttcaaaagcttcaggttctatatccaacctgccaccaacagtagcttcatacacaccataaagaagtctcttctcaaagtcatagaggaaaagcttcatgcctggctttatactctcaacaacgtcttttcctcctcttggaatcccgaaaacacggtaacggtagcaatcggttttcgttctcccattacacataaagatataaccaggtagttgctcatgatgatctagtctcctttctattcctttttctaatccaatggttgtgtttccattcccataagcagccacaagacttctattataacccggaggagcaaagtattgggaggcagtaacatgtgaattaccattagtttgttcaccatctgagaaatccatctccgtctccatcgcttctgccattttcaatgcatttcagtacaagtacgaagatgacactgaaattacaaatttggagcttaaagcgattgaaacaaatgtgggatcaagaaataataataaatacctcaaaacgaattaggttatgagaatctaacagaaaaagcttcttgaatttcagaaaaaataaaatcaaagagagatatgtgaatgaggtaagaagagcaagaacaaaacttacttatcggatattgaaaccctagagacagaaattgaaaatcaggaagattgaattcgagagatatttttagcgatcagctcattattagctttcgatttttattcagataatttcaagcgtgcgaatctgaattgatgaagttggattcttcttcccttgttcaaaaaagtcgggagaagaagatgactttcagagaaggaagctgaaggtcacgtgacaggcatggaagggaaactattaaaatgggccaattactatctaatgggccttaatggattaatactggcccaaatctataaacgaaactaatttggcgtctttaatggtttttaaatcacaatttacagagaactggaacttttttctgacaagccgagaccaaagctggtgctgttgtggaatcgatcgttgtctttgatttgattagagatcaggttttagagcataaagctcttaattttgcgacacttatctcatttcggtgttcggtttcagctaattttaatcgaagatcatctctctttgtgaatttcaggttcgtccaattgtgataaggatgatataagggtttcttaggatttggtaaattgggtcttgttgttagcttgagaatctaattcgtaattcctctttctgggttttcttctagctcgtgtcaagatacgatgtctacagatttgccattgtcttcgattactcaatctcattgcatagataatttgtctgaaagaagatagcatagtgttgaatttagaatttgcactcaattcgcttcttaaagtttaagtttttaggttaaaaaggaactctttgtttttctttgttcaatctaagtttttgagtggagtcttgtctttttctttcttccagaatgtcttcaagggagaggataggttcaaatcatcatagccgagttagccaaggtatgtcaactagtggatcatcatcgtcgaggcaccacgataccatttcttcgacttcggatcctcgtcatcttcgagaccaccagatttcactttctgatattctagaaaacaagattgcagttcaagctgctgagatagaccggctctctaatgacaaccgaaaactagcttcaagctacgtagctctcaaggaagacttaaccgtggctgaccgcgaagtccaggggctaagagctcacatcagaaagacggaaacagaccacgagattcagatccgatcgactcttgagaaaatagcgaaaatggagggtatggtcaagaatcgagagaatataaggagggaagtgcaatcagctcacattgaggctcatagattggcgagagaacgtgaggagcttgcttcaaaggtgaagttgggaatgaaagatttgaagaaggtttgtcttgaggcagagagtttagaggcgtcgagtcaagagcttgagcggttgaaagaggagcatcagagattacggtaaaagaattgtcttttacgtgtcaagtaactgttaaagattcatcatcagtttttttaaccaattggtttgatggaacaggaaagagttcgaggaagagaagagtgggaacgtagagaaacttgcgcaattgaaagggatggagaggaagataattggagcggttaaagcgattgagaagctgcgaagtgagatctcaaccgcaaggaacaaagctgtcgagaattgaatggtttttactttgtaggctgaccaagaggctcctctatatagggaggatcacaagaaccgcaaggatcgcaagaggatcaaagctgtatatgagttttcattttttctatatcaacctgtttcttctgaaaaaaagatagagagtaatgagttagagaagtgcttgaatggtcgatcacaacatctgctgagaattaaacaccaatgtagaagaaacgaaggagattattctaccgcctaaacaaagagtcttcagccatcttttttttttttttttttttttttggtcaacctgtcttcagccatcttaatacattctttagtgcctctcgtgtaaaacaatgtcagttcatcgaaaaacaagaccgggttaatctacgaatctggctaatagacaatcgctagttctattctgaacagtgaacgcctttaagataccaatctggaactttaagatttcttgtataaatttataggacttcaagaaattgaactggttcaaggtttaagaattgagatgaacctgaacctaagattacaggggagtatttcactgtgtccatactaaatcattaagcaatgctgaatacttaaagaggtcaagcgactagatcgacctcatcgcgttgagggtaaactacatcgagcctcatcatactgttgtactgatcaggtaccggtgcaccaccttgcacacacatctctataaccgcaggagccttcccgtaaaacctcttcaagctattatcaagaacagaaccatcagtaggatcccgaacatgccacacataggttggaccgaccacatcatcaatagtcgcttcttgccaggcatgcattccgtctcgcatctgatgctttgtggctttacacatccttactttgtgtccctttggacccacctgaatctctggacaatacccacaagtccacactctgtatctctccatcagtttcctgacccctaaaaccatttcaaaccatgactccatcgtctcgaagcttaattccttcaagctcttcttctcttccttgcaacgatcatcttcttgtataagtgtagtagtagaagtaactgccaattctgaatttccatcgttgacgtcctcaaaatccacaatccgtccttcgatgctgtacacaggtttcgatcttcgcttggatgggaatttctcgaggtctacaccagcctgtatgcatagctcaagaaccgcagagattttagggacagtaaatctctcatcatgtataactctcggtttcacagcacggtcatagaggtgaaaacattttgggaacaacacaacatcactcactcttcctcttttccaaacatgagtcgcacttcttgaaccactcccgggaccagtgcaagtcctgatttcatgaccttgcttgccaatatgaacctcagcgcacaatctgcaaacaaaccacacaagttcaaacttcaaaactagctaaagccaacttaagtctcaattttttttcaaatctcactggatcttctgttccaatcaattaccacacaaagcacgcaaaacacttcaaggatcaaattctggttgtatagattatataaaacgcttaaacaagcaataggaagtatcagcaaatcaaacacagagatgagacagagtgaaagtaacctgcaacgatgaacaggaacatgatgaatgattttagagaggccagagagcaacatgttacggcatcggtgaacacagtgagccacgtcgacaagttccggcacaagtaaaccattatccggtggatcttcgagaactcgacatggttgtaattttctcagttgtttctcctctttcgcacgacgaatcaactccttcatcggagtcggatacggtttcctctccgatttatccttcggaggtttaggtacgtcggcgtaaagaggatcttcatcattatcaactgaaacgtcgacgtcgagattggttagagatttaatggaagatgaaaaattagattttctgattacgaagatggagatttctactagctttcttctctgcatttttttttgtctcaaaccaaagctttagtatttatctttattagtggtagtggagtaaataaatgaaaaaaacttttttatttctttcacttgatttgtcgaatctctctcttgttgctgatcttttcaagttcgaatttttgttcatacccaacatgaagacgattctagattcaattattgagctagatttgaagattttcactcattattttgatgatttattccgggaaattctcaaacgggtaatgcacacaaggtgtttgatagaattccccaatgatcaaaattgtgtctctgttttgctatcaagccttgtcacgtgtctttcacgtgatgatacggtgccttgctgtcattagtcagttactttcgtttgagtttccccgcgtcgactctgcttcttctcgcgattcagatttctctccgaagaagaaaaaccctagagaaaaagaaagcaaaagaatcttgagaatcgtttcgtttactatggattcttctttcatggaagatgatgagggagcacaactccttgaagatgctcaaaaactctttgataatggagatcacatcaaggctttggagataattgaagatttgattttagtccatggggaagatataaccgcatggcgtcttcatatcagagaaggtaaaatgtttgatgacctagcgaagaaaacagaggatcctgacgtgaaatttgcttactttttggcttctgctgaatgcttctcggaagatggtacgttatcaccaatttgtgctagttcactcttcctgttgggccaaatgcttgggtcagtattgtattacaagaagtctttgaagaaagcgaaacaaggtttatctgttaactctctcccaagcaagtcagattctgttgctcaactgagtttgcaagcgcaaagagaattggacaaaaaaaataaagcactgttgagtttaatcaatgacgcagagtccgagatcgcatcttccaagactctagttggttctactgtaaaaaacactaaaccaaaagttgtggagtcaaagaaaagtcaagacccgcgtgaggatgcgtttaaaggattgaggtcgtactgggtgggattggatgtcaagatcaaaagggattttatgaaagtaagcattgcaaagcttacaagttttgttgagggagtaggacattacaaagaggaacgagaagttttagagaaggttctcacttcggcaaaggaagacagagaatggaaattctggatatgccgaactttgtgttcgaggaagttctctagtgctgaagaatgtaagaatcatcttgaacaacaacatgctgcagatttcaaaccttcttcagaaaaggatatagtcaagaggataggaaaagactgggttcgtaagataatagttggaagttgggaaccagtggatgcagtcgctgccactgaaatgatcaagaaccagctcgcagatgtgaaagcgtttgcatctaaagctaagaatggatggtccaaagaatggcctttagctgtggatgaagagcgcagtaagttactcaaggaaatcaaattgctccttgtctctttttgcgaccttaaaattctctcttgtagcattcgagactggatgatgtgttttccagctaagcatcttggaaaacttgaagtttctgaacagagtcttgtcgattctcgcttagtagaaacacctcatagtatctgttttctagaaagtcaggaactcactcaaatccttgagtttctaaaccacatcaaatgtaaaaggaatgatggtacagatcttgtttgcagagcagtggacagtgtcttgggtcgtactcgagttaaagaaaagatcgactttgaccctcagttttcatttctgcttctagataaaagactgctgaaaatcaatgatgatcaattcgatgatgatgaagggacgatcaatgtttttgatcccagtgttcactacgccaagacaccagttcatggagatgatatcatatcctggttaactgactacaattcagtagataagacctttcccagacctatcagggaacacaatcttgatatctggttggctgttctgaaagctgttaagttcacctgtaggactctgggaaacaaatatgcaaagaaattacaggtcgtggactatgatgcagctcttactgatgtcgagaacatgtgtgtgagagaaaatgaaaggagaaggaatctgccggaagatcaatggagcagatatgcatctcttctatgcgatgtgtgtgaagagagagtccccgaaaattccctaactacaaaattattcgtgtgtgcagtacgggatgttttcgaaggagcattgcatccaacacttgatttcctcgatttagaagattgcttgaattttatacgtgagcacaaaagtctcagtgacgataaagtgttgcaggccatagaccttctgaaatcagtggtcacccaaaaggttcatcttttaatattcattaacaacagaataacatgaaattgtccatctaaaagtgtctatatgacttgcaggttcttttaatggatacaaagatcttgctgattgataattcaaggatgagtttgctaaacaacctcacaaggctttctgcttttgacaaccgcacttatatccttcaactgcttaaacctttcttgctggttggtttgaaactgttatatacagagagattttattatccgtcaaattttgcctttaaattgtttctcatatgttattatgtctcttctcatccagaacgaaattgtgaatatggaatccaaagccaagtcagatgcagcagaagcagatcttttaaacgagttggagaaggagaagctacaatcgaaggagaagccacaatcaaaggagaagccacaatcaaagaagaggagagatagaagcaaaaaggtctttgaagttctaatttctctatttgcttctctgaaaaatattttacataagatatatcggataaacctaagtgatatcggttttaagttctcggaacaagtcaataacgtcttcctatcttatagggatatcatatcttctatgtagatatcgtttccttacttgtaggattccatggtttgtgtatatactacttgtgagattgattgatcttcttggcgaaacagaaaccttcaacgagcatatctagttcccttgataagactgttgaacagtaagtacctcaatggccagtttcgcatgttataaattgttttcgcgttttctctgaccaaaacgttttcttacatgtacagtaaaccttctgtcaaccttaaaccggagagtacatcttcatcactaagaacgatcgaagaaggttctatggaaccagaagatgctcttgcaagtgagacgggtcaattgaaaatttcatccaaaactgaaattcaagtggaagctactaaagatgaccctggtagttaaaagcttctcgatttgagcaataatttgaattatattcttgtgaggttcataacttcttatttctttcattgaccattttaaagatatgcgaaacatgcctggagaagattcactgtcggaacatttggagtcagtagctggagaagctacaaccagatacaattcagcatttgacatgacgctgaaggtaaagcaattatcaatcaaaacaagattcaatacctgaactctcatcttttgattccttattctttttgagaagttcacaaaaacatgtggtattgcaggccctcttgaacattaaggttctcaaagaagatttgctgaaccaaccatttcaagaccaccaggaagaacaagttcctattgcactacaaaatttatttactgctgttgtttcagaagcgatacaagatgagggtgtctacagttgcctcttgagggacttacttacttcccaagaagaagttatttccatggttcgtgtggagaagatatgcttctaagcattattttgttaattgtttgttgtcattaatcttatttaatatcctaaaggtattctatttttttgctctttgcagtcaagtgatgctgctaatgtagtagtagccatccttgatttttggcgttgctggaaaaatccagaaagggagagcttggtaactcgcctctttacctcggcggaaaataaaagaatgagttgtataaaatgcagaaggattacaaattatccacagcaaagttgttatggcattgttacggcagcagatacaatcagagaactgaaggtatttatcatttatcatcctcgttgtctttccagcagaaactgcaggtacttccccttatatagttgttttgtgcttaaacacatgcagtgtgctttggggaatagaaattttgtagatatcctaaaggtgatccgcttgagatataaaatggtatgtgacgcagaaggttgcggaaagacgaactctgttcagcacatttcaagtagatgcccgcctatcttcacaatcggtaaggttttgacccccatgattgtgatgttttttttgtactcatatcatatatttatgttggtgttttgtgggtttgcaacatcagtattggaatgggagaatagtgcaactgaaaacgaaatatctgaaacaacaaaggcttttgactgggagatagatatcagcaggctgtacgaagaaggcttagcaccaaacactaagtacaggcttgtgtcaatggtaaaacatctgaaacagggtcatatatgtttgtgctattgttcttttgtatttcttagttacagtgtaagaatatctgggatgtgatccaggttggttacagtgaaggagatgaagaacacatatgcttagcttatgaagaaaaccggtgggtcaatctcagacgtgagtgtatagcaggagaggtaagtcgaaacagttaccttttgtctacctcagaattgtatagtgaatttagataaggtagacatgaatgattgatatatgtgtggtgatggcataggatgttggtgactggaagaatgtggtcagattctgtggagagaggaaggttcggccagagattctgctttacgaagctgcctgatcgatggcctaacaagtgacaatgtggagaagtctagcattgatgtttccatctaccagaagacacttttttatctttgctttggttttttttttgatgagatcgatgtgatccaagtataactacggtacctcttaattcactatcacttgagtcttaagagtgttgttacacaagatagaaaacatagagagcgagaaaaaaaagattgaaagaaaatgcagagcttgagctaaacgtcttatagcgattacctcaaacgacatcgcttaacatcatcaatagatacaaccacttaaccggctcggttatctttctggttcgtttaaatccccgaatactccgagcgagttagagtctttccttcaacggcaaaaccaaaacctctcaagagttccttttattgttttttcaacatcactctccattttttgtaaaaataaaaatatctaatttttcttgtgtggctctccaaacattttcacgaatgttgttcatcatcaacatgaagaccattccacattcaattcttaacccatattcgaagattcactcaatttttgggtctttttttgatttttttattccgagaaaatcccaaacggataatgcacacaaggtgttcgacaaaattccccaatactcaaaattgtgggtctctctctgtttgtttaaggcttgtgtcacgtggctctcacgtgatataaaaagccagcctcttcttcttcagtaccttacggttataatcgttgattgttcccgcctctactctcacaaatctctctgaatcatcgtgatccacaaaacaaaaccttcgagagcaagaatcatcgtgaagaatcgttactatggcgtcttctttcaagaaggatgttatggcggaaagactctacaaagacgctgaagatctcatcgctaaaggaaatcacatcaaggccttggagatacttgaagatttgatttcaatccattggaatgccaatgacgcatggcttcttcatatcgaacaaggtaatgttttcgtagacctagctgaaaaagcagaggaccgtgacatggaagtcgcatacttgttgggttgtgttgcttgcttttcgcaacatgtgacggtatttgaactttgtgcacaatcactcttcatgttgggcagaaaccttgcgtctgtgtcacattacaagaaatgcttgaagaaagcaagagaggctttatctgatagtaactctaagaaactgagttcttctactccagtggctttccgagccatagtatcccgaaagaagaaagacctcgagggttttatcgaagatgcagagtccatgatcgctgcttccaagacttctcctttacaaaaacctgagccaaaagttcgggacccagagaaaactccagagccgtctaaggatgattttcagcggtttaggtcctattgggtgggattggatgttaagatcaaaagggactttctgaaagtaagcattgcaaagcttacaagttttgtcgggggaatacgtaaaagaaaggcacaagaagctttggagcaagctctagcttccaagaaagacagaaaatggacattctggatgtgtagaactaaatgttccaagaggtgctctagtgttgaagaatgtaggaagcattttgaacaacaacacgatgcagatttcaaaccttcttcagaaaaggatatagtcaagcggataggaaataactgggctcgtaagatatcgcttggaggttgggaacctgtggatgcggtagctgccgttgaaatgatcaagaatcagctcgcagatgttaaagcgtttgcatctaaatctaagaatggatggtcctacgaatggcctttagctgtcgatgaagagcgcaagcagttactccaggaaatcaaattgctccttgtctctttttgcgagctgaaaatactctctggtagcatgcgagactgggtgatgcattttccagttaagtatcttgcaaaacttgaagtttccaaacaagggcttatcgattctcacctatcagaaacacctcagagtatctgttttctggaatgtcatgaactcactcgaatcctagactttctgaaaaccatcaagtgtaaaaggaatgatggtacagatcaggtttgcacagcagtagatagtgtcttaggtcgtattcaagtcaaagtaaagatcgactttgaccctcagttttcatttctgcttttagataaaagactgctgaaaatcaatgatgttcaattcgatgatgatgaagggacgatcaatgttttggatcccagtgctcactacgccaaggcaccagttcatggagatgatatcatatcctggttaactgactacaattcagtagataagacctttcccagacctatcagggaacacaatcttgatatctggttggctgttttgaaagctgttcagttcacctgtaggactctgggaaacaaatatgcaaagaaagtacaggtcgtggactatgatgcagctcttactgatgtcgagaacatgtgtgtgagcgaaaatgaaaggagaaagaatctgccggaagatcaatggagcagatatgcatctcttctatgcgatgtgtgtgaagagagagtccccaaaaattcccttactacaaaattattcgtgcgtgcagtaagagatgttttcgaaggagcattgcatccaacacttgatttcctcgatttagaagattgcttgaattttatacgtgagcacaaaagtctcagtgacgataaagtgttgcaggccatagaccttctgaaatcagtggtcacccaaaaggttcgtccatgattttaatattcattaacaacagaataccatgaaattgtccatctaaaagtatctacatgacttgcaggttcttttaatggatacaaagatcttgctgattgataattcaaggataagtttgctaaacaacctcacaaggctttctgcttttgataaccgcacttatatccttcaactgcttaaacctttcttgctggttggtttgaaactgttatatacagaaagattttattttccgtcaaatttttcctttgaattgtttctcatatgttattatgtctcttctcatccagaacgaaattgtgaatatggaatccaaagccaagtcagatgcagcagaagcagatcttttaaacgagttggagaaggagaagctacaaccgaaggagaagccacaatcaaaggagaagccacaatcaaagaagaggagagatagaaccaaaaaggtctttgaagttctaaattctctattcgcttctctgaaaaatacttttgaagatatatcggttaaactataagtaatatgtcaataacatcttcctatcttatagggatatcatatcttctttgtagatatcgtttccttacttgtaggattccatggtttgtgtatataatacttatatggttgatttatcttcttgacgcaacagaaaccttcaacgagcatatctagtctccttgataagactgttgaacagtaagtacctcaatggtcagttcgcatgttataaattgttttcgggttttctctgacaaaacgttttgtttcatgtacagtaaacctgagagtacatctccatcactaagaacggttgaagaagattctatggaaccagaagatgctcttgcaagtgagacgggtagattggaaatttcatccaaaacagaaattcaagaggaagctactaaagatgaccctggttgttaaaagcttcacaattgaccaatagtttgaaccattttgtttttaagatgcataattcttatttctttcattcgccattttcaagatatgcatagcagacatggagaagatcctctgtcggaccatttggagtcagcagctggagaagctgcagccagatacaattcagctcttgacatgacgctgaaggtaaagattcaatacctaaactctcgtcttctgattagttcattccatatctctttacttcctcattctctttgattaactcacaaaaacatgttatatcgcaggccctcttgagtattaagattttcaaagaagatttgatgcagaatagtcaacaaattcaagaccagcggcaagaacaagttcctactgcactacaaaatttatttactgctgttgtttcagaagcgattcaagatgagggagtctacagttgcctcttgagtgactttctgacttcccaagaagaatttctttccatggtttgtgtgaagaaatatgcttctaagcattatattattaattgtttttgtcataagcttaattgttaatctaaaggtattctaattcttactctttgcagtcgagtgatgctgctaaggtggttgtagccgtccttaatctttggcgttgttggaaaaatccagaaagagaaagcttggtaactcgcctgtttacgttggtggaaaacaaaagaatgagttgtagaaaatgcagaaggattacaaattctccagtgcaaagttcttatggcattgttatggctgcagattcgatcagagaactgaaggtatgtttcatttattatcctctttgtcattcctacagaaactgcaggtacttccccttatatagttgttctgtgcttaatatatgcagtgtgcttttgggaatataaagtttgtggatatccttaagttgatccgcctgggatataaaatgttatgtgacaataaaaaaggaggttgtggtaagaaaagctatgttgatcacattatacgtagatgcccgcctatctttaccattggtaagctttgacccccttgattgtgatcttttgtactcaatttcatatattatgcttaatcataaagcaatgttggcgttttgttggtttgcaatgtcagtgttggaatgggagaagagtgaaactgagaaagaaatatctgaaacaacaaaggctttggactgggagatagatatcagcaggctgtacgaagaaggcttagaaacaaacactaactaccggcttgtgtcaatggtaaaacatctgaaacatggtcatatttgtttgtgctatagttcttccgtttttcttagttacagtgtcagaatatctgggatgtgatgcaggttggttgtggtgaaggagaagaagaacacgtatgcctagcttatgaaaagaatcggtgggtcaatctcagacgtgagtgttttgcaggagaggtaagtcgaaacagttgttttttccttcaatgagttgaatagtaaatctagataggccagacatgatttatatgtgttgtgatggcataggatgttggtgactggaagaatgtggtcagattctgtggagagaggaaggttcggccagagattctgatatatgaatctgtccgattgatggcctaggaagtgacagtattgtatcaaaatatggagaaatccagaatcgtgttctgttctctcagggagggttccctttgaaattacatttgttatctacacagaatcctttttcttgttgttgttgttgaatcttgataagaaacttcagattatttttggctcttgtatcgtatgaccttactcttacagcaccaaacattataacagagctttgaataaatatttgtttaagaaacttcagaattagttataggtttcttcatgtcgtatcatataataataccaaactctgtccagtagatatatcataggaaaccatatactatgtccttatgcaaaatatactcaatgaaacccacggaatgatattagtcagtgcccttcgtaaaattcatctgcttcagatagaactcgccacagaacaaaaattaggaaaaataatatttttatatatcccaaaatagaagcattcaaaaaagggtccaaaagagtacaacgtagaatggccacaaatagccagcaaagaagatgagtgtaatccaaggctgttatacattgatagcaagaaccaaaaatccttgaatataaccccaaaacccaaaaaaaaagaggaacaaaaaaaaaacctgcaatatttttcaggggattttgataatacaacaaaactggtgaagcaacaacaacctgggtaaaaggtttgtggtcaacaaagtttttcatctctccaaaaaatttcttcactgcaaaatgagttttgtcagggtaaatctaacaccccccgatttacagaactctagggtgtgtggatgatatcatataataataactttatatatatttaaccttcttgttatcttcgtgtctctttttatgtgttctttgttttacctctgcttgttttgctcattggttagttctccttcaagaacggatcagttccattaggagtttcttctcggttttcagaaacggaagagatgctaaagctgttgtagttgtcaatgctactgcttcgtggcttgcctggtcttgaccgtatgttgcttcccattggaaatggttcctgtggtgatataacaacaaaggaaatcatatgaatcttcttttactcactaatcttatgatataatgaaatcacacttgaagtgaaggaagtgcatatggataatgggaaccaaacaagacggaattgtatgaagctttaatctttacctgatcaccagcatttggaccatcagtgtggaagagaataggtcggcaacgtttgtcttcgttcattaagcttgagttctggaaatgggcaataagagctgttttcccttggatacgagcatacgtaagcgttgccaccttctcgctattgaacttttcccactttttgccattaaatgcctgtgaatgtttttttaagagcttttagccaatgctctcccaaaaggacaaaagccataagaaaaagcagcaatatgagactgtaccttaaaaaatgggacaatcttttcaggttcaataagattgatgaaagcatatcccacattgcatttgttctgaaatgacagggtaagattagattagatcgttattgcaaaataccaaaacctctacgtgtctgcttaataagactttcttatataaaaaaggtaggacgcctgcttgccttgaagtcaattggcaaataaaggaaatcataagttcctttacaatgctcgtcaatagcagatagaagcatcttcgaagtgtacctaaaccatagcagaattaaaaaaaaaaaaaaaaaaaagagagtcaaagatgaaaacagaatacatctttaactaaagacacaaactataaatagttgcagaagatatagacaagaaaaataaaagagagacactgagttcacgtacttgttaggaatgtttttaatcatcaatgttgtcctcctgtcctccccacgtaatatacggtcaacgtcaagctcatacagttttttgtcagcattgctagagctagattcgcttcttcggtgagagagattcctgtatcgttcatttggcgagtcaaatgaccctggcatcgaacccattggactccttccaggaaagagatgagataactgttgaggagatcgcaggacagcattttgggaatttacatccatgcgattcccaccaacagagaaagtcttatgagaaccaatgtccattggatgtgatggtgaagagccaggaatccccatgctaccatgagaacctatgtggaagccagatgattctagagattcagctacataggcttgtcttctgtcccagaaaggagaatttaataccggcgcagatccaatgtggtggtgcacaggggaagatgccatattcaccattataggaggtgctctagagaatacagtaacaggtgggcgctgagtaggaatgctgttgatgtgagatggcgagttaggccacatcatgccacttgacggattttgttgctgagtgttagagttgctccataaattaatagggcggcgagagctttgatgcatgggagatcctatacctacagtcaaaagataacaacagctaaaagtaaggaaagagaatatttcgtatggcagttgaaagaaaaacttcattacaatcttccatatcaaaatttttttagcaatgataatatacacaattaggttcaaccccttctcatattcaaaccccagtacaacactgcctaatctgtttagataactggccattaagaacataatgctaatactgtctttcccaggatgacaaaaataaaaaaaaacagttgtaaacaagttgtctatccagacaacagtacctactgtgcattgctgtagcatttcacagtctactaaaattgtaaggaccatttcaatgtcgtaacttaaagattgtgctctgataatgtactacagcagagcttatcaagacagtagcacattagcgatagagaacttaccgcctccactaaagccttccactccacgaacattatgtatcataaagccttcatttgcttttgagccatcactgaccatttcagaaaatgcagaggacgtatatggactaccatttgcaaagttgtcgacgtactccgaaaaagaatgaggatggagatttggcatgctttggatccccatatttgaattatcaaaatggtggccatgctcctgaagtcctacaggcttacttgctgagatgccgtttgccgaaggtgggaatccaataggaatgctgagactacgatgtcgttcaatgaaggaattcacaggtgatccaatagaattatgtataacccgcatagatccaccatcactggaggttgaagaaatcattcctgggaaatgtctacctgaaacagagatatttaactgcaatgatttgtgtccccagatgattgatgattgaagaaaaaagaactataaaccatagatgtaaaggcatacctatgtgtcccgatgatgtattactataagacgttttaggtagacacccttcagtatcatttgcagcacactgcgacgtgtatctgaaaaagataatgaatcatacattaatacagttgacgtccatgtaaagacttgataacaaatcacatgttcaaatcagtttgattagcatttgcatcaatttcacagcccacaatggaatataaagcaggtgaaaatgcccaatcaccaccttgtaccctctggataggtcggcacaagttgaagcttcttcccagcaacctcaagtccatttagtccaccaagagcagctgctgcagctcgaacgtcaaagaactctatgtatatctgtgagttatcatgcatggtcctacgaatctacaaaccacagaaaccgaataagtatcaatctcagaactcaaatacagggagaaccccagtataccaacctctttgacctctccatacgatttgaccagtcgattcagctcttgattcgaaatagaagaatcgagattattaaccaacaaggctcctttacttgtatctttttgtgaaggattttcctgatagcaagaaaaattgtaagcacaagtcacaaatgcaatccatatagcaaacgacaaaatcttctttcagaacagtgaataccttagagatagaataacgaatgtcaagttttgttcctcttaacagcttattctggagtgctctcgccgcattctgagcagcccttatatcacagtacgataccatgataaagccacgatttttgcaagctgtatgaagagcctggatgtctccaaattgctgaacaagcaaatgtatcctcagtacgaagtaagtaatcccaaaatttctacataccttacatttcctaagtaaagaatccatgcgaaccaaaattgctgctgaaagaaggtacctcaaaaaggaccttcagctcatagtcttcaacattgctactgatatttccgaccaaaagtgttctggatggaatttccccacggttaagctcgccaacagaattattgccacctctctcaccatttctatgactcacagaagaaaaaatatctccatctagttccatgccaccaacactgctgaagaggtcaaactcatccaactcatctcctgtattagcacgagatttacgcccaacctcacctgtcacttctgcaaaaagatcatcttcatctgggagaagatttccaatagtttgtgcctcaatctcttccaaagattcagacggttcttcttcacggtgggtaacaactgtgtttgcagacatagtggatagcatatcacttccctgtagccgcactgcaaaaaacagcaagttggagacacgctcaagtagttaaagtacagtaagtcagagcacacaagtaacaatgtttttttaccatagaggattgtagattttaggaagctgaataaaaaatctaacacaataattaaaaaaaccataaaggtgaaccagaagcttacgctttctactaaataaatcagacattgagctggaaaataaactgctttcccactgactaccatttgtagtgtttcttgcgttagggctaccagaggggtgcgacccagaaaaactagattgtggcttcagctggtaactttcagatgtccaggaactctttggcatacttgaaagtctatcacgaccaccttggttttcaggcatcatgtctgttttcataaacccaaattgcctctgccgaacaaaaaagcacaagtatagttgagaaaaactagtggcagatataatgtcatacgtgagaaatatgataccagcaattctagagctacacagtttaaatcctgaaacaaatgaaaacaaagagtttacctctgaagtaatatgaatatcttcatgaaagtgggaaggtgttgaaacacctctctgttccattatatcagacggcatcttacaaaatttgactaataaaaccagaatcaaaatcttttaaaactttaaacttatttcaacgaaccatatcacttcccctgaaaaaacctgaaaaaaaaaaaaaaaagtggtcaagtcaaaaccagtgtctacataaacaaaatgcatttctcaattgcgaggaagatcttgcaaaaacgacacataaaagtgctcaattactcacgtacaagccaaaaaaatcaagcaaaagaactacaaaagtagagaaacagaagatttctactagaattacgcgaagtccaaggataaaacaaagttagcaacttcaaccactagagaggcaaaacatatcaaatcgctgcattttaagctcatagaaatatctagaagagacgattaggtacatccagaagcaataagagtagaattcgcctaataccggatccttgtgcagctcattataatcaaacagcgaaccaactcttacctaattcacaaattcggcacggaattaaaccatttccaaattattaaaccataaaaataaaaaccctaatcaccaccagctaccaaaaaaataagaaaacttacctaatcacaaacaaacacaattatgcttcctcttaaacaaattcaaaccagattttcaacaaacagtggatctcgttaactcttattttttaccttcttcttcttcaggtatcacgatccttgaagaaaaaaaaaaacagcgatgtagacagagatgaaagagaagagagaagagaataattccttcttctctcttttatcttcctcctttcctttttgtttccttctatccaatcgcatccatcacagaatatttaattccgtaaaagaaattttttatattatatatataaaaaaagtgaatcggcgttttcaattttttttctttctcttttcgaatttcccctcctctcacgacgcgttgtttccaacgaataattcgtgcgaccggcgatgatttttgagcttttccggcgatattcttcccgtcgacgcgcgattccggcactccctccgacagagagagaaacggagaggagagagagatttttatttttttggggggtttttttggtttttgcggttagttggtttagagaacaaaaaaaatgagagggagaggaaaaaacaaaagagggaaggaaggagagaaggactctgctacgttgtatgtaccatggatttagtggtatggtatgagcttgaatctggaccattcgattatgattataactcaatagtttattgattttagttgaagaataaataattacggactcacacgagagtctcgacggcaagtcgtcgagtcccggctaataaccaaagtagccggctatgaaaacaatggaccatttggttttctttttaaacatgtgattcatttgctttatctacaaaactttacttgcacaaattaaagttagaatttcaaatcttagtattatggaagaaaatagtattaaaaggttgttttaatgttattgatatagttgacatttttagttgacacatttttgcttatgttttagtctcgtacatgattttaaatgcaaaaagaacattaatcctatattagttagagtttaagaaagatgtttggtactagttgttttaaggtttctttactctttgcaaaaataaaatttgaaaatgtgattttattttttaaacccaaaaagaaatcttattataacaattatatatggtcacatttgtttgagatataaatagatcttatgtttgttccaaaaaaaaaaaagatacttatgttgctaaataagttaccgagaaataaatcttcatctggtcattgaataatctttgtagataatgtttggttggttgattcaagattatatcttataaacgctattttcattcattagtttttttttattattgacgagattgaatcattgcttttacttctatattcactgtctttatcattcttgttttgttgttttccctacctctcaagtcaagtctcacttttatattcttacaagtttgtagtacaatctaatgaatggcgccataacaaaaataaactactaaatactaataataatcagctagcatctattgaagacttcaagtgaagttgatttgtttgatggttaaatctctccatattatcagatttagcatgactaggttcgaactacttaatggaaatatcaaaagatgatctaaaataaaacgtttttaaaagatggtataaatatcggagactggtattggactataaaaaaaatagttatccaacattaatgcatgtattcatctttttgtctcaagttaacatgcaaaaataggaagaaaaaaaaaaaaaggaatagaatggaaatgcattcacgtagctagccaatcggccgtgaaatgtggctgaaggtgagtgtcgtgtacgatatctcgtctgtgaatgtattttacaaaaactgcagcttcttatctttgaattagtttatgtgatccatattaaatgttacttactatttatgtattctactctatagagtatataaatgtttacttgtttagcttaaagattcatcaagtgttttgtgttgggatctccgtcggacaatgcaatcttttattccattgaatttaagtacactgcctttagtattggatgaaacaaaaaccatttttgaaaatctgagatatatagaaaccggttggtcagaccttacgtcattttatacttccacttcgtaatgattctgtttggccttgtttggcttcattacaagtttcttttacacattttatagtagtatcatttaaataatgatcacattcaatcaaaaaatacttctgccattatttaactggagtaacgttttggtttccccctcgtaagcaacgtgtccaattccttcaatgaaggttttcatcataccagttcaagtcggtttaatccgattaaaatgctcggtaacccaccaatttagaatgttcggttaagctcatagggctaagtatggcaaaatttaacgagaattctcaaacaagatcgaaactgaattcaaatatttatattgtaaaacgaaaatttacttaaaaacaattagatcaatccaactagtcacaacattcatatttctagcttaaatttcttttggcaaatatcaagaagtggtgatctagtagtagatcatatatagtcctttttgaaaagggttgaaacattgtatttataatttgatatttgttttaaaaggattactttactgtaactttaatttccgtttaaaagattgtgtggactccattcaaaagatttcaaataacaaaaaattgcttcttttagttcgattatgcttgcttactaaataatacaactagacaattagttagaacgtaaatccaaacttattaggggcttaaggccaatccaaaaacgaaaaataatggaaattaacaaaataaaataaaagtggtccaataatgtttcttaaaatagttagagttagaaaatctcaagaacaggattagagaaaatttctattctagtattagtcggccaagccaagctgagctgacaaaaaataagccgagcgtgagagtggcgtgagagagagggtcactgtccgctattttaaatgctgggcgctgcgtgaaggattagaaaagcatttattcttaaaagatgctcttctcaacgtaatccacgtgtcaacttaccattagtttacacatcaaaagctgaccagcaaatcccaggatgggctgtgatcacctacttactcctccatctaaaatctctgtgcaccttttctcccacgagccgttggattcatccaaattacgtgtgcaacactcacttttaagacgatgttagccgtatttaaccgaacctaaccggcgctgaaccgtcttccagttttgctaatcaacaagcgagatttgattatataattaaaaagcctttgttatagacttagtagtgtcacgctggtctcacatgcctattgcctacatgcttggaagtttgaaaatctttaatcatttatttatatgatacttaagttaacatctaaagatattcaaaacttgagaatgaaatcattgctaagagaataatttattttctgaaatactattcttactatgttaaatattttaattctttcaagtacattgtaatgctactagatactttgcctagcaaaatagttttatattttatctgttgtaaattgtatcaatatacactaactttcattaagaattacagacataaataaacacaccaaattttagtttttgagagtcaaactatatatgaaatatcgctgcagtggaaattgtataatatttgatttaaccggcttgaatgattcagaactaataccatggaaatataaatagtataagagagacttcacgtgctaaatcttgaagaagacgattggacagaacaataagacagaagcaataaccaatggaattatggaacatcatataataaacttttttaataatcatttggataattaaacaaatagtattataatcatttttgaattatttggttgttaatatggtccacgcggtctcttctccagatcccgttatctgttctaagatttccgtcggtctatttatttattatctttaattttcagtatcaattaataccttaacataaattattattccatgctattttcctaatttctacaataattgataacaaatcttatggtttaaattaaagctgactttataattattacgtcaaatgtataaggtttaccaaccacttatctatatgtgttgaaaatattaaacagctaataagtctacggatatgtgtagtttttgcctttctagtattatcaaaggtggatatgtatagttttaagatgagtacatataagttcatataaatttatgtagttgtgtttttacatgattgtaaactttttgtatacttctaaacaatttttccaaaaaataagtatatcccaaaataaattcgttgcgcaaatggaaaataagcccgagaggctgacattaaatgggcctggtcctaagaggcccatatatacccagattaatctggacttgcttaccaaaaccccaaaacctcaaatttcttcgtcacccacccgtttcgtttctaagtctctcgtccttttcttttaaccacactccttgcttgagattcaatcgaaaactgaaattcgcaagcctccactgctcgccgtcgcactcatcggaatattccattggcaccgtactaccctgaaatcatctcatcagatcaaaagtatggaattagttgagctcaatttctattgtttggtttttatgaatccctcaatttaaatatcgcgtggtgatttatttttcttcttttggtgtgtttcttcagcgggagtttaactagaattgcgtggattaatggggaagaagcagagcgagatatctgcaatggagatcgacgatccgaaatctgaaagctcggatcagatccttccaaggttctcgatcaatggttagtttttgttttccagggaattcagatttatccgattgtttctcttgatgtttttgagactaattggtggtatacaagttaacattatagacatgatgacaatatacatgattaagtatctgcatgtttgggaattttgcttacgggaatctcgaatttggccattgtttgattccttcagtcgtcgtttttatgagggagattgctgtgaatttgttgtatcaataatatatgttttctatgtttttaatcaatgcaacattgcattttgtgtttcagttctgcagctgatgaaatcttctcaggcgcaacatggtctgcgtcatggtgactatgctcgctatcggtattaatatgaaaccctaagctcattggcttacttgcgattttattaaatttaggtcaatttctgtaatttgtgttgttttgttgtgtaggaggtattgctccgcacgtttgaggaggttatacaagtccttgaaattcactcatggccgtggaaaatacactcgacgagccattcttgaatcaactgtcactgatgttaggtatttatcttgctctcatccttattctttccaagctaaagatcttgttggcgtagtgtgattttgtttttacctgaacattatagggagaatgtgaaggctcagttgttattccactagaaattaagaagttattttgttgtcacatgctcatacttgagttcatgttgtgtatttatttgaaataggttccttcatgtggttttctatatggcggaaagagcatggagccatgcaatggaaaaaagacagctaccagatgggcctaatgcacggcagcggatatatttggttggtaggctgaggaaggcagttaaatgggcttcccttttctcaagtttgtgctctattaagacagattccaggacatctctggaagctgaggtattcttgtgacctcaggtgttgcagtattcataaatttacatataacatattcactgctttgaaaggaagaagagaatacctcagttttaggcttttagcttagttgtttcatgtaatacgggtgtttactctataaatgcttgacatgagtcgtcatattttatcttactgttttataggcatatgcatcctatatgaaaggtactctgttgtttgagcaagatcaaaattgggaaactgggttggcatgtttcaaaaacgccaggtttgtctttgttcagtatcgtcattctgcaatttagtaggttttgtttttgaaaattaccccctgttgcagagctgtttatgaggaacttgggaaatatggagatctagagaaccaagttctttgccgagaacgggttgaggagcttgagcctagtattcgatactgcctacacaaaattggcaagtcaaacttgcagacatctgaacttcttcagattggtgagatggaaggccctgcattggatcttttcaaagcaaaaatagaggtatgtatgaatattcgcgatcaaatatattatttttttgtcagcgtccccaccaaagcaagtgaataactgtagatgtatctttcaataatccacatactgcagcagaaaattttggtctgttagtttttccatctgttgttaggaacttagagtctcgcttttgacctgagaccaacatacatgaaaacgtattacatgtatagaatcttggctactcttgaatgtcttgcaatggtttagtggtgaactatttctcagctccctcacacatttggtatgtaaatatgatgtatatactcactgtcacgtaggctgctatggaagaggccaggtctcaacaagctgcatctcttacagagtttagttggcttggctacagatttccagtttcgaatccaaaatctcgggtttctattttaaaaggttcgactaactttttccttatccactcttttagaattacttgatgatgctgtaaagtttggtttgtacctttacaatgggattactgttatacgttacctattaagataatttatagaatgtcgagcacctctctgaggctcttattctttgttccttattcagctcaggaacttgagaaggaactacagagtccaacagcagaatctctccctgcagagaaaaagctaaccatttttgataaattattcactgcatatcatgatgccaggaacacgatacgcagtgacttggtgagtgaatttacaagccatcttctgatttattgattgggttcaccgaaaaggttaacattttaaaagatttttgaaagtttagacaagtttgttcatcccaaaattaagagcgtttgttttggtgctttactgtttctttgattgattttactgaggcgcatactatatttaggtaagtgcaggtaatgctgaatctgttaaagatgacctaaatggtttggacaaagctgttggagctgtgctaggacaaagaaccattgaaaggaaccagttgctggttaaagtagcaaagagtaaactgaacaggaaacgtgatgataaaaatgataaagttactaggcctgaagagcttgttcgattgtatgaccttctattacaggtaaccaatgtttacctctttttttcttcagaagcagactttgtttttaaaccagttgggagacatcacctgtgtttctttttctcagaatgtcgctgatctttctgatctcattagctctggaagagacaggaaacctgaagagattgcctttgaagaagagtgtcagcgcacaagcttggccttccgtgctgaaaggtttaatgctctcacattattgtattttttagggcggttgctattgagttgtggacttcctttacaattcacatgtttatcatctttggttagagttatgctcctctaagccgtttatctaatccttagctatatgtaatattagtacaatttattcattaaattaggaatctgtttcatggtcagtcatcctcttcgcttactttttggtctatattataaccacttatttcgttccatattactcatgtggttctttccatatatgaactgatacatttaatgttttcattgcccttgactgactgagttagctaatgatatattttcctaatctatttcaggtgcttctacttggcaaagtcatatagtctagctggaaagagggctgaagcattcgccctgtattctcgtgctcgatctctagctgaagatgccctgaacaagtttcaaagcatagcaaagaaagatgaggtatcgagctcatcatttattggtcacttcatgcatggcttccatagtcattgtgaacagaagtgtactatgttacctcatgtcgactgaatattcttttcactggacatatatgaattttgactaaatttttctaataatgctcagggaacaatccaggaactgaagacactgatcaaagaatgcagagctaacagctgcatagagcatgcgaccgggattatggaggaagagagggctccagagaatctgtcgaatagaatgtcaactatatcactaaacaatacagctgcgcaggtacaatctcactatcttgccttgttgaatagtggttgatggtagaaacattgattttcaccttatttattatgcctagattatttcttcgaccatctaaatagtcttggtgtttgaaacttgttgataaaaatccccaatgtgattagccaagtaatttctgatcatatgctttattctgcacatcagatgtattaaatatcaaatagcataagaagttttccagtgtctgataatcaaacagactgcactctaacggatatttttataaattattattatatgttaaaccaggtggaggagaagtacctgttagacaaactggatgtgtatgaatctgcggttggggattcaaacacgaaaacagccccaaagattgaacggttcccaccggcattacaatctataccgcgtaatccgattgttctagaccttgcctacaactgcatcgacttcccagttattgaaaacaggatgaagaaaaaaggaggcttctttagtagccgaatttcttctctctggtaaaagctttaaaccggctttctctctaaggttaaaaaaggatctcggattcattctccctttttatttaccagactcagaaacttgttgttgctctttcgtagcttctgaaacgaaatgcatgagatttctgttaaatttattttgtcacagaatcacaatttagacattttgttcttccattttagtgacacttggaattttggaaatagagaccagttttattggtaatatagtttacatgggttatatatttttctaaaactataatttacaaggttacattcttgaccagcgtagaaaataatggaagcacggtctaaaaacgtttaaaaatcggttcatgatattgaatcagaaaagaatgtaacattcttaaaccttttgtctataatatcatcgataaggatgtatagtttcttaataatagaaatatttattagtttctcacacgtttaggatgttcttctacttctctcatagtctcggaattatcagtttattaaaagtcaacttactttggatttcagcttcctaatttatttattttgcagtaaataatactctctcttaatttatatttgaactcacgaatctatgaatgcctcatgtctttaatactaactttattaattatttcatccctcccatacctaatcaatctaaatcaaatctgagtgacaattttataaattgtaccatattttttataaaaaaggattagcataaatatcccgtatttttaagtttgatgatcttattaaggttgttatttatcattctctaattaatacattctatagattttcgaaaactgtttttttttttttgaatttgtttccgaaaactgttgaatagtaaaaaaaggatgattattccctccattccaagaagaagaaagtggtggggtaagcttatttatatatgattaatttaaggtaatttaaatttaaaagttaatttttgtttgggatagtttaattaattttttagaaaaaaaatgagatgacaggcatggaaggtttcaaggtttttattgcacacgatcaccacaacaaggacaaggacaaagagaagtagtagaaagtgtatttttggatgattgtctccatcgcacgatctttttcctgaatttccgcccatttttccccacttctcaaccaaccctaatctccaaattaagctttttcattttccaaaaaagacaacaaaaacttttatactttttttttttttttttttggtggaagaaaagaaacagcgtaattagctctgtccgcgtctccggtaatcggcattttgtccaagtggaagacaacgacgacgaacaagaagaaaacggtggaggaagaggaagagcattcttctccgtctctttcttttcccgcagacgatatgcatttcgccaagctcgatgattctcccatgtttcgccaacaggtttattaaaatgcgttttgatcgtctctgtttctagcttcttcatcgattttattcctctgtataatctgcgatcaaataaattttcgaattggttttgttaaacaatgccctgtaatttcagatacattgtggaggaaacgtttatctttccatcaatttcagatacattatagatttgtgaggctctttatttgtatgcaatgtgcttttgtctagatgtcaaaattttaggagttgacttcgatcaacagttttaacatctctattccacttcacttttgattggtcggtcctattttttttggaggcttgacctgtttctgtaacttgtttgatattgtctcttgtatctgcaccaaagtataatttgacttataagttttggctttgaaaactttttttttgtttgtacaacagatgcaatctatggaagagagtgcggagttgctccgactgcgatgcttaaggttctataaaggttgcagaaaatacacgtaagccccctccgctgactgaataaaattagcagcatcacatctctcactcaccaaattctatatttcggttatttagggaggggcttggagaagggtatgatgcagatattggctttgtaaatgcacttgaatctttcggaggaggccataatgatcctgtttgtgttgcttttggaggtctttactcgagtcattttttctctttgttcctcctttttatctttcttggagtcatttctcaaggaactaagttatttgctcaggtcctgtaatgacaaaattcactattgctctacgagaaatcgggacatacaaggaagtacttcgttctcaggtactgaaaaccattgcctacgtattcctagaactaatttccttcaaatttatctgacttatgttctcgctgtatctgtatgttgatatcatgatattcaagtgatgcatagctaaactatgatgtcttgtcaacacttttcaggtagaacacatgctgagtgatcggttgcttcaatttgtgaatggtgatgtccacgaagttaaggtatttttagttcccataccaagtattatagcaaaatcactctgataatcttttcaaattcttgcatgttattcttatgttcagcattttatctgaattgcttcgacttatatcccacctttattttctctcacgcaggaagctcgtaaacggtttgacaaagctaccattacatatgatcaggtgcgttgaataatatgtcaatgtgatgggttaaattatggtttcccagcttgttaccaaaatacatatttatgtatgtgcatctatatgaaacaggcacgagaaaaatatctttcattaaggaagagcacacgattggatgtggctgccacaattgaggaggtatgtaaaaatcttggtaacaactagtcacagattatcttcactttttcttctgcaaaaattaacttggtagagaggcattccaggacctacatagcgcaagaacgacatttgagcaagcccggtttcatctggtaactgttttgtattcaaattctacaaatattttacaggatattcattcatataaccgtacataatgattgcatacttcttcctggccaggttagtgcactctctaatgcagagtctaaaaagagatttgagtttttggaagcagtcagcgggactatggatgctcatctccgtttcttcaaacaggcaagctttttcttgaaaacaattttcagagcaagaccacaaataactctggatccaatccgcttggttttacaaggaaacctatcacacaatgggttctattcctgttttctgataagaaccactttattcgctttctcacgagttcttccttctttcagggatatgaactactacatcaaatggagccttttattaatcaggtctgatactcttagccgcatgtttttcatttgcagatatttttctgtagcaaatctttcttatccaaggaatagtacaaggtatatccgtgtttaattgaaattttacggcaggtgttggcttatgcacaccagtctagagaatgtgcaaactatgagatggcatcacttaatgaaaggatgcaggaataccaaaggcaagttgatcgtgaaactagaaactcctgtgtttctccaacaggggatggcatgagacataactcaagaaactcccagaaagtcatcgaggccgtgatgcaatctgctgcaaaaggaaaggtaaggaaatatcttttgtattgaggcttactcgtcaaactgctgtcacatctttatactctcttgttttatatttatctgttgatataactgttcttcaggttcagactatcagacaagggtatctgtctaaacgttcctcaaacttgagaggtgactggaaaagaagattctttatccttgatagccgtgggatgctatactattaccgcaagccatggaattggtcttcagtaagttgcaaaaccaaaaacaattgtgtttttgatccttccttgagaaaacatatatagatcagattggtgatgtactgtatctttactgaatctttgaagctctatgtatcagggaaatggaagtcgctctgttgttcacaggaatatggcttcagaaaacagtcctgggctgctaagtcggtggctgtcttctcattatcatggtggtgtgcacgatgaaaaaccagtggcacgtcacaccgtcaatctgctgacctcaacgatcaaagttgatgcagatcagacc

SEQ ID NO: 945 - DNA, 81284 bp, Arabidopsis thaliana
gatctaagattctgctttagaataatttcaccaacaaaagtttatacattgcaggtatgtttccaagtgaaaagatcttcattttcttcaacatattgaatttttcttttaggattcatgatactttggtgttctcttccatcatccccgaatgaccagaattttttaaatcttattgatgtaggcagagaatgcacaggatcagatggactggatcgaaaaaataactggagtaattgcttctttgttgagtttccaaacacctgaaagagcaatcatggttagattttataagatattactgctgattatttcttgtctgacccatcttcgctgttgagtaatgtatcctttaccttcaactcgaccagcgtctctctactgtggacggaggtgatactttctctgcaagtgattctggttctttagcagatccttatgatatcgaacaggcagaaagtggagaatccacagtggaacatcccatgacaggaggaaaccgttcgaggttctcagggtgcttgcagcaacatgatatggtaaagactgaaaagccaattgatgtcttgacaagggtattgggtaatgagagatgtgcagactgcggtgctcctgaacctgattgggcctctttgaacctcggtgtccttatttgtatcgagtgttctggtatccatcgtaaccttggtgttcacatttcaaaggtttgcaattaaacctacacatccagcaaacatttcactctttccacaaaggggaaagcatgaactatcattttcccattttttataaatttggtataaattatccaaccctgtcgtgcaggtcagatcgctcactcttgatgtcaaagtatgggaaccatcggtcttgacgttattccaatcgttaggtaatgtatatgtaaactcagtgtgggaggagctgttgaactcggagagtagaacttccagtgctagtagatcttcggggtaagtggcttaagtacttgtaattgggagaagaacaaaactacttcttacatgtatttacagttaaaatatttctatttatcagcactcccaagtcagatcgaccaagaaagttgcttgtaaggaagcctggtttcaatgatcccatttcggtgaaagagttgttcatccacgcaaaggtatatatcaccctggagttactaagcaaagcttttgaagatttctaatataatggctaactgcagtactcagagaggatttttgtccgcaaagcaatagacagtcagcattttcaggcagttttccaagagatatgggagaatgtccgtgccaacgacaagaaatcagtttacaggcacattgtctgctctgaagcagatgtgaatgctctacgtggtcaagcatcatacactgtgtctttgcccttatcaaagatgatgcaaatggaggaaacccttgaagcgaaattcaagagcattgaagaggagtttcaagagaatccagcgggatattctaactcaagaggtgacggggaaagtatggtcagagaagaaacttcaaacgactgttctttgcttcaccttgcttgtctttctgcggatatcggtatggtagaactattgcttcaatatggcgcaaaaataaatgcaacagattcaaaaggtcggactccacttcatcattgtatcatcagcaggagatatgcaattgcaaggttgctacttatgaggtaaactcaatatacttcttgaggtttcttggtactggtcttataatataaaccatggagttgaattataagtctgatacaataattcaataacaggggaggagatccaaatgctgtggataaagacagtaacataccagtcaaatatgcttcacagacagacctcaatgatagcgaactgattgctttattaacagactccaaaagatgataacactgatgaatcgaatttgaccatttcatttgctcatcacaatgaaagcagaatggtatagcactagaagagtgttgtttgactcaactcttttcgcctttttccgccttttagttcgttccatattcttttctttttttggcccatataatcagcaacttgtcaatgaggagcttagagaatacatgtagattttcttgttttgcttgttaggttgatatacttgtttatactctctggtgtacatatggtctttttatgggttgtatgttctgtaagatgaaaacctctgtttgatttcactatgagatacatttttttgttctttttctgtaatgaaagacaaagacaccaattgtgttcttctgttcagagatctatgttttcaggcagaatttttggtttagcccatttaaaaaaacttgctttaaatcaccagccagattttgatattgatgaataaataacttaatataagttgatcatcatagtaacattcgcacaccaaaatctttttatagataaaaaaatcagtataaaactgtcatctctgttcttcaacaggatttttccgagactaagaaaacagaggaagttgcagaataaattgctcccatgcgtctccttttcatcgtcaacttctgattgtcgtcatcgtaatggaaactgctcccatgtaaatcaatgggatccaacatgtctagctgaaggcaaaccgttctgaagtaaatgaattggtccagaagagtttatgagcagacacaaattgtttcaggaacagcacctccagattcttaatggtaactgaaaaaatatacaatgacatatcagaagattgagactgagtagagatcatcaaaagtgagatgataaagcttgtaaattttgccacaattgcagcccatcagaaatttgccgtaaaccaaactaaaagcagcagactccgtttttagccacaaagaaaaagaaggaagtttatctgctctagctttccgtctagaaaactatggaactgcatcagcttccactctttggtttgaggaaatgcaactttcattgattaactcaataacagtcgcagaatcaggaatatattggagtcgaaccatgttctccataaccttctcagctacctccatttctcccactttagcaaaaccagagagtagagcccggcatgttgaaatacttagcttacacccatcatcaacagcgttcttagcaaacatttgatccacaagcacaagtgcttttgtcgtcatcccttctttcaggaaagcattgatgataacactatacattatgtggtctggttcaattcctgcagcaatcgcctcatcaaatacaggaaacatttcagctcttctacccattttatcatacccgtttagaagagatgtgtaagttataacagtaggcatcagattagcgttctgcatctggtgaaagagctcctttgcagcttccaagtttccttccttgcatagataatcaatcataatgttgtatgttacgtcattgggcttgccaaacctatcaaacgacccatccattagccgatttaacacttctgtttttaattctgtttttccaaacttaaaaacccaattgatcaaagcattgaaaggggcggtactagaagcacagcccttcttgtttgtcccaaagatggttatagctctttccacatcgttcaatctgcaacacccatccacgagtgttgtgtacacaaaactatcaggaactaatccctttagtttcatctcatcaaataaccgaaaagcctcagctagatccccagatttgcaatatccatctataattgtacagtaggtcactgcattcgggtgaagacctttaactgacatttcatcaagcagttccttagctttttcaatttcaccagatctgcaaaagccaccaagtaacatgttgtatatgataacattaggagtcaaaccttcttcaaccatctcatcaaaaatactagaagccttctgcatatttcccaacttagaaaatccattaatgagaacaccataagagaatacatcaggtgcaatacccttcccacgcatttcgcggaaaatctcctcggcatcatctactttatcatttttaaaaagaccattcataagaacagtgtatgttttagcatcccccaggatcccttggtcaaccatggatctatatgctgaacacgcctctattactttcccctttttgcaatactcattgatcaaacccgtgcaaagaaccttatttggaagtacgccacattcccgcatctctttcacatacttatctgcagatgcaaattcacttgcctctatatatccactgataaaagccccataggtgaaagcattaggctttaatccgttctcgaccatttcaaccagaaaagaccttgcttcgtccattcttttagcttttgaaaggccaattataagggaattgtagcaaaatatgtctggtgcgattccttgttctttcatttcttttaacaccctcattgcatctccaaacctactattctggagaaaggttttgatcaatgtggtatatataaccacattgggtctgcaaccacttgcaatcatttccttcacaatgttataagctccatcgagatccccagaagagcacatgcctttcaccactgtaccataagtatatggagatatgacaatgttcctctttttcatttcaacaagtaactcataaccctgacgtacattcttttctcgacagtatccttcgatcagactagcataagcctgagcctgtggtatcagtccggatgcgatcattccatcaaagagagcctttgccttctccatcaccccttcctttgacatcacacaaatacaacaatcatacatataaggtttgatgttaataccatgtgaaaccatctcatggactagtcctttcgcagcatctgcatttctacccttcagtaagccatcaatcagtaaactataagtatgattatcaagagacacacctaaactatccatctctaccagcaacgatttagcatcttctagtctctttatcttacacaacccatctataagtacatcgtatgtatacttcaatggcaccaatcctttgcaaatcatcgactccttaagcttaagtgctccatccacattcaaagtagccgtcctgaattctttttccgttttaaaaagaacatctttccccaactgaacattcccagccctacaatgagcaataatcaacatatgataggtcttaacatcaaatactacatttctctcaaccatccccttatacacatcccaaaacaaatccagccggttccacctcaacaacgcatccaacaaaactttacatcgtgacaaacgaggaaccaattccaaacccatagagctagaaaacacaaacacagcttcttctatatacccttttgcaatgtatccatcaaacaatatcccaaatagaactccatcatcactctttcccacaaactcttgtgaacatctcacaatcgaactccaaacctcagctacaggccaatttctctcaatcatccgttctacaacactaagagctttctcaaaactaccgaaattacacaaatccaaagcgagaaacgaaaacgaatccaatttctgctctgtgactttttgagaatcgacccagttgaagaaactcaaaagcttagagggatcatcgacgcgtttggatcgtaaaacggagagaactacttctggatttatctcgattgaaagattcgaagataccagagtgtcacgccagttctcttgcttgagaattcccgctatttcagctgatgcgtcggaaagtttctcaacgttaacggaaaacgaccggaaaagtaaaaaattcgctctcgtgaccaaagttctcttcctgaacaacatcgatcccatcatcaccgataccggagatcctcgtcggagatgatgattaaatccaaatacgattttaaaaaaaacatctatgattattccataaggcccatttataattgggcttttaggcccaaacacttacgggctccttgcatatccgatggtatatagagaattttttttttgtcggccaatggtttttactttttagagaattggtaggtttgttttacatttcaaggaaattaattacatgtgatttacgattttgatactagagattattagagaaactcacatattgatgtgtgattatttttagtcatagagatcgaattaaataataatagatagatagataggcgtctggagaattcgtatgggaggggttatgggagagatatgatgaagatccccactagagttgaaattcaaatggtgcatgaatgtttacccaaatacttagtgtgtgaaatgcatggtttgaccaactttctttcttattttgttttgacatgagagaacatttttgagaaaagtcgacgggtatgggtaaaacgttaactaatactaaatccatttgttttaaaatttataaaacgtgttattgttaattccactacatgtggggtgtgtatttacatgatctaggctttgacgatttctttgtataaatatgtcaggggtaaaaaaacgtcacttaaaatcatgagatttagctattttattttgaactataaagtcaccccaaagaagacctcccaaaaaaaaaaatcaatgtaacccttgaatagcttacgagtctaaaatcataagtggaataataaaatagcattattcaccctagaagagtctccttaaccattataactagagttactacgattggatgttagataaagcgatataccatcgatgaaacttctgaactaaatcttaattatgctaacattggtaagtaatcatttgtaagatcaaatttggatcaaaatccaagtttaaaatatcagtcacccaaaatcaactttatataaacataatagctagtatttgctaaagtaagaagaaaatcgtataggtaagattatttattaataaatgttgctttttagaattgttgttacatagctccaagttgattaatcttgcacaaaaataaataaaataaacaattgtgttggaagcaaggaagcagtgactaaaagtctaaagaaaacaacttaaccaagcaagactaaaatcatcttaagacgctttcatcgtcattagatacaattaattaattattgtttatgacccatcgacccaagttggcttcaaaaactagtgcactccattttaataaccattatgtgtttagtgataagataaaataataatttgcgtttctattgacgaaacgattaaaagtattcgttttcttaaagtgatgtttagacagaaatagtataccttcactaagatagggaagttttccaaattctattagcaaatagttatattttgcaaaaagattatttaccttgtctaaccaaaagaattactatgaattttaattaatttaactaataaattttaaatacaaattgtgtctgtattttgaaattctaactcaagttcaagttcctagcgatgattttaaataaatggcataagccgacaacattgaagcactgtcggtgggggagagtccgtatttaagattgttacagataattatgaaaatttatttttgtcgtattttcttcataatttgaccacatcaaatacaaatgtttatgcaaactattcttaattagacgaaccaaatcacgaggacaggaatctcgacacgtcacacgtgggcatattgatttaagtccgactaattgaaaccaaaaccaaagaacaattaataaatatcaaattgctaattttataatcaaaagaaaaattaattagaaaatttgatgccaacgtttattaatgaccaataaaaatcataagattgattagtcattagaaaaaaactaaaactgtatacatattgggggataaagacggtccaaaatgtccagcacaaacgtattccatgcagtctttgacaactagcaacaagcttaattatataatcaaaatgttaaatgattatgctttatacataaaccaaattatgttatctctaattgacttgatagaggaggttatcttctatggtggagccattttgattaatttatcattaaatagatatttatttaatttatcctatgatttttgataaaaaaaaatttgacgtacatggacggctacagttgtgtgtatgtgtattaatgggttttgtttgtttttatttggatctttttgttctgagtttttgtttatattgaaattttgtataagcattaaggaaaccatttgttttcataaataggtgattacttcgaatagtcaaagaggaggctttgtatatatcttttctaatggtgggctagaaaaagacatggaacaaatggaagaatcgtaaagatcaaagacttaaaaattcttaacatttcatataagtttctcacaaacttggaaaagaggtgatcaaatgggtcattcaatagtttagtactcactctttgtatgtctaccaacattttcatgttgagcattctcttatatccattccatttgagatattgaatggaatatggacactcttgatctttcattatgaggcttgggttttagtcattagtcttaagctttaccatcgcagattttgtattaattgttttattgatcaagtggactaattggaatttgttgcaaatgataatacatgtgattaaagaagcaggtaggtagggtgctttatatggctggaccgttttaaagttggtgttgtgtttttatttatttccagctttaagatatgattctcactttttctctgcgagaaagatagaacgaaaaaaagtcattagcaaaaattataacgtcaataataatactaatggtagttacaaaaaagtgacttcattttataaatgaatataaaaataacacaaaaatatgacgtcatcatctgtagtctagcctaggccgtttcttcacctaaatgactgtcacgcaacgtgcatgactagacgtaaccgaactctataggaacagactttcttaaaataaaataaatgcaatttttaaaacgaaaggaaaaatacaaaaaaatgaaaacgagtaattcattatggcttttacctgcgagacccacgtgcgttggaaagtagactggtcaccacgtggcgtgtgaccattcgttttctggataaccggcaagtcactccagcgttatccggaaatttgtaaaaacgacatgtaaatcaactcgtttgaatagaatggctcgagtccaccaatcaaatctcacgagccattttgtaactgaccaccgagtaatctgtaatctgagctcttttattaatcggattgaataaattcgcttggagtccgtcagtcgtgtccgtgagcgcgtgtctcactcgcttgagctgatgaagtgcgataatgacgtggcatgttgggatggagaccaaagaccagcattttattttattttatagtaactaattttaaaaaccaaacaacctgagattaaaattttaatttttactgtactgtagtaaatttgggtcctgattaagattaggcatatttatctcatagtttataacaagtagcagctgaaatttgtattactagcttatagtaattaaactaaaaactacgttccaggttttaaattattgtttaaagaagatataataatatattaagaaaatagttaattaaggtaaggaggaaagtagggtttggtctgtaggttagggttcaaagagggaagagattaggagaaaggaagcatgaaggcatgacccatttcttcaattagtgctccttaatctggtgacacgtgtaggtcccacgtgtaatcacttcacattgttatttttcaaaaaatcaattagtaaaaacaaaactttgtccatcatcaaatagtagtagttttttatgtgtggttacaatattgtaagaagctctcccccttttactatgtaattcaaccccactctaatttttaaaatatttatgtaaagctttacccgaaaacaatctatcatgggttggtaatgacacatttcattaacagtgttagagaatgattcctttaatttttctacagtaaaatgttaggtgatctcattgtactacatcggaaaatactcaaaattatgtcgtgtaatttagataatggacgaatatggttttgaaatatttatggatacccaacaagatttcttaactagaaagacaaaaaaatagagcacattttgctcgttttccatcaaccctatttctccaatttgttcacatcatgatcaaaaatacagtagcaattaaaaaataaaataacaaatataaatggctatatagatcaaccctatctagctattagtattactagaaattgacaataaaggaaacattcacgtgtgtgagcatgtactactctacacacatgtccacagttattatatactgagtactagtatacgttgatgttatcaataataaaaactcgaaattaagtattattttcttataataatctatttaaccatatttgctactgtactatttagtctattttcttttgccaacctttgtattaaatatttgtactattagtttcaattataggtctatcactatgtatatgtccgaataatggtctaaaattgttaatataaaatacagattttatttcagctaaagatagttgaaattacacaagaaaatagaagagataaaaatgatcaatcagctatgtaagacgtcgtatggatagttcaataattgtggtaatacttaaagacatatatcaaaattatcaacaagcctcgaacacaaactttacaaaaagcctgtgtctactttatgagtgtttgattattaaattgcaaggtcgtagtataaaaatttcgtaggctttcaggacacaagattaaattcatttatctaaatggtgatggagtacttttatttttatatatcaaaatggtgatgatatacgaagaccatatatttagattattaaagaaaaaacgagaaaagaagaaagaaaatataaaaaaatggtttttctttttaacggacaaagattcctacaatggttgcttttagaccacacacaaatgctacacagtactcttgggtcccacacctcttagcaagtgcgttaccaacacgtgaatttcctctccccattttctcgtccttttcctctcaatattgtatcgtctcgttttccttgtcatatcgcgtgtgacgtgttattggcttattgctgaacagtcttcttttttattttccatcgttatcctgatttttttttttttccaaatttgattttcatggtttgtaattttgcaatagattttgtgtttcacagagagatagtttacgtgttgttaaaaataatttgtgcaaaatagtgtgcgtgtgttaaatattaaacgatatataataattagaagaaaataaaaagttttgtcgcgattagttatttgatatttaccttgttcttttgtttatcgctgcgacaagcaccgacggtataaaatataaagaaaaaaagaaagagagatgaaggtgagatgaatgaaagagtcgcagcgacagatctgaagagataggagaaagggaatttgagacgctgaaaattccagcgtctacggaatggccgaattacagtcgatgcggcagagatgaaaaaaatgagaaatgaaagtgaaaaagagatgagaactttttttgggtcgcaggtagctgacgcagcaatcaacaaaagaacatggccaacgttttagtagatactactataaaagaaaaaggttgatttaattcattcgtaatttggacttaatttttttttaggaacactaattaatcttatttgccagctgtatgagtggactacaataaactcttgtctataaaccagattttcttcctttttaacgcttccacttacaacaatatatgtaaatatgtaattatgacggggcatacggaaatttaatttttgaagcagattcatcccattagccagctgtattaagtggtaatccaagagttaatttagttgttcagcaaatgattttagataaaatcaactactagtttaaaataactatcgaatgactgttaaggcttcgtattttttgttctgccatcaggatatcataaatatggttgaggttcgtataatattcgacgatcttttatatatctgagttgtaattgaattagagaaaataaaaaacagataatgaaacgtctttgtttttccataaaaagaaaaacagggtaaattaaagtacgagagattcacgagacgaaaattcctagaggcgcacgatagccaaaagaccatagaaaatgacatccgaaatatctttaaaatgctaaaatgcacatatttttctggtgccacgtagcatttttctccctctctcgttctctctacgtccacccagacctgcctgttcacagcacgacaaagccacttcccaataaaaacacaacacctttcccattgacgctctctttcccaaacaccgttatcctctttacccaatcaaaagttgacgcttgctcacgacttgttgacgccgttagtcccatctaaaaaagtaaagcagcctttcttacttgctaatcccctctacacatttaatttattttctcccctaatggattttttttggcaacttgagtatttatttttcaactcacagtaactgtaaataaataaaagtattcaactcacagtcaccagtaaataaatactaccagaccatagttttttcaagaattgttttggtcaacaattttaggatgacttaaattgctatatttctggggaaatacgacttggaaatgtctgcaatttgggtcttttcttcaatttatcttctccaatttgttttttaaaaaattaaattttagaaaaggatatgtcaattttttctattgaaaaggctttattaaaaaataagaaaaagtggaggaaagaaaataaaatcgtcacttgtctttggttttgtgaggtcgcagaccctggtcccccggaaatggttacaaccggtaatagccggtatgaaagagggaatggtaaccggtgaatgccggttatccatatgggttagaagtttaccgcggttgaaatgattgaagctgagttttgactacctctggttaagcccattggtcgcctcatacccagaaaaacaaaaggataggaaagacgaagaaataaaaagagagagaatgttagagagacaaactctgagagacaaaacaagagaaaatcgctcgtcgtcggtattcaagcgtctgtgactccgataaagcctagactagcgaggacggcgagagagagagagagagagctttggagttgtcgtatctctaaatcggaggcaatttgaggtgaaattggtggttttatcgtttgattctagggtttatcttctctgatagttttatcgagtaatgtcaaggagctaaactagtggtgattgtgtttgttagtgagataaagacaaaggaaggaatcaagtggactaccgaagcgagttttgagctttttcagagacggatttggagatttcttgttgatatcgtctgcttagaggcttatttggtaccagatgaaacagatctgagcttcggaaggtatggcgagttcggaggtttcaatgaaaggtaatcgtggaggagataacttctcctcctctggttttagtgaccctaaggagactagaaatgtctccgtcgccggcgaggggcaaaaaagtaattctacccgatccgctgcggctgagcgtgcttgtaagtctccgtttcttagggtttcttaagcttggttttggttacagactgacttgatctaatttatcttcttcttcttcgtcttcatagtggaccctgaggctgctctttacagagagctatggcacgcttgtgctggtccgcttgtgacggttcctagacaagacgaccgagtcttctattttcctcaaggacacatcgagcaggtgagatatttcatctatgagttcttgctatttttggctaaatctttgagttaacccctctgtgattcgtacctgttgagatattttctaatgaactttgtcggtttccattgttttatgattaggtggaggcttcgacgaaccaggcggcagaacaacagatgcctctctatgatcttccgtcaaagcttctctgtcgagttattaatgtagatttaaaggtaggtttctttaacttcttggaaaattttggtttctgtgtcttggattgtcagctaacaagagttttgtttatgattttacaggcagaggcagatacagatgaagtttatgcgcagattactcttcttcctgaggctaatgtaagttttgttttctgatttattggtttgagtgttgtagaggtgatcttattcttcaagatgctgaattctatatattttttgttccatacagcaagacgagaatgcaattgagaaagaagcgcctcttcctccacctccgaggttccaggtgcattcgttctgcaaaaccttgactgcatccgacacaagtacacatggtggattttctgttcttaggcgacatgcggatgaatgtctcccacctctggttggtgtttcatttgcgcttctaactatctattcattggcttatttttcctgaattttgttctaagattgccttcaattcattttttgtttcttccctcaggatatgtctcgacagcctcccactcaagagttagttgcaaaggatttgcatgcaaatgagtggcgattcagacatatattccggggtataggaatctgtaacttttttattttctgtttttctcgagtctgtgtgtcatcaaacttatctggttgttgatgtttgtgataatggaccaggtcaaccacggaggcatttgctacagagtgggtggagtgtgtttgttagctccaaaaggctagttgcaggcgatgcgtttatatttctaaggtttgtggattttagttcattgttttctttagctgtatctgttagtttctataatgtggaatatcttaatcttctacaggggcgagaatggagaattaagagttggtgtaaggcgtgcgatgcgacaacaaggaaacgtgccgtcttctgttatatctagccatagcatgcatcttggagtactggccaccgcatggcatgccatttcaacagggactatgtttacagtctactacaaacccaggtttgtatttgtattagctcacaaaacagctttcagttttttgagctctttgctttgtatgtctctatatgtctgatgcttggtagtgaatcactctactaaattttcatgcggtgttgttttgtttaatacaggacgagcccatctgagtttattgttccgttcgatcagtatatggagtctgttaagaataactactctattggcatgagattcaaaatgagatttgaaggcgaagaggctcctgagcagaggtaaaacctgtcttctgcttttgaaatatgttagctcttgagcctttttctcttggaataacgaacctaacaagttgtattgatttatattaggtttactggcacaatcgttgggattgaagagtctgatcctactaggtggccaaaatcaaagtggagatccctcaaggtatgacctagtttctagagaggatcaagactattgtttgaatataatgaatgctgattgttcaattgtctttcaggtgagatgggatgagacttctagtattcctcgacctgatagagtatctccgtggaaagtagagccagctcttgctcctcctgctttgagtcctgttccaatgcctaggcctaagaggcccagatcaaatatagcaccttcatctcctgactcttcgatgcttaccagagaaggtaatgtcttccccttccactgtagtacacatagtagtgcgtctgaaacttaattgaacttgtcagtgggagtctaattcattgtacacaaaacaggtacaactaaggcaaacatggaccctttaccagcaagcggactttcaagggtcttgcaaggtcaagaatactcgaccttgaggacgaaacatactgagagtgtagagtgtgatgctcctgagaattctgttgtctggcaatcttcagcggatgatgataaggttgacgtggtttcgggttctagaagatatggatctgagaactggatgtcctcagccaggcatgaacctacttacacagatttgctctccggctttgggactaacatagatccatcccatggtcagcggatacctttttatgaccattcatcatcaccttctatgcctgcaaagagaatcttgagtgattcagaaggcaagttcgattatcttgctaaccagtggcagatgatacactctggtctctccctgaagttacatgaatctcctaaggtacctgcagcaactgatgcgtctctccaagggcgatgcaatgttaaatacagcgaatatcctgttcttaatggtctatcgactgagaatgctggtggtaactggccaatacgtccacgtgctttgaattattatgaggaagtggtcaatgctcaagcgcaagctcaggctagggagcaagtaacaaaacaacccttcacgatacaagaggagacagcaaagtcaagagaagggaactgcaggctctttggcattcctctgaccaacaacatgaatgggacagactcaaccatgtctcagagaaacaacttgaatgatgctgcggggcttacacagatagcatcaccaaaggttcaggacctttcagatcagtcaaaagggtcaaaatcaacaaacgatcatcgtgaacagggaagaccattccagactaataatcctcatccgaaggatgctcaaacgaaaaccaactcaagtaggagttgcacaaaggtaaatttttgcaatatgtagcacaaagtgtatgaggttgtgataacccttgaatcacttttcaactaacacatgacacattgatgtaaaggttcacaagcagggaattgcacttggccgttcagtggatctttcaaagttccaaaactatgaggagttagtcgctgagctggacaggctgtttgagttcaatggagagttgatggctcctaagaaagattggttgatagtttacacagatgaagagaatgatatgatgcttgttggtgacgatccttggcagtaagattttgcaaattttccatcttagtttatatcgatgttagtgtttttcttataacactgacacaatgatctctcttgcagggagttttgttgcatggttcgcaaaatcttcatatacacgaaagaggaagtgaggaagatgaacccggggactttaagctgtaggagcgaggaagaagcagttgttggggaaggatcagatgcaaaggacgccaagtctgcatcaaatccttcattgtccagcgctgggaactcttaaacaaacaaaataaccaacaacccttttgctgcaagccgaggtatgtaaaagcttttgagatattagtagactagagacacagccaaaagtttatgtcattacattcgactgatgtttgttctgttaatgacagcaggatgggggtcgattggtggagactggagagcaaaatgggatgatgggtttaagataagatattaaaaatgcaatttttgaagtattttgttggccacttagataattagcatcttccatcacccttattatctatctaataataattaatagatattataaagtaaaacataaaaaggttacaggtattatatagtagaatatgaaaagctcttttataagtagaatatgatggtgtggagttgtagtcggaggctggtatcggttctttttatggatgtatttttttccttcttccaaagatctcttgaagtctttttattgtttatattaatcccaatgtacataagttttcaagctcttgcccttttttaattatcttgtcgattcacattttctcaacttattctcttgctgacttttggttttggtctggtcttgtcggtattttgcagcttttcgtattagacggtgatatagatatattcacgaaactgtaagacctcttaacaaacggattccatttcgaatccttacattaaataaattcggatgtttctagctacaatctgaaaattaagcttgcaatgagcaaaacagtgagccctctttttaaagtactttgaaaaaaaaactggatgctaaaatttgttgtttcccttgtaacaatgaggaaaacaaggtttgggttttcaagtttatttctctagctatgctcatgtccatataaacgaatccgctgaaaaacagaaagatgacaccatggcaaacacatgatcaaagtttcgtgatctatggtttcattctatcatatggctcttcataaccaaacttgtatttaggtagaactctatctaaatcaagactttaaaccatatgaaacacacaacaccggcaactctggcatactaccgccttaagccgacaatctcaatcgtcacagaaacacaacaaacattttatcaaacttgctgagtttatggaaaaactttcaattgtatcagtttatgccattatcttacaacaatacaaaactgcatagttaaataagtggttctctagctccttgtaattctaccatcgacacatatagtgataggtctgatatggatgacacatcaaagcagacaatctaacaaaattattaatttttccaaaattccaaataaacaataggataaagtaaacaaaatgtgggacctcaccacttggggcacactatatgagggaataaacacgcaactccataggaagtttcttgaagcctaaaacattacgctgcttctcgatcttttaacccccattattacatattactccttcctacattattcttcttctgctttcgtgactttcaggggacacttttgtttttataacttacgcttaaaatcctatgaattcgccgccggttgacgcaatgattaccggagaatcatcgtcacaaagatctatcccaacgccgtttctcacaaaaacgtttaacctcgttgaagatagttccatcgacgatgttatctcatggaacgaagatggttcctctttcatcgtatggaatccgacagatttcgctaaagatttgcttcctaaacacttcaaacacaacaatttctctagtttcgttcgtcagctcaacacttacgtacgtttataataatcatttcttcttcgattccttctatttccattgttcttgatttaatcaatcctcttttttattcacagggattcaaaaaagttgtaccggatcgatgggagttttcaaacgatttctttaagagaggagaaaaacgtcttctccgtgagatccaacgtcggaaaataacaacgacgcatcaaacagttgttgctccttcgtcggaacaacgaaaccagacgatggttgtatcaccgtcaaattccggggaagataataataataatcaggtgatgtcttcgtctccgtcgtcgtggtattgtcatcaaacgaagacgactgggaatggtggtttatcagtggagttattggaagagaacgagaagcttcggagtcaaaacattcagctaaaccgtgagcttactcagatgaaatctatctgcgataatatctatagtctcatgtcgaattacgtcggatctcagcccactgatcggagttattctcccggaggtagtagtagtcaaccgatggagtttttaccggcgaagcggttttcggagatggagattgaagaagaagaagaagcgagtccgaggttgtttggtgttccgattgggttaaaacggacgagaagtgaaggtgttcaggtgaagacgacggcggtggttggggaaaattccgatgaggagacgccgtggttgagacattataatcgaaccaatcagagagtttgtaattaaaaacgaacggtttagatttgtggtgtagatatgtgcgcgaagtagacgattacagctttttaagacaagcagagcacgtgtcccatctgtttcaagaagtttctgcaatcttgacttcttcttttaacactttgtgttttttattatttaattaataacaataaatgttctttttcagttttgttttcttcaaaaatagttcggctgtttctagactttccttttttgacctttttttattcttcacatctttttgtgtgttttacaaatataataaacgagaaatgaggtagggatttcttattataaggataagaaattaaaatttgtaatgtaatgaagcatctggaatctcccgtttggtgggcgcgattcagggaacgtgttgtggacccagtttcgtcgactatcacaagtacatttttagattttcaacgacattatgtagaagattggtttcgattacttatttcagttggttagattgaatgtgttgggatttagatagagaaggttacgtgaaaatttgctcactcatattattcgttgaggtttcgcaatcacttgcaatgggaaaccaaaaaccaaatgcataacttgcaagaaaaatgagacatcaacatctaactgatttttcttcaattagatggcatattatttacaaaaaaaaaactaattttctcaaatatattatcttgaaaagctagacactaatcgattgtgagtttatgaattataagggtcctaagaaaactctcaaagcaagactattttcctaaaaacactttgttttgttgtctcaatttcactttgtttttcttaacaagttccgatttattgcctatcaatctcagttagtctacgccaggctttgatgatacatatttaggtgtaatcatccctcccaagtcccaacaaagctcaaagttgagagttaactaaaccttcctctaactactaagtactaactaaacaattatagatttcttttggtagtggtgaaccttttgttgttgtactcaagtctttctaaccacaactcactattctctttgacactataactgtaattaagggaaatgaaaaataatgaagactagatgtgtctttaaaacataaaacttggattaatactagtatagactgatttctatataaaatatcttgaagtttgtccatcttgactcttgatccttattcgtcactgttgagttgttgacaatgacatgtgtgataatgtgtcttagtgtctatgcatttacatacatacaaacatctaaatctatgagttgtcttctttcccaaactaatatgttgtctctgatttgcaacatcaaccacacaaaacaaaaatctaagagaaaatcaagaactctcggtatcatcgatgaagcagtagaacatactctagaaacaaatgttctcggtttaatgttacttatccggttagattatacaataaaattgattggcttataacaccggttagaccttaaaccctttcgtgacttattagttggtctctgcgccgcgttctcttctctatcgattaagcaaaatcgaccctcttcgattttttttttccatctctgagcaaaatatcgtgctttcatcatcttcgtctgcttcttcttcttccaaggtttgtcttcgatctcgaagtatactgattcaaagacctaatttttgtccccattcgattgtagaagcttcacatagattaataaaggaatcgactttgttctgttttagcgactatgtttacctaagctgtgtaaacttaagagaaacccttttgcggattgaatgtatgatttatgcatatctttctcttatgtttcaggccaaagtatggagctttctgatccaaacaatggcaagaccaacaaaccaaagcaacctccaaaacgtttcatcaagaaccaaatccctgattcaatcctcggtgatgcatccctcaacgctgctatctccatcttaccttcaatttaccattttgaagtccataaatgtgtgtggcgtatcaaaacatcaaacgctaaacgcatagctctgcagcttccagagggtcttcttatgtacgctcttacactctctgatatcttcacatcttttgctggagcttctcactgttttgtactcggtgatgttacttatggagcttgttgtgttgatgatttctctgcttgtgcgcttggtgctgacttgcttattcactatggacatagttgtcttgtccctatcgactctacaaaaatcccttgcctttatgtttttgttgagatccagatagatgtcaaatgcttgttgaacactatacatctgaatctcgcgagtgatgttaagaacatcattcttgcaggcacgattcagttcacttcggcgattagagctgtgaaaccagagttggagaagcaagggttcaatgttttgatccctcagtcaaagcctctatctgctggtgaagtccttggctgtacagctcccaaggtgaagacggttgaggattgtaaagaccaagtactggtctttgtagctgatgggagatttcatctagaagcattcatgatagccaatccaaaaatcaaggcgtttaggtatgatccatatcttggcaagctgtttttagaggagtatgatcataagggaatgagggagacgagaatgagagcgattgcacgggccagggaggctaaaacttgggggatcgtgttggggacattgggaaggcaaggaaatcctaagattcttgagagattagagaagaaaatgatggagaaagggatagatagcacagttgttttaatgtcggaacttagtcccactagagtggcattgtttgaagactcggtggatgcttgggtccaaatagcatgcccaagactttctattgattggggtgaagcgtttcttaagccgcttctgacgacttttgaggctgagattgctctaggattcatccgcggctggtgggagaatgattcttctagtagagtaaattcttcatctggctgttgcaaagaggacaaagaaacaagctgtgcgtgtaaaaatgagaacgtgaaagatgacaagaaagacaatgatggggcactcgatggagactatccaatggattactatgcacaagaaggtggagaatggaactcttcatatctcaagaagtcatctcgtcccattcgaagaaaccctttaccttcttctgtagtttagaatgctgacagagtaaattcaaccacagcaggtattaccaagtcaaaaaggcaaatgggttttgatgatgttcctggtattttcggatgggttgatttgcttgtatcgtaatcttcatgctgaagaatgttacttggggaggtcttgaagcgaaaccttagactattacgagagtttgacataacatgaagattggaagagtgaagactcctggtctgttttgatacaaagcggtgaggattaaacgctgtttgcagagaagctactacacttgtttatttttgtcttctcattacttgttttgatgggttacaacaaaatggtgattgaagtgaaaacagagccctgtttatgtgtctgtagtgaaaactgatgatgtttgctgcctattggacccggttttgttttggttttgaagtttcgttggatccggtctcattatagtaaatcgagttgactattcttgcaatttagaagaagaaaactaagatgtaaacatgattcatgaaagtttgtgatgaaaaagagaataagtttcagctgattttagaactagtacctctactatgaatgaattaatgagtttaaccgatttacactgaatgtcaaaatgaaaaggagaatatggtcgtacactgacaaaataaaagagggaaaagatatggtcgtacactgatactgatagtatcggatcatacgtcaataagggataagatattattaggttcccacacttggacatcatctctttatttgtttcgttgaaaaaaataatgttctaattttatcggatctcctcaacaaaatatcactccaattccaccacctctctgtcccctgtcctcttttttttctttttgcctattgaaaaagtcaccttaatttttcttgtggcataatttttcttggaccatagagatattcataaaagaaagaaaagaaaagattgttcacaatgccacctttctgtatataattcactacgaagaaacaacatttggcatttgacaaaccatcaagcagcaactatggattctctagagaatctcgcatgcaaatatcaatgtgtcccctagattttattttcttcttcttttttttttttttctttttttttttgtatagtttggtcaaattcgaacatgtgacatgtttagtaatttatgatccgatgttgtcttgaatttacgaaatccctacgtgtgtgtgtcttaagtcgaaatttacatgttagtaagaagctcctagttttgactccaaatatctccaagttccaacgacacgaagaaactttttataactgagtttggctaaaagctaatatgttactatgttagcaccaattaaccatcgacgtgttagattctattcagacaaaattttagtcacttttttttgtatcgtcaactggaatctatgtcttttttaatttcgtagtaatgtttgcgttgactgtttagctaagaaagtaagagcgtatagttttctattttctcatgtaaatttgttggtttctgattagttctcagtagagtaaagtgtcttcaagaaaatgaaagtgttgatgattgctagagaacaaatatgtctctctattcaacgataatggttataagacggatcaacaaaatggctacagaaacaagcatttaaaattaataaggtgcactgtatttgggacacgtattgaattgagcatgatgagaaactcatgttgattctgtgactagaaactataaagtgtctaattagattctttgtctttgtaaagcagattccattctttttattgttttatctcttcttcatatttggaatatctacaaatcaattcctaagccaatcatcacagtatctggtttttatttttttatcgacacgcgggcttattcttttctccatttggtcgatcgaatattcgaatgtaatggggacaatagttattgagttttaataaatacgaaacgtgaagataattttgcaatagataattgatctgttatctatacatgtgagttttttttttttttttttttttttttgttatgtgcatacacggaagtattttttaaaataggtaacaaaataaacatgtaatttctaaccatatagaataggtaacaaattacaataattgaagtaatatggttagaaattacatgtcagatatatacatacaatatctaaagatgacaaatgtcaaatagtaaaataatagagcatttatggaagactatctaattcagtatagtagatatatacatacatacaaaatacaatctatctctcactttgtgccaagtcccgagattctttagaaagcctatataaagctatcacatgttttcattctaacgaaatcagcatcaatcacaaacgcaaacacattggagcaaagaaaaatgtcaagagaaatagagccactaatagtgggaagagtgataggagatgtactcgaaatgtttaatccaagtgtgacaatgagagtcactttcaattccaacacaatcgtatccaatggtcacgagctcgcgccttctcttctcctctctaagcctcgcgttgagatcggtggccaagatcttcgttccttcttcaccttagtacgtaattagctttcttctaaacttaaaatacatatgttaagtaccttatttagttctctcttgtagcattaatcttgtggttttctttttaactcgaaagatcatgatggaccccgatgccccgagtcctagtaatccttatatgcgtgaatatctgcattggtaagtcgattgaagatatcacattacttctcatatattacaacaacaatgtataatatgtattctttatgttctcatcaaattcaggatggtgacagatattcccgggacaaccgatgcttcttttggtaagaatacatcacatcataacacatttacatagactttttcacccaccacatctttggttgtaaacacattcccaagcaaacacatttttggaagaggaagagaaatagggatgtatgtatgtatgtatgtatgttgatgaagataagatcatgaatggatttattgattgcagggagagagatagtgagatatgagacgcctaaaccggtggcgggaatacacagatacgtctttgcgctattcaaacagagagggaggcaagctgtgaaggcagcgccggaaactagagagtgtttcaacacaaacgctttctcttcttactttggtctttctcaacctgttgctgctgtttacttcaacgcccaacgtgaaactgctcctcgacgacgtccttcttattaactctatctattataactctgctctataaacaataaacttcaacatagctacaaagattatggatgcttgtgctgaataaatccaaccattaccaagatgttcaaaaagatccaatgttgttcaagttctgttacttaacaagataaaaaagtatatgttatccaaaatgtttctataaaaacaatcttctattctataattggtcaaaacaaacttacaatagctgcctccagctttttagctcacagagtagtttcatcagtgagaaaattctgtgttcactttcgactcaaaagctttattatttttttcgtttggccctcttaacaaaaatagtatgcaccgttttaaatcacttcttcttgctgctattcttcttccttccctttacttggctctccaaagccttgagcctcttactaacaggactcagcgatgttgaggaaagcctcgggtttactggcgaaggtggttctatctggttctgtgtatggtcctgtgtcatggctttcattttcttgagagctgaaaacaggtcaaatgaaggttgttgacctggaggaggtggaggcagatcaggtatgcgtaacatcttcttcacttgaggacgctttatcactgtcattaataaccattccttgttaatgtttcaaaccaagaatatgccacagttaaaatcttcattacacactcactcaccaagtccatacatgagagagaacaggttggatgtgatccagtaacaaaatatggcctgcaaattttcggaaattcgttagaacatccattatacaaagtctttcgaggttttttccgataaatgataataacctgtggaaaactcattgtcatcgggactgtgaggagagcaaaaacccgacaaacagtttttacagtgccagccatcggattcccttccatgccttcttgtgcattacactgcgaagtggacatgtttaagcttaagtcagcaagtctgttaaaggttgatgtcaaaaagtttattaagttagcagaaactgtacctcaacggttatcaagaatgtcaatcctgttataaccggcaagatgtataagctgtcgggagttgttagatcggtaaaccataatgcacctcctgtttggaatgaaggtaccttctctgccatatttcgaatctggggaaaaaataactcatttgagacaaaaagcctaatgatataacaaacaacatagcccaaaaaacatcttaagattaaaacgtcttacagcaaggaaaaagcagatgaacagcggtccctgaataaacatccctttcattggggtgaatggagtgacaccatatctgtaaattataaacaaacagtatatggttattaggacatatctaccaatatattcaaaatgtcaggagactgcaccaatacaataaccagtagaacagacaagctacatatagcgcactccctacccaactatgatccacgagggaaaacttatattaaaactagtatagaattctagtttttacgaccaaaagaagtttaaactccaaagagatctttaaatttgatttttctggtcagaaaatgtttaaatttaaaagcagcttactctttaaacaaattcttcatctttttttgaccttctgccatcgtaaccgagtccattccctgaacaaaaatagtaggaaagaatatggagaaaatcaaaattaacatgctgagctaaagctgagtggacatgcagtcagtacaaaagctattagcaggtagcaaaagtgaggatgacttccatgatgtattaataacaaacttcacataccttgttttgcatttcctcccggatggactccaaccgtggcctcatcagctgcatgatcacagaatagactactgatggatgtagcataaggcagaaaaaaataaccaagtataaatgacagaagttataagttaatgtgcatagacattgctttccttttgtatgtcaaatttgtttcacaacctgagtatgtaaaaacacaaaaagcaagaagaaactgtaacggttggaaagtagaaattttttcatgaagttcacaaatacatcctttgcagtagtttatgatttatgtagacttgtgttattgactacagtgatgtggatctcaacttcctattctatacagagatcaaagtctacatataacatattcatatttttataaccgaaagaagcatgtctaattctctaactacagtcagtctctatatttgaaattactttatatatgcaccatcctaaatgatctgcaaggtgtgaaaaagggacaaaagggagacacataccgctaacttggttgtgtctttcatttgtttgatcaagagaggaactgttgatgatcggatcaaaatggttgctacaacaatggatgcccacctgtaaatagccagaaagaatataaggatatagtaatatcttggtccagatgaggttttcagactttttaactcataaatatccgaatcttatctcaacagtactcagctaacatgtgatgtatacttaagatcaactccagcagactgattaaagtgaaacatgacacaacaaacaatattaaagtttcttaccactcaaagcctgtgaatgtatgcaccatatcaatgcactgctgaagggccgcgatagggaagaaagagtcagcagctgcaagtgtaacttcactgacagcagcagcagcctgagctggcacatcttgcaatgttgagtcggttatgacttctgcaatgtcagacatcacaccaatcttctctgaaccaacaccaggtgcacttgacatataacgatagaaagcaaaaccagacgtgggagcaagaggcaaatgtaagcttcctccagaaactttggagaaatcagaattgttaacggatctttggtgaagaaagctatggtaacttctctgagatgtttcttgacagaatgaatccctttcatgatcactctcacgagggataatatgataaactggttggttacgacgagcgaaaagcctggaccttatagataaagtttgcctgaaagccattgcagaatctaaacaagatcctacagtagtaagaacaaagtcaatatccaatagattgctgattttcagatcaaagagcaaacttttttattcattgatcttgcttaaaaggaatcacacataatcaagtttcaatttttggaaatacgtatagaaaacaatagagaacccacaacaaatcatagaagagattactaaaagagcatactaaagattgaactgtgagttgaaggaaacagaatcagaagaaagcagagagatttcataagagatatcaatcagcttcaggcacttgcaaacatatccaaaaatttaagcttgaaaatgatgataaatcgggggaacaaagaaatgttaaaatcaaacaaaaaaccaaacagagtaacaaagaggaaaactttaaaaactacttgaatagagaatcttcagaaataatgaaacctgtcaatggaagaagaagacggtgatggtgacggtgagacgagacgactatgaatcacggcgaacgaaacagagacggtgaatgggttttagaatggctaagttatgagatcactaaaggaaggtcagatcgtacgggaaattagggattttagttaaaccgttctggtttattttgttcggtttggtttataaatcggaccgaaccagatcacttttgacttttgaaaaaatgtccaaactccaaacgatacctcagctaaaatttatcgtaccatgtgagaagatttctatgtcttttttttttttgctaaagaagatagattttagtttgttgtaatagaaatttaatttattgtaaaaattctattataatatattttcattatccgtttcgaattagtactcacaattatattgataaatatatgaacatgtaaagccctcgttgtatcttccatataatcaaatctctagggtttaacgtgatgaagagaagaagcaaagagagcaactacaatatctcatcacaacgtcgtcgataccgtgaaatctccactagggaaaagtcccgttatattgatatccctctcgatataacggtggagatactcaagaaactccctgcgaagtctctcgtgaggttccaatgcgtctcgaaacaatggtcaaccattatcggatcccgtagagacttcattgattcgatcgtggcccgttcgatgactcatccgcagcagtggtgggatgtccttctcatcttccactaccaatcagacaaatcttcttttttcatcttcactcatcctctaaacactaaccaagaattagtatcaatccctggattaacggtcgactgttatggctacattcgtggtttgattttatgttgttcagatagttctatttctgtcgctatatacaaccctactacgaggcagtctcttctcttaccaaagatctaaatgctcatagatgatttattcaatcacgttttcgtctttgggtacgatcctgtcaagaataaatacaaagtaatgtgcttgatgattactaaatcggaggagtttgagaatgcttgttttgttttcacattgagagatcccaagaagcaatggaggaacgtcaaatgcggtatccaacatcactatccgtggctacccgcagtttgcatcaacggggctatctattaccgagccactgaagatcatggttctacatttttcttggtgagttttgatgttaggtccgagaaatttgatcatgtgaatgctccgaaagagctgattgatagcaaggattcgactctgataaattaccaaggaaagctaggattcgtaagttatgagaggagcgtgggaatatgggttatggaggatcataataaacaaggatggtccaaggttgtagatagctccattggaagtggtgagattgttttcatcaataagatggttatctgtcatgacacggtatatgtagtcttttttttatcctaagcgaaaagatcgtatgagacacattggaatcgaaggtactagtgcggaggaaataaagcgtaatcatcttattcatatattgggtgttccatatcatgtggagaatacaatgtgtttgtattagttagaagttttcaaacaattttttttatcgatataatggtttcgaaacataggttgttatatataaaagtacttaaccattgagtgattgtcttctctatatgaactccaccttttcctttgcaattcacttccaacattgctttcatatgtgctaacgtgcacgtcaatgacactattgtgcgcaccctaatcacttttcgcatgatatggcttgtttttagaggtggaaataattcatataaacctcatcgcgttcacacaacctctgttgaaaaccaactccaaacacactcccaacgctcgtttttcgtgttgtctataaaccctaccttgtacaccaagcgaaaacgtcctaactagtttggcctaataatcaaaagatatgacgagatcattctctccggtggtgtctctcttcttattactactgcaaacgatatgttcagccactgtggaaaacgcagcggattgtgcggcggtgggaacgctgatatcgtcgtgcacagagtttgtgaactacgggtatccggatccgataccagggtcgagttgctgcgacgcgatgactgtgatcggaacttactctgattcgtcggagaagagaaagtggctgtgtaactgcttcatggatctcatcaatgtctataactctaacgccaccgccatttctactttgtctggcttctgcggcgtcgttttgggcttcaccatcgaccctaacaccgactgcaacttgtaactcaccctttctctatatattcctttatgatttatttagtatcaaattagattcatttgttttcctttttgtagcattcaatgaaaattcaaggctcagtgtcagtggattccaaaacggcctcacatatagataaggtggattccaaaatttgtactacaaaattatgaatgcttatctgaaacaaatctgtattaaactcttgataaaaccagtaacgaaaattacatcagttagttttagtttggtttcagttcttctgatatctaaaaaaagataccatttgaaccatatctaaattgtggggtttgactcagtttgattaatcttaattgaacactaatcaacaaagatagagaacagagtggtgttccttcttttgcaagcaatcgaaacttgttaacaacaatttacacatccagtgttaatacttatctcttctggaaaattaccaaactcaaaccaaaaaaaagaagagaaagagaatcacaatctaaacaagaaacgaagaatgcatcctcgatttcgcactttggttccgattcaatcgatcagaatcgcctcctcctcctccgtagtaaccagcgcttccaacatccaaactctcttcttctaccgctgtgtagtagtaatactgtccctgaacagatctcttgtagccactggtctcattagagacctcaactctctgtttcggcgcactttgtgaccgaactttagctttataagactcagtgttagccatgtaattcgggtgataacccgagtagtaatagttattacatccccaagaatactcgcttcttgacgtcggcgtaaaaggagttcttcttcttgacccactagaaccaacttgaggactattctctgtacttctcggacccaacaaagattgttgtcgtttcctcggagactcattgtttctctctgaacgtaacggtttgggatgataatgaggcttccaagtatccacttctaggatcttgtctccattttcgctttcctccgcctgccaatctaaccgcttagagcctccacggtggtcaagagagctgacttcagcgtttgaaacgcagcgcgtgtgaagagaacgtggagaagacgaggaagatgggaacaaaagagcggtggaggagtggaaagaagcagaggagtgagaagaacgagaggctcgagcacgagcttgagattgaagacgaacaagagtctgcatccttctaagcatatctgcagtttgttttctcactatgtgtcctctcactaatgcttgaagcttcactaatgcctttagtgctcgtaatgctctcctcgcctgaaaattttccaaagtagccaaagcaaaccaataaacttcatatagagtctttaatttatgttcaaaaaatgaatatttactccatatagaaagaacttggagtaaaaaattggctccaccatgaataatcaaaatttgagtttgcttgaaagtgaataacaaagacaaggcgagttcaatcatttgttgaagacataatcatcgttttgccaactaacattaaaacacacagaaaaagagtagtaaagggattagttgtttgtgaaattattctatttagcttttagtttctcaaccacttccacttgtaccaaaaactagatttagtaattacaacagagcccaccattctcataactatgtctcaaagtcaaatgtacacacacaaacacacacgagttcttctttacacattggtcaagattcgacaacacacataagatcttggaataatttaacgcaaattagcaaaaacaaaaaaaactccaagattcacagataggaatttgaaaaagagtaaaaaacatggtcaaaatgaatctttgtaagtaaagagaagataaataagcaacttgaaaaagtttttgggctaaagatttcaacttcaaagttgctgtcctaaagcaaaaaagaacccatctgtaaaatactaattagtcttgttaatttcaataaaggttcagaattataaagcacaacataacgtggaacaaaaaaaaacttggcccatctgacaactaaaatcaaatgattcacaccaacattaaactaagttcatttcgacattctgatcagatctttcatcaaaattttgagtgataaactaacagaagaagataaaaaaaaaaactggaactattgataaccactaaaaatagtgtcggcagagtgtacaagtttcaaagaaccttcttcatttcacatttgtttgtcttcttcttcttcttctatagtcagtttcttttgggaccaaaccccacacaaaacaatacaagttttacccattgtttccattttcaaaatttgaaattgtgaatgagaagaaaaaaaatccgaatttcaacagttattgcacattatgtaaattgttttatgaaattttcgaacagtttcaaaattcaacattttgaatcattcttgaattaatcagctaaaacgtttgagaaattagtaaactaaccagataaccacgaaaagcggattgaatcttcatcgccgcgatattctcctgagcccaccgacggttacttcttcctatttgaaacaccgacgagtttccaccgccaccgacgtttctcccgccgtttccgcttgttagtctcacgacttcagctgccgcatgagcagcagtaagagctgcttccgccaccgcggctgtcgcagcagccacagctatcgcatgtttgtcagcatccaaaccattttgctcaaccaccgaagccgacgtcaccgccggagctctcttgctggaatttgaagatctggtggtgaagctccacctccgtttatctctcgacgaagcagctttatcagacttttttttactcccgaacagtctcccgaaaaagcccatctttcatcgtcggaaaatcgtcggcgaggttttgtcggagagttctccggttgattaacactttatttaatatctgagattgttttttgtgttagaggaaaaacaaaacataaacttttgtctatagagaagctaaatagagtttaacggcttatatatagattgcagagtacgtttccacgcgccggcatacagcgagttagttacacgagattttaaaaggcttttttattttttgcttagcttgactttatctaaagggcgtcggttaaagtcaatgggcctgactaatcctaccaaccgtaccagatctgtgctttgtggttttgttcaaaccatttaatatcaattacgtcattttttattttatttaactttttctgtaatgtgaattgtgaagtgaatattagatctttgaattatgtagaaaacgtatgaaaaataaataatgaagaaaagagaataattgggaggacgtgtcattctttgaagcccataatttcactgcagtctagtgtctgtgacttctgcaatttggcagcttttttctttgcttcaatccaatacaatgactgcaaactttacaaatgtgtatggaatatgtttttgaaatcagaaatatattttgtgtggatgataggtgtttatcttttatccaggccatacaaatgttacataggttgttattctggtggcacaattcaaattcttcttgtacttcaaattctataaagagaagttgttaatcactagctagattaacccctcgattttgaaaggtgttgttttcttcgtttattcatctatctatttgtttagttatctatattttactgttcagtaggatgcagtttagaagtaagtctacgaaaaaggaaaacaaatagggaacattcgaaaataaagactagctgtgataacgatcgtctataaccactaataaatactatcctcctcaagtcgtattcagcaacaagcactagaggggtcaggtgcaatttttagactttctagcttttaaacaaacattgttagcttggcaacaatgaaaactaacatgattttccatgcatattaaacaagtcactaatctaatttatttctgatgtctagacttacgtacgtacatgtttaagaataatttggtttcagaccgggaatgttttattctcataattatcaaagctttttattatactagtagtatctaaatttctaagcaaaactactagaactttattatagtaaagcagaagttagaagaaaaaacataagactggaatatttctcattattctttattttcccgttttccttgatcatcttggaattgactcgtagcttaactaagcatttatacctgcacaacccaaaaacaaaacaaacaaaaaaacaaaaaaacctcagaaacagatatgaaatagaggtctatatatcattaaataaacacattactacattagccgagttagctagagctgatatatgaggttttatcctacttaatctacttggaatcttaggccaagtctttttggtttggccatatattaggccaagtctaaaatgttggtaactaaaactaaatatatattgagatttgttttattcatcctcatcttgggataacgagccaaatatcaaacttcttggttaaaagtaaataaatccgtaccacaatccacaggaggaaggttacaaagcgaaggaagagaggtggctgcacggagagcgttgcatagacaatctctattagtagattgaagtgcggcgcaacactctgaatttggtctgcctgaaccgggcagcaccatggcggcgcatacctgcacatttgctagatcgttgccacattcttgggcttgaactaccgtttctatagcagtcatggcaagaaaaaggacactgagaacggctgcgaaagacttgaacgatgccattattgccatggataagtttgtttctatagatatctgatgtagttctatgtatatgatatcatatgtttagatttatcatttatataatgttttgagtgtatattttgagtgattaattagatgagttgaggagacgtttggcatggtcacatggtctagttagttcacaagatttacatgtgaaagtaaatcactctgttctctatccaccacgctgagtgcaaggtttttttatttatttattttattctttagtgcaaagcaaaaatatttcatatacaaaattatgtaatatatgaaattaactatggtaaaaggagttgacaaattatctcttgtagatagtaggatggttggtatattgaagatgaaaagtattactgtattagtgcaagtagatgaagattacatatccgtatttgtggaattttgtatgatttaaaatcacgtcacaaatacattttattaaaatttcagagaaaaaaatagcatgtgtctggcttgtttgtgacgtgttaccgatgtttgtaactgtatcagctttaaataaacgaggcttaaaaaaagtcataagaaaaaaggtaaaatattgattgatagcgatgagttcctgaagaacagtcttttttcttttccagaattagtaacactttccagaaaaacctcttcataaaaagagaagctttaatctaagaagaagaaagaacaacaacacagtagacacgttaacattgaatccccctcatcagattcatatacctaagaaagttagtctttagtaactcgttctttacaaagacaacattggagctaactatcaaaatgcctctcatgacttccaagaatatcctcccatgctttcatcaacctcattgctaaaaaccccgttattcccaaagttgagcgatgtattagagataataccttccaggttttggctttggtctaaccccttgatgcctctgaatctgttggaggtgcttggtgtttcagctgctgcgggaacataatctgttctgtttcttcccatgttggtattgcaattcatcatgttctgaccagaaagtgactgttgttgttgaccggagcctccattgctgtttgccatctgttgccatatttgatgaatcatttgttgttccaatgtttggttaccgctactacaggaaggtggctgttggtggtattgctgggttgagccattataactggagcttggcatttgccgctgaggagatagatgggaagatacaccacttattgatgggctatgcacaaaaccaggtaacaagggactagttccttgatagctcggggatgcactccggtttcttgatggttcttgctggattgtggtgttgtttaggtctgaattcagatggttttgtttcatgagcatgctctggtagttggtaagcgcaaaagcggcagcttgtgcagagccgggaagagatccttgaccgctcatgttgttcattggtatgtttatcccggaattgcgcaaggccattagcttgttgagactgttcctatcaggtggaagccctcgggcagccgctagttgctccatctcctgcatctgaggtttaccagccttcattcgatatggatagctcttcaaagcctctgcaaatgttaaaaggtagcaagaaagctttttataagcacagccaagtaaaaaaaaagcgttttgatgaatctcagggactctctgggatttatgtattaacttaccgattggacccactttttggtcacggcaaaagtcaatcatatctttcatgctgctgacaacctcagaaatctgtttaaagaagatggcaagagttaaacagtaaaaaggagacacgccaccaggaaaatgcaagaaagtaggcagagagatacctgcagacaccgaacatatcgttttgagaagcctaagtcattgagtgaatgtgactccaagctttttgctagttgacgtccagcagccatgaccctggagcaaaagacttggcatcagtacatcatatttgtatatattaagctaaaatcgctttgatcttctttgcatcagtgaaaaatcttacctaattaccgtacaagatgcaagaaacaatgaaattgaattgattgagaaatatggaagaaagagagtgaaatattgtctagaatcatcaagactcacatgttgctattagcttgcaaatcttgttgatgaatcccatctgatccactttgatcaattgtgctctgacatttctctgcaacctgaagcaattggttcacctgcacgaccatagggagcagacattcaaaaaatctcaagaccagggatttcaaaaagagtcacaaagattgtaagaaccattaatgttacctgtggagctactaggcgacgaggaagtagttcttcatgtcgacgagtacagaactcccatgagagaatctggcaaaaggaaaaaggataagctaagttactttaatacacattaatgattaaaagtatttggaatcaaaagctctttaaaccaccttcagctcttgggagaatataatccgaagatggccttcgcgaacaacacggatatgttcgtacacactctcctgaactgcttttccatactctaacaccataattccagatccatatctgcgttcagacggtacacccagataaagaagctcgtccaggacaccacttgcgaatttgatttcgttaagccttggcaagacatcaaaagttgcttctgcagaatccataagaaaaagttactaagagaagatgttttgctaccataaacatttttgaaatttccctcttcttcatcagggtataagcaaattggaacttaccaaatcctcttcccgatttagaaccacatagatcacactgccattcatcctgcaaatggaaaatacaaaaagcaagaataagtaacctatttgtaactacaccgtaagatcagcataaagagtatgaaaccaaaaaaaacaaagagtcagggaaacaaaccgtggctgcctgaggagaaacaccaagtgcactatgccccacattatcataatgagaaagacaccatcttttctttgcccggggagaaaaatactccgtcacaaatttcctccagtaaacaatactgctctcctacaaaatcagcaatgacacgactggtatctgtcaagagcttttttctagaatacacataaaacaaaaaatttgacgactacatgcacactcacagaaggcctttgtcgctgatgatataggtactgcatcaatcttcgagcgcaaacgctattttcataaggtcttggcccaccggttagttgcatttgcattccttgttgttgcaactgttgctgttgctgttggtgctgctgctgcaactgttgctgttgctgcacttgttgctgctgctgcagttgaacccgttgcaatggtgggagggactggagatattgttgctgttgcctcagcttttgttgctgaagcaagatttggaactgtggattttggccttgttgttgttgttgctgctgctgctgcaatatatcctgtctctgaagccactgacgtaaaatctgctgctgcaaagcatcatcctgctttgaatctaatctaggttttttccgtgcttgagttaagttgtttggatcctgaaagaacgattcagaagcacgccgagccatagaaagcgggatttgattagtttgtgatgtaggcagtgatgtagcactagagccacctagctgaacactaggatcatgccgttgtaccacagtcgacccatctacaactgatgaaccagatatgctgatattattagaagagaacgacataggagacgccggtaaacgcatatatgactcattattgatactagcactacgctgcaaatgaggaccacctccagagagccctgaattagcatctgtgacaagcgaactagctcctgcgcttggaccgggtgttgaaacactcatcataaccggattatgcatatcaccagaaaccatactgagattgtgatagccaccagtaggtccaccacatccaggagcagagttagatgaattcccataagaggaagtcaagtgagagttaatgaagctttgagattcatcatctccttgaaagaaaatcccagaagttgaagaagccattaaagggtaggtcccaagtgagtctgaaatccaaagtttcttcctcaatgcgacacaaatgtcccacctttactactgatacctacaacattatacatgtatcgattaaaatcagatcaataacattccctaacacatgaatctggtgcgttattaaagatacacagacattgaacttaaccactgaaataaaaaaaaaaccaaatcaaaaccctaattttaaagttcgttacttaacataactaaccgagaaactaaccaatccccaaaaaaaaaaaaaatagatagcaatcccttaaaaatctcggagttagatatttaaaaagcaaccgaaattaaattacaaaataaaaaagcgaagaacacggaaacaacgtacgaagaactgttaagtggagcttcgatcaatatagaacaaaagctgagagatcacaactagaaattaaaactaaacccagctgaattgaaacagaagaagaggaagataattaatgagacaagaagaagaagaagaagaaggaaaaaaatttgcctggaaatttcaagctgtaatataaagttaaaataaacaatcttcttatttattttgtgtttgttgtttttgcataaaaaaaaggaaaatcctggagagagctggaactaggcaatgaacttgacgcgcctttgttaatatacctagaggaaatcgtaagaaccaaatctgaccggacaagccggtgacccatctgcttatggttttgcaagtactttttattacccgctagtcaatactgacacgtgtcttgtttatcgtaacaagtatcgtatgaccgattggtaacctttagctgttttgattgcgtggcatattcttgaccttgcgatcaataaagttaaatcaattgtggatcgttcgattgagagcatggatcgtgtgcgacgcgtgtagtttaaagttgattgaccaaattatgttttttattttatttttttgtaataactgtaccaatgattgcagctgtaaatgagtgggcttacgacaaatatcctcttttttgcatgattacttattgaccccaatattactccctttgacaattcaacccctaaaatatttcgacaagatcatccaactatatggagctacgacccaacaggcctatttcagtatttttaggcccattattagcccataaataattatactctgttctccaaccgttcaaagctctgttctcgaacagtcttgaggtcaaacctaaccggtgtctctgtctctaaagcactagcttgttcaagaaatgatcaaagaaagctcgtgtgtggtccgtacggtccatggatcattcaaaacttggcaagaagacacacaacaccgacgataattctagacaatgtggatctgcaagaaagagagatttttaagttgcagagtttgtcggagttaaaggcgtgacgtgtaacacaagtttctgtttcagttatttcattagcttacctgtacttagaaacgtagaacacgacttataaaatacagaagaacgatgacaaataaatataaatgtaacaacgacattaatatatcgtcattatttatcagaaatagaaataaatatgtgggggatacaacatttatattaaatatatgtatctgtgatggactgataatgagacataacaacaatcacattagctgtcactcttttctttaacttttttttctcattgtataaaattttataaaacaataatctgctttatatgattcttatctttcttcttcttccacgagttctgtccagaaacagaaacattaatttattacaaaacaaagtgtatttacttctctttgctcagacgtttcttttttcttcttcttcttcttgatctttttcagaaatcaacttcatctcatcattcctctgtttttttctctctatctctcttaataaagaaaatgatgaaaatgagtatcggaacaacaacttccggcgacggtgaaatggagctccgacctggaggaatggttgtacagaaaaggacggatcatagctcaagcgtgccacgtggcattcgggttcgggtcaaatacgggtcggtccatcacgagatcagtatcaactctcaatctactttcggtaaacgacacaaaacattccgagttatacagtatttcctttatactattagtatgctctgtttttggaatttgattgttgttgttgttgaatttaacaacaggggaattaaagaagatattgtctggtgcgacaggagttcatcatcaagacatgcagattatatacaaagacaaagaaagagactcaaagatgtttcttgatctttctggtgtcaaagatcgttcgaaacttattcttatagaagatcccatttctcaggagaaacgtctccttgagttgaggaaaatcgccaccaaagagaaatcatctaaagcaatctctgatattagtttccaagtcgaaagactcgccggacaagtaacttaagaaacataattttaaattttccggataacaacgctcttgtctcgtaacttgaatcagaattgttttttttggtttttggactttagctgtcggcgtttgatacagtgattggtaaaggagggaaagttgaagagaagaatcttgagaatttgatggagatgttgatgaatcaattggtcaagctcgatgccatctcaggtgatggagacgttaaattgaagaagaagatgcaggtacttaaatcatgttttattactcactgttactaatctaattcttcattttacttagaattctagatgacacaactctattaatttttattcataaatttgcagaattatggaaccattctataagtaattaccaatcatacccataaagtcttgttattcaagtttttgaagtcgctttgacaattattattttttatgtatagttagaatctaatgattcgatttacaaattgttggaaggaggaaagattacacaagtatgttgaggctctcgacttgttgaagatcaagaactcaaggcaaccgcaaacgaaaccaaagccgcaatacaaggaacgggaaatgctgacattttacgaggaggcgtcaaggaaaccgacggcctcctcatcaagtcctccggtgatcataacaacaagatgggaaacgtttgattctagttcagcctccacggcaaccctacaacccgttagaccggttcacccaaaatttaaatgggaattattcaattaatatctagatattaattacacgataatataatatactatacttagttttcagatttattgtaaggtgtaacatatgtgattatttttgtctagttgtatatgatttgtgattggtcgtttatgttacattatcaaattttgttgttgtgatatactaaaaacaatgtagtatttactatttaaaagaaaatatgtggattaaaaaaagtatgcgagtagatggcaaaagggagagaacgaaggttttgaaatgattaaaataaactgttaagagttgtagcattttattttaaatataaaaataaaatttggtttacgattccaaacatatatctacaaatgcaatcattcaatcagtgatatgcatgtaaacatctacgaaattcacaaattacttaaatagcatccaaattgaatatgagtcatgatgacaaaaacaacgtcaaaaattgaaaacaatcttaaaccaaaacaacatccaaattttaaataaaatcttaaacaacataacaaagttatcaaatattaatctgatactttcaaaagcaaaattaaaagattttcttaaaacatgtcgtcaacatccagcataaagttcatgaggccatcatccttccaatcctgtatcagaaaacataaactagtaaatgaatttgctataagaaattagatctagtacacacgtgacatttcatagactacaaatactattagactctttatatttctataattgatataaaaatgaaaatatggcatcggtgtatcattatagttttttttctcaaaaagtaagaattttctaggattcaataaattttgatgagaactataaccaaaattaactttattaaagtagaattgtaaaagtttaaatacatcatcaaatggcaatgaaacatctatcaaatctgcaccacattgttcctcctatgcaattaatattcaaacatcaattatttgctatatcattgtatatatatcaaaccaatttcgataaattacgtagacttcaataaaaccatattttttatatcaatcgtttgtaagtatatttcaaaactcaaaattacgtagacttcaataaaactagaatacaacttataactaaaattattattgtaaaaatttaaaagattacctgatcaaatgtcaatggaacatcagtcaaatctgtaacaccttgttcaggaacatcagtcaaaatctcaacatcttgttctggaatatcagtcaaagctgcaacatcttcttcctcctattcaaccaatgttcaaatatcaattatgtgtcatatctatattgtacacaaaattggtttaatgtatatatatgtatgattatattatttctttcaaaaattatgtataatccaataaaattcaaaaattaattataagaaaaaattaattttcctaaaataggattgtgaaagttgaaaagccttttacctcatcaaatgtaattacaatatccatcatatctacagcaccttgttcttcctatggagtaaatgttcaaatatcaactatttgttatatcactacacacaaaagtgatttagtataaaaatatatagatataggtatttacagttacctcatttataatgttcacgtcgagagtagtaaaattcatttcagaattagcagcaatagagttcaatgtttcttcattaaagttgttatccacctaaatcatagattacatatgattaaaaaatttgtatccatataaatatatactttagtgtaaaaatatatagatataggtatttacagtagttacctgatttatagtgtttacgtcgagagtagtaaaatttatttcagaattagcaacaatagagttcaatgtttcttcattagagttgccattcacctaaatcatagattacgtatgattaagaaatttgtatccatataagtatatactatagtgtaaaaatataaagatataggtatttacagttacctgatttatagtgttcacgtcgagaatagtaaaattcatttcattattagcagcaatagagttcaatgtttcttcattagagttgtcattcacctaaatcatagattacgtatgattaagaaatttgtatccatataaatatatattgtacatgaattattaattattatacgaaagacatgtaattgaaatacgacttacgttattaatgctcaaattattaatatcctcaatagaataaccagcaagaattgcattcctttcgaattgattatcgttggcaaattcaaaatttacaccactcaacacttgaccttgatgctgctcagattaccacatataagtcacaacattagatttatatactgtacatgaattatttatatacgaaagacatgtaattgaaacacgacttacgttattaatgctcaaattattaatatcctcaatagaataaccagcaagaattgcattcctttcaagttgattatcgttggcaaattcaagatttccaccactcaacacttgaccttgatgctgctcagattaccacatataagtcacaacattagatttatatgtgtttgttaaaaaaaattcatatctgtaaagttacctgatttacaatgttcatgtcaagagtaggaaaaagcatttccaaattagcagcagtagaattcaatgtttccccattagagtttaacttcacctaaatcatagattatgtatgattaaaaaacgtttagtgcatatcgacttacattgcacatatattatttatgctagtaatggaaagattcacttacgttattaatgctcaaattattaatatcctcaacagaataagtagtaagaatttcattcctttccagttgatcatcgttagcaaattcaagattttcattattcactaaaccttgatcctgcttaattatcacataaaaatcacaacattagcttcatatataaaaaaataataaagaaggttgaattaattaatatcagttataaggtaatttacctgattctcaacaaaatgggaattaatcgtattgccaagaaatgggttgatgctttgatgatcattgtataggcttagattctctaatccaggaaccaactcatttgtttcctcgtttaaatgacttagtgactgatcctcgaatgatgaaaatggagaagaaaacctcgaagttgaacttccatgattactcatgttgttttcatcgaaattccaattcatactacccaaattttgaccaagagagacattaccattaacattaactctttctctaccaagtccaaccagatttccaacttgatcagtattgataccattgtagttactatgcatgtaactagtaccaaattcaggttccataccgacaacatcatttggtataccatattgtccaaaagaaggaacttgagatgtatcaaggatgcttgtagaaagcagaccatccgtttgtgaaattaaattgtgatgtggctgaaccttgttgtgtaagaacgatgaaaatggagaggaaaacctcgaagttgaactctcatagttcctcacatcattgttgttgagattccagttcatggcgcctagactttcaccaagatgcccgttgccattactatcaactattgctccaccaagtccaagcatgtgaccatttttatctatacttattccagcataactattacacatataaccagtaccaagattagagtttatacccgaaatgtcgcttggtgtaccatattgtccacgcctaggaacttgagacatttgagatgtttcaaaagcgcattcactttcttcatttaaaggcaatacacccctcgaaaatccgacgctttctctcataggcgacaagttagattcgggttcgttcaaaccatagatggatccatcgtacatggagtggatagagtcattgttattcaaaaggaggctagattgaccaagagtatcaccaatttgggacttaaacaaattttccttagttagaccgagataattatacgagcattgtgggttgatgttgctagatgattcaaagttggatttcatggctttttttgatatgtcggcttttgtgacattaaccttaaaccttctcatgtgtttcctatacttctgtgtaatggtcaacaattccaatattcgtcatatattttatgttgatgtaagatatattatccaacaatagcattgattatgtgctttgaaattcgattgacatatggttctgaattcaaataatgtttatagaagatcaaacctgtaaatggctggctatttgtgatcttgttatgccttccacattcatatattgtagaatattcttaggcacagcctcttcaaaatgacatcaaacacaaagcaagagataaagcattagcgtgtgcatatattaaaataatttgacaaatgcaagtaaaataaattgtaaagaaatttcgacagaatgaaatttattttagatctactttgcaaatgaattaaaaggtaagaatcaaaaaacaataaatgataaatataaaatatgcaatacgtcagccctaacttattttgtattgcattgttttatattagtcaagtaaaattgtatttcatatttaagattagttttggtcctttggtttaacaattttaatgtcacgattggcatatttcctcggttagttaatgaataaataagataatcaactaaacttttaccgaacgcatcatatcagcccttacttgcaaaaataacatttttttgtttaacaaaacttacaaaaataactatgaaaatataaaaacatatcatatgatttgcaaaaatgatacaaaaattaaaatttatggtcaatcaatacttacatacaacctaaaaagaatagagacaggtatcttttgcaagtaaggtatatttgaaatgaacacgaacactacaagaatcagccaaagatttatcgatcgagtaatatcaacaaacaaaaaaaatcaaaatcgatctacactatagacttcaataatattctattttttggtgttaaacaatgcaataacgatatcatctatcgtaattgatatttaatcatataattattgcatattgttattagataattttaactagcatcaatacttttgtagacactaaaaaactgatagtatgttcctttaattgttgtagtagtaagagaagagaactttaatacttactagcgacaccaaggcttttaagagcgctcatgaatctatgctgaagaggttttgtccatttgagcttaggcttttctcgaagccgtagccaatcatctggatcgtcggtcacattttgtcccgaaccatttaaattggtttctcctatataaaatcggataatatataaaaacaagataagtttacattagtgcaagaataaggaggatgtttattattatttgtcacataatattcgtatgtatcaatggatattattaccgttcattctatggcggagagcttgttgacatacaacgttgaggctgttgagatcacgacgtgagattggtttatgcatgaaacaaagagctcgacgaaacaactcctcgtgctcaatgttcctgtatagatctgctgatatcacagtcataatcattcaaaaacacacacaaacaaaatcggaaaaaaactatcgttaacatcagttaagaatcttaattagaataacattgcataaagaattcttttgttttttgcttctagctagtgttattttcttcttctacgacactgacctcttggattcttcttgcttgaaaaactcaaattttcttcacaagatttttcttatatcattttatctatgtgataagagtgacaattatactctaaagactagaataccactgcttagctgtaatttttaatctaaaaacagaatatggaatgagaaattttttattccttttaagatattacccgttttattacaggtcaacatttaataggaaaaaacgaattctcattttgcttctaggcaatatttgctaatatttttaaaagacaggtcatttttaactaataaggtttcatactaaatatccaatcataattacaagaataaattttattcgatttctgtgtcaacactcattacttccctttttaattaaaaataacaatgaccaatagttatcctgtttaatctgtcaccgctcatcacttatccttgtttatataggaatttttcttttacagcaatattatactatgatattttaaattaatttaaaaaaagggaagaagaataagtaattgtcaaataagtggaaaaaaattgcacataccaataacaggcaaattcccaaattcttcatcaattctcttttttagctgaacaccattcaaaccaggcatatggtaatcggtgattacaacatctatattgttgaattgagtaagcgtagtaactggttctgacgaatcttttgctgtcattactttgacttccccaaatagtttttctatatattaaaacaattaaataactcatatatatgttgaacaaacaataaaacaaaaataactatatgttggtcaagaaaataaattacactatataatatgagaaatgtgtgtatgggttaggcagacccggccttgaaattagaaaattgatcaaacaccagcttctggcccataattaaaaatgtcaatattcttgaaaaaatcattaattttcgtttaaaaaagaaactacataaaagaccaatattaattcatctgaaatagatacttgttagaaataattagaaagaaaaaaaaagattcacgttttacatgtatttacaaacatttgaattagacgagttttgtaagaatattgtttttctatcgaagctattttcataagacaaaataacgacatgttatttatgaagtagtcgattaatcggaacacatattttctataaggaaattaattagatgaaagataatgattgttaattatatgcaaagttcaaacttatatgtatagtagttagtagtaatattatacatataaggaccataaactaattgaactcctctatcctccaaaaacaaaattgaacaaataactcgataactaaacgtagctttatccctgcagacatatatataagatctttaatatcatgtgagatcattacacaaatttgtgagagtaaatgaaaagttagatatgtgcttgttatcgaaacgttgatcgcatgtctatgaacatatcaaaaaaacaaatatgtatgtaaaaccaacaaaacaaataaacaaatatgaatgaaaatgaaaatcttcaattcttatgcgaaaacgataaattcagaacgtagccaaaacatagttcaatagtcagaaactcacgataatgattatagcgttagttcaaatcgtagccaaaacatacagatttcttctttctttttcttttgcaaacacactaatgcaaacttaaaactagctcttaaggtaacccttggaaccaatatatatggactataaatgttagaaaattagctttagtagaaagattaaagagggagaaaatttagtgtttataattaaatcgtgtatctaaaaaaagttacattgggcaaaccaagagtatcatttggttcagctaaaccaagtcaaatgaccttaacataatttatttattttttgttattttttctttgctattaagtaattcgtaaatttttggatcaaaccaaatgaagaaaaagaaactaaaaaaaaaaaaaaaagacatgttacaagattataatttgtgagggccaaaaccgaaattataccaaaccaaatcaaatggtatatattttttatataattaaacatctctggaaaaaataccactacttgagcactttatgttaatttatatacaaaatctagacaaaattaagaagatttaaagatatttacaataaagtttagtttctaattttcggatttaggattgcttgtctatcagattttttgacttcttagttagatttattaaataaatataaaacaataactttgtgttaattacatgtgtctataattctgaatatacttgctatatgtctatttttatttttgtaaattaggtgatagatgtagtagctatgtctaaatttattttaagtttttaactaataaaactaaactttaattgaactgaatttgttgtttttactttttagctaattacatgtttctttgctaagtacctaagatagcctaatttgggacaatctttgcaaaaaaagacgcattggtatcttcgtagaaaagtgttgtattttatcgcacttgttaaataaaaatctcgtgattttttaatcatttttgaaaatacataacttatttccaaaattgtcactatatcaaaaatatttgcaaataatgagtaaagtcattcactatgtctaattctcttttcagtattaaaacttaaccctcattgaacagtgtttgttcataagttcatttcaactagttaatggtgttggctaactagggtttctttgcttaagagcccaaagtaacctaaacgaagtaaaggaataaaaaaacagattaatagaacatttttttacattgagaaaaatgataactagaaaaggacttttgatttgagtcaaagggcgggaaaatgaaactggtgatcctaaaagatcggtccctctcgacggtaaaactctccggccgacaagccttgagagcaaaaacaaaaaaccaacaacaacaaaaataatacataaaaacagagagagaggaagaccccaaaaagcgaagcagattcaccacagaagaaccaaaaacattgcttcttctgcgaaaacacgcctaaaaacaacttctgaacaccggagaaactcgccggaaaaatataagataaacgagacttttgtatcatttgttcatgatcacttggatttcttgagattaacggtggttctgaaaactgcgtcatcgcagacgaaactccaccaaaggtaagaaagaggaatccctgcaccgcgccaaagagcatgagcatcgatgtagcctttgtacggagggaagtcgaacattctaagacacaatgtgagtatgctcgagatcaagaaagctcttagcttccactttgatggatgtgacgttaaagccgcccataatccccatactactagctctattcctccaatcccgaatataactttccagtgaagccctgcaatatagctcatatgcatttcaagaaacccgtgttttcgtttcgtaatgtaaagtatatccctaaagaaccataccttcatcgaggttgtagaaattaaggtagagaatatgagttgcaacaaccgcaagaataggtgcagtaaccatgattttgacagattgatcttgaatactgaaggaccggagtattgctagaataagcgaaaatccggctaatacagtagctgaagagtaatctagcctctccgtcaattcaacatctctatataacatagttcaaagcaaaaaaggaaaacatataagtgagaattatttgacgaacaatcttggtatagaaataggaatgttacctgctatgacaaatactactccagaagagtgaattcattacaatgatggcgtagatatgcactattccattgtactcgtagtacgttttccgatttggctggagaggcaatttatagtaaacgaggatgaaatatgagacccatccttgaaactgcattgcaagatccagagcagagaaagcaacagagacaggttcctgaaaatatacaaatagatgaggaacaatacttaaagctgagacttgtagagagaattgcaaagagaagattacctgaattccgtagacatgtttgagtggccatttaccgaaatacttggtaggtctctctccgtttctttttctttcttcttctcttgtcatcatgcattcgtactgacaatcactttggcaatcccattgtttccatctcaggtaaagtggctcttgcatgtaccatggaccgtcaatggcttttccatcagctgaaaatttacagtgttggaagcaagtatcccccacgcatccagttttctgacattgatcaacacatgacctggaaaccaattagcacattaacactagtctcttcttaaactcagcaaaagccaaaagtataaagcaaccgaggatactctaacaacaaaactttaaccatagccactctatgacactaacatccaactaatttctcgaactaaacctttgccacgctatgtagcattacactaacacacacccataagaccttattacaacaaaccctgtctctaatgcaacatcaaccggtctagctaaatcgtagtaagctgccttgaaacaaatttctgagctttttcatttctaattaggctcaagatagattaagctgtttagatggcctacaaagcaaacaacagagagacagagagaaagacaagcttccacccaacaaaaaagaaacacctaactcctcaaaagccacttgcagcataagtccctatctagttttttgcctttataatctttccaacaaaagcaatgaccctactacagtgaaaatgaagggcttgtggaaacacacaaagatctcatctctaacgtgtcccaactctcaccacacacaagactaaagaaattcatttggaaaagtcaaccacatagttctaataagctcctcctacttgagtcactcctttgttagtggctctaaatttccaccaaacctgtgaaactcaatccataccttacaagtaaaaaaatctgaacttgtatcctaaaacagaaagatcattaaagctaaaccgagaatttgagaatcaactgccagagttatgcaatcaatgaatctaacggtcgactctgacagttaaatcaaaacatagctcagcatttataatgtcagtaagcaataacagaaagctaattaagaaataaagtttgtatttttacttctccaaagatatgaataaagcagagaagagccgtgaattgaaagaagcgatcttagaaaaggagaaaggagaagactttttacttgtaaagagaatcagaatctccttcactagcttcaagtgttgaaacaagacacgataccacaataataagcagaacccatggcagatttcgcgccatccgattaccaaaaacagaagaaagtagagagtagagagaagaaatagaagagaagaagaaaggagaagcaaaaagacaaaaggaagaagctttctcgtagggaaatttctagagagcagagtaagtcggtgggtgatcggaggaattgaatgggttagggtgtggcagtttcttcttgtccatcaaattacggagacaggtggatgcatagagccagagagagagagaagaagagagagatctcgctgcggcaaaagagagagagagagagagagagaaatcccgtgagggtgagagaaggaggaagtgaagaaacaagcgcgtgacgaaagagagagtgacgcgtgggagttgtagtggtcacagacgtcgacttcttcttcagaccatccatttcttaattttttatttctatctaattttgaagctaattttttatttatttaatctatttaacatactcaatgacaaaagaagtttatcttccaccaaaagtcttaggaagtattctgactttttggttaagaatctatgacaaataagagaaaaagaaaacaaatgtataatagtttagataacgtgaaaacaaataaaaacgatgacaaatattgtaatacatgacaacacgatgattccacagcctcacgttcaagacctgcgcgtgtagaagaaaacgaacttgtccccgaatttttgggaggaaattttccttagttttgatttaaactggttttatttttgttactattaatgttatagttaatctctcctttaaactacacacgagtccccgccaaaataaacaaagaataaaaagtcaaaaaacgaatcagtagatttgtagttgcgatcaatcaataatctttaagcatcatcgagtgatacgacacacacacaaaaaatcattattatcattgttattagttacaatcatagaactaaaagagaagaaatatttgttttgaaacgttagtaaaaagaagatcaaacatgatattatgttgcacgtggtaattagtgtttgccagagttttgtaggacttgtgaggtacgaggaagattttattccattttcccaaactcgtatcttcttcttctcttaacaaatttacatgtaacttctttttccatttttccaaccaattaaattatttgaacaagtgtaacgtaacccttttatgtgcataaaacacggcaaacacattggaaccttggcttatactactattaagagaaatagacaaataagctgaaatttggagataagtaatttttacagtttagactttagagtttatatattaaaaaagtctctttcgtcacaagtagtcatctacagtattcaatcaattctccaacaacaacaaaaatcatcaaattacaacgtcggtcaaataaactatataaatttcgtaatcacaatgcacaaacaaacaagtgttaagatatgtgtcaattcgcatttacttcttcaagctgtaatttgttgtgttccatgctcatcatcacccattatctcatcttttattttccatggccacccattacatattctttattcaaatcctaagtgtaagacttttttttaagtaaacaaataattaatcaacttcaactcaaatatttatggtttatcattaagattcaagattgattatcagagactgaaataatagcttgtagatcggcgagacactccgccggaagagagaggaacgtgttcataaacaaatcgtcgatggtctcaactttcgcgacgccgacgagtctacactttccttcttcgtccagtctctctcctttccctctcttgttctctcctatcgattcctccgtcgtcaacacagttctcaccaccaacgccggagctctgtatatccctcctcccgccgtgaaaaagaacttcgccataaactccaattccacctgtaaaagaaatcgaacaaaaacagaggattatggaaacagaggatttcttgactaacaaaaaacagaggatttaggaaatattcaccttcccggattcttggttgatagttccttggaaaatctccggtgagatatcgatttttagaaacggtggcaatggaaagccgagaaacttcgtggtttggctagtgagagaaggaatataaagagtggccacattgaaacaaacagacaattcagagtttgatgctctgtttttgtcgtcgattttcttggcggttccggcaccagagccacctagaggagagtattcgaaatcgggatatctggagatgccaagcttacctgttccaatagtcttgaagctgacactgtagagagtgttgggaagctgtgttgtgttgggttttgggtttagggaatttgaaattagtttgatttggttttgggatttgtggttaatgtatcttcttggggatttgtaattgtagattgttgttgttaaagagtttatttttgttgaagccatgtttctctcactattaacaattgttatgatgtttttggtttgttttgaatcattttgattgaagaaagcataaatcttatcgtcacaatttttatgtggctagtttctaatgttcattcaccttgagattctacatttcttggaatatcaatgtatttgtgtacatgggctcaatagggtcaattaacgtcaaaaagaagaagaagaagagattatgggtcaactacattttactcatttttgggctaaatatctcacatgctggtgggccgtggactcgtgggttggttggacaaaagtcataaaataaaacttctctaaaactagctacagtactacatttacaaagtttttgaacccccacctcaataaatttttatttcctccatttattacccatgtaaccttcatccacaaagtcaaactcataaatttatccgggtaaaattatacttttgagagtgatatgttagaatttggtagtgaattataaggttaagttttttacccattaaccaaattcgaatcttgtttaggagggggtattttatccagtccggttcttggactacgagacatagttcgaatatcgtggataacagtaacagaaacaaaaatattgacttgtatgatatatattttgtcaaactgacttgtatgattgattgtataattcaaatttccatcgcttaaacaaattatcaaattgtatagtaatgaaaggcaatgtaaagaatggttggtaatatataaacttctctaaaactctaaaaaaaggaacaacagccatctaaaaaaacattaaagacaactattgatacttgtgtaacgtttcgtgctcaaatatgtgcatatgaaacacttaatggatgcttataataagaagtaagactttccgccgctgtggaaaatataaacccatagaattgggactgcttttgtagaatgtggaccgatcggactttgtcaaatttcgttttaaccgttggtcctcctttcgcttactcattttccgcacgccattaacgataaagattcccattatttttcgtcgtcaaatttgtctaatctcaaccatattctttcactaacatcatttttttctttcttacacttacatcatattccccaatccaattggaaatcagcacgatgtactagtctagtatcttctaaaagaaaaggattaaatttgaatttaatgtggtgatgttctttcacgccacgtttttgtaagtttgcaacaccattttggggttttaacaccttatcaccttatgacgaccaaaaaaaaagtttttatatgctaaactcaaaacgtttcaaaagtcgttttttctaaaagtgaagtacatttcgtcggttagatgaaccagatccaccacctgctacgtatatatttggctagatgtttctttttcacttttattttctaaggtttttgtaacgtacttcttacgttattactgaaataggatcgagattaggaataaaagactttgctacgcatttatcactatgtggaaatttaattagacggttataggagaaatccacttctttcttcaaacttgtcgaaacgtatagtagcctacttggttttctcacccattatcatttatcaatgattcataataaatttttaaatttaatatacaaaacaaaaatagctagttgaacaatttcaatcaattatataaattctcaactcatcgacttgcatcaaatgttatgactggtttggtatatgcacgacaggacaaccgatacaatgacagttggttccaaaaaaaaagtttaatcctaaatatatgaataatcgaatcgatcaataacacgttgacaaaaaacgaacaaataatcacactgatgaaccactttataatgaacagagaattttgtaatctgaaaattttgaaagtcaagaggttaatcaagtaattatagaaaggtagttgtaacgttggcttttgtggaactaataacttacgtgtctttaaacggcggctactttggaaggctacgtttcttaatttgaacctcattttctccattttccttcgtttatacgatatctttttcaaaaaagtgacccaataaccacacatataacatatttagtataactttgaatataaacgaatcaatgatatctgaattttattttgattttgatcttgatttttgttgttttttgtcgaggctattgccttgccactttggatgaaggaacccggctaaggtaagaccccctgcctaatattagcctccggcgaattttgcactcagaaattacattatgttatagttttggaattttagtttaaatttgtaaaagtattaaaacaattggtcaactattatattaattagctcaagagtgctttcaaaaacatatcttaaatttaataaagaaatattccaatatcttaaccagtactaaaagagaagatcagaaaatttcttataaaactttaatctaataaaatcatctacgactctaccattcaatatttttttgttattgttttatttacatatttcttttaatatttacatatctcttttcctttttgctaaaaaaaagttggcataaaaattactaaattttaagcgtaaaaaaataaaattaattattgtctattgccatttttggaggatggatatgatttggaggaatagttaaagaaagtgctaaaatctcctttagtgagtcacaaccgttgaccttcaccgcaaggcacaagagaccaagtctctaacccaacacaacacaaaacccataaactgaaaagactaacctaccctatcttgccatataaatccctctcgagcaacgcatgttaaataaacctaatttatacattcattctcaaagtcaaaaggagacagggagagagagagagagagagagaattcaaagcgttttttttttataaattaaaggcatgagaggttcaagaacaggttcttcagacatgagtgcttggtgttctgctgttgtgttattgtctttaatacttttgttatctgttcgtgaaaacaacgcttctaattcgattagaggttctcaattctcaacgaaaccttgtgaggagatttacatcgtcggagaaggagagacacttcacaccatcggcgataaatgcggcgacccgtttatcgtggagcgaaacccgcatatccatgatcccgatgatgtctttccaggtcttgttctcaagatcgcacctttttacttcaacaggaaattgtaagacatataacaaatacgtttcttttttctttctcttttctcttcttttaaaattttgtttgaagcatactttaccttaagtatgtatgtatatattactaaaggattcaaaaataaatacagagatttgaaagaaacagagcaaaaacagagttgtgtaccgtgagttgattattcatgttttgtgggtttacaagttcatttagatttaggtgtatatggtaattatcgatgatttttggtctttggggtggaaaatttgattaaacaaaattagtagctgatgaatgcaataacgaaacgccaagttagaaaaaggtcaacgactttacagtctttactagtggcaaaatatcaataaaggagttatgttattctacaaataaaaagcttcatcgtttaataattcttccacttatagaattctcgtatccaaagaggacagattatttgatgaataggtgtgctatattcaatgatgtgtgaatttatgcttagaaactcgtggatgaaaatatgaattttattgatatatacgaatttcaaagaacaatagccgcatggtttgtgtctcttgctataatccaaataaggattttgttttggcaaaaaccttaagaaatttttacaaatacatggtcaagttgcccattcccaatccatatcagttcttcaactttcgagccctaagccatcgtttcattgacttgtaatgtgggtcggacctgattatgttggaaacccaaacttgaaatttttgcaagtgggcttaaagttttgaagttttttagcgatatgggtaagtagggattttatggatcgcatagtggatatctttaaagttagaattggtcgcatgatgcccaatgagtgaattatgtcattatgttaccttgatttctccctggtcgaagagaacttattcgtaggtttatcgaatttgacataatatcatatgttccgagaatgctttaaaacttcatattctgttgcttgttaatgtaatatgatgtattattatcacaacaataaagtattatctgaacgttgcctcattcgtcccgttacaaataattatgtttgaaatatatatatgcaagtcaaaaatatctcattctcaattaattacataactattcaaaattatcaccaactctagttctagacttccttttttgtatgcaatattccaaaaactaataaactacacacctagactaattatgtcgtcatctcctaacactatagcttctaatttcaaaaacaaaattcccaaagtaaaagtaaaatgaacattattaccgtgcatgtcgacattactcccaaagaattgcacaaaatctccaaaacctctgtaaacaagaatctcttatatataagaaacgtgagttgttcgctgttacaaacccacaatcaaagccacaaaggaagaagaagaaaaaaaacaaaccctaacttttgtcaaaagtaaacgatgagtagattccgtaaaaccctagtttctgctttcgttctctgcttggttatttttcctcttctagtctcagcggcagaggaagaaaaccaatgcggcggatccaaaggtggctctgctgcggagaaagcatcggctcttaaatacaagatcatagctttcttttccatcttaatcgccggagtatttggcgtctgtttacctatttttggcctcaagacggagagcaatttcttcatgtacgtgaaggcattcgctgccggcgtaattctagccaccggctttgtccacattcttcccgatgctaccgagagtctcacgagttcgtgccttggagaagaaccaccgtggggagattttccgatgacgggactcgttgccatggctgcatcgatcttgacaatgttgattgaatcctttgcttcagggtatttgaacagatctcgcttggcgaaagagggtaagactctgccggtgagtacaggcggagaggaggaacatgctcacactggctctgctcatactcatgcctcacaaggacattctcatggctctcttcttattccccaagatgatgatcacattgatatgaggaaaaagattgtaactcaggtacgttaaagtttttggaaattcttgatttagataaagacaaacccgtattattagtcacatgttgtctatttttcttatggtgttagatattggaattggggattgtggttcattcagtgataataggaatatctctaggagcatctccaagtgtgagcacaataaagcctctcatagctgcaattactttccatcaattgtttgaaggttttggccttggtggttgcatctctgaggcaaagtttagagtaaagaaaatttgggttatgttgatgttctttgcactcacggcaccaatagggataggaattggtattggagtggcggagatttacaacgagaatagcccaatggccctaaaagtttccggttttcttaatgccacggcctctggaatcttgatttacatggcgcttgttgatttggtagctccactttttatgaaccaaaaaactcagagtagtatgaagatacaagtagcttgtagtgtatctcttgttgttggtgctggtttgatgtctcttttagctatttgggcttgaaagttttagttattcttgcttgttttttgagattttttttagaacagtgaaattacatttcaattcggattttgatactaagacaaaccagtcaattccattcatgaatgctgttatatgggaaagagaatgtaaatcagtctgtaagtgacacacgtaactctccatgactccatctctgatgaagaaatacaaaaccatctaacttacctgcaaatcattcgaatgcacgctttgtatttactatgatattgtatttgcttgaacgctctttaattacctctcctatgatgcatgtattaccacagtagaacccctaccaacaaaataaaaaaggtaaaatcagttactaaaaagattctacaatagctatgaaattgtagtatggaaatcttgtaaagcaattactatatgagaaagagaatgtaaataaaaaaacactaagctatgaagatgtctatctcatgacgtagaactcaaggaagtgaacaaaaactacttggaggacagagtaaatcactccacaaccagctaaacagagtaagaaatgagatttggcagcagttgagaattggatgattttgtaatgagtcaaatgatgactttcaactttggctcttcataaaagcataaatcaagagagatcatattcttgtcaaaacgatccgttttcaacttctggatattcatggaataaccccttcaaataggatatgccaatttatcagtttatattccaattcttccacttccataataaccagtctacattttaattatcttgaaaccaaaagaaaaaaagccaagattaatttcctttttcttgaaaaaacaaagcattcaagtactcaggcgcatatgaaacatatgaaaagtaaaatgcttcaatagtagagacagacatgccttggaaccttggtgggtaaaaaaaacatacttgaatggcttcataatgaagcaaaataatgagagaacatgagaagcatcatcatcaaaagccaacacttcaaaaagaaaaaaatggatatggatatccatgggaataaccccatcaaagcatcttctcctttttcttcaagcactcaaatgtcaaaaaggtcaccacttttattaaaactcatatatatacactgagccattagtccatgaataaccaaccagccttctctcaaagcaaaccaaaaagaaaaaccaacattgaaagaggaagttacgataagcggagcagtaatagggcatctttctattggcaggcgacttggctatttgtatcttttgtgttcttgactattggctatgtcacttgccaaaggagagttgccctgtcactgcttccgcttaaacacagtctataaccggttctgctaatatcaatccttcttttggacatgtccaaagccgagattgattgatagagaattggtctctctggctacaaaactagtgcggttctctcgatttaagttttaatagcattcactttgcacattgcatctttcacatcaaatttccatttcatcaaccatctaaacctctttgttagctttgatataagcaacgatctaaagtctaaaaaccattaatcctctgaaaaaaaagacaatttcgatggttctattatgtttctccaatgcagaaattgtatcgtctgaattatagtagattttttctagactaaagtgtaaaccaagacgaatctgcactaacaagacacaccaatagactttacagagaaaggttacgagttttgaaaatattaacggaccatagtcatcgcgaagacagttgaaacggctgaatctctccgatttgcagtatttcgcttcgggagtcagaaagcagaggttgaaggcaaacgccgctaacgtaaaccttctctttcaggtggaatctctattaaaaggcttttgggccttatttatagtcttgtatctcaataggcctttggagtttgggcttaattatctaaatcggcctttggacttatccaaaatattttattcaactgcttgaacgtctcccttacatatcgaccatttcattttttaaaaagatccaacatttggtgaggaaatccaaaaatcgaatatccaatcagtattaaactaagacttattgcccaaattgtatactaattcagttggaacggtaatcgaacaagtgaaacgaatcagtgcgagacacgtgacaaagcactgacatagtacgatgatgtcgatgccaattttcaacactgttttctttttggcgtgggccttttcgatactgtttcatctcctctcgttttctcctaagattaaaaataatagaaagaggacaatgtattattattctcttaactcatagacataatgacacgtagtaggttctctagttcctatcttttgatttctgttaacgactatgttcattaggagctactagtcacaatgccttcaattaattttaacaacatattttagctacgagcttgtcgagaaatcagtttgttaatactattaaaaaaatagtattcacgaaaattttgaaattctctactaaatttttattaaatcacaaaacttttaaaattgaccccatttaaattgactcccactaatcctataattaagtgttatgttctctagtaatgacgacatcgttagaaattcaaacactaataaatgattttattaatattgctcaaagcctcaaagtcgtccatcgatcttctctcccccaaaatttcctattttagcggagactttccaaaatcccttgttctttctttcctcgttaagtttgccaaaatagggtaaagaatatgtttatctcgtagaccaaatggatcttcctaatgcttaatagcttttttatatatatattttaagttatatttcgtacggctattattttaatgcaacatttgaacctgccacgattgtcttttttctcaattatataaataaaggttgaaatactataattggtgcacagctacaataattatgatatttacttccgtaacgtgaaggagaaatatctaataaattacatttttatataaaaactgtactaacttacttaaaatgagagtgaaaatactaaatcgtatgaatattacagtagtatttaattaccattttattgaaatttgatatatatatatatatatatataaccatatattggtatatacacacatttttgttgacaaataaatcaattcttataaccaagtttggttgttttccagataaataaaataaaaacaagaattatcctgtttcttgttttggcatctaattatccttttgtatgtggggaggagaagatatggacacaaatttaaaatactctatacataatttttattattatcaagaacagaaatgaaaataagaatggcatcattttattgtgacccataaaacaaaaaagaaaagtgataaaacataaaaaaaaactttctataaaaaaaaaaaacattaagaaacttgccccttccttctctcacagatcattctagggctcctgacagaaaaaccaaataccttttcctctttccatttttgtagaatttcaaatctttctttcctcaatctttcacaatgatcttttcctgtgaagttcttgattttaaatcaccctttcttcactactagcttatctcttcttcaattttctctaccgacattcaattactctccctattcggtgagatctctctctctcttttatgactttggttatgatgactggtcactggcttgtttagggtttcaatctttacagatcttgtggcagaaaaaatcaagtcaaagcaagaaaaatggttagaggaaagatagagatgaagaaaatagaaaacgcaacgagtagacaagtgactttctcaaaaagaagaaatggtttgttgaagaaagcttatgagctctcagtactctgcgatgctcaactctctctcatcatcttctcccagagaggaaggctttatgaattctctagctctgagtatgttttcttcaatttcttcttgattcttttaattcatcttcttttacttttccgatcgtactttttttggggggttaattaggcttttaggtcatgtgtttgtgtctgttctgatttattttctgaatcgttattgactaaagcaaccttctcagattttggtacttgagagattcgatccttgtctgaatcctaaagatttctttcttctcttcccctatcagtctaatttcatttttctatttttataatagtcatttggttagaaatctagacaaactccttttttctgatctaccaaaactttacatccaaactaaattgtgtgcgtatatattgatatatgtgtgtgtatgtttctagggtttccaaattcttgaaagtatatatgaacagaaaacaacatcggaagtagatctaaatgggatttattctataatttgatgattatttattgtgatccgtaccaagttgcacatatttttacccatttctttggtgataatataaaataagtttactttttcttgcccctagttaattaggttgtgtactatcgtttttggttttcgttatgtctttatttgggctctacttttgcagccatgtagtaataatgcttgctcttcctcgtttgattcaggtgtccagtgcatacatagttccctatatatatatatgtttaacacattcacatccttaagtttttgctataatcaatgttagaaccaagtagctaaagttgtgatttgttattctctatagtaatatatattgttgattagaggtttcctaatgggttaatggatctagattcaattatttgatgtgagaaaaaaaagagttcaataaatggacaaaaaagggcccggtgaatcatagggcatggatttgaatagttacctagctatagagatattaaccaacagcaaagaagatattgtagtacaatctaagaatcatactacagtcaaacaaaattttcatatctcgttgcgataagatgttatttcaaatatagtagagctatagataaaacaaatacgaagataagtacgttagttcatatttctgaaaatatatgtctatttttgatcatcagtatgcagaagacgatcgaacgctaccgcaagtacacaaaagatcatgaaaccagcaatcacgactcacaaattcacttgcaggtttgttagcaaactctttttttttcacttgatgactttcacggttttatccttggtaaaaataatcaaacttaaactttacatgatttccatgctattgatattagactgtgggcttccaacttaaaaccaattggcaataggtggagagacccatatcttatatataccacttaagatcctactcaacttccgatgtgggacattgtccctaataattgattctttgactttcaatggccaacaaaaccaaatcttatgagatcaattactacatcacaaaacaactgatggatcgatggtcacaaagattacatactgatctgttttacttcttttgcatcctatgattttattttgtgggcgtattgtagcaattgaaacaagaagcaagccacatgataacaaagattgaactccttgagtttcacaagcggtataatgtcttagactttttgtttctttttcttttcgttgctacttctcttagatcacaatcttgattattattcctttaatttcatttacggtattttgtttcgttttatatataaaaccatataagcttagactttttaaccaaactttctttattaattgtagatccatatccttaagacttcattaaccattttttatttatttcaatactataatttttaacctttttgttagtatttcaagaattttttttataaaatttgaaacctttagtcgtttagatttaaaagtccttttagttgtttccgtatgtaaaggtacgcatgtaatcaaagaccatactatagtaatatcattaatgtatttgttagtgatctcaaataggagaactactttggagatttacaaaatttgttcatgaaccctcctctgcgtgtgtataggaagctattgggacaaggaattgcttcttgttctctagaagagcttcaagaaatcgatagtcaactccaaagaagtctgggaaaggtccgagaaagaaaggtacatatacttcatcactatctaattggtatatgatgatgatctaatgtaactatacaacacatattgacttgaataatctccatctcagtcatcaagttatagtcctcatttagatatgaacttgaacacagatctttgcaaccatttagcgtcatatctcaaccaatatactaacattgatcaagagtcaagtcacatgtgtgtttgtatattagtgttgttatcatggaaatgaaaaaaaaagttggacaaaatgttttataggctcaattgttcaaggagcagttggagaaactaaaagcaaaggtttgatacattatgttataatataagatatgtatatcatacatgcaattttttaactagcttttttatatgaaattggtgaaagagtgtcggttgtgtttcaggagaaacaattgttagaagagaacgtcaagttacatcaaaaggtgacccatctctctttacaattcacatatttagaattgtatataccaatactaattcaactgaaatttacatatatatcatatatgttatgaattgctaatgctttagtatgctgaaaatattacccaaagaactctgattgtttttcgtcggttgattttttacatttttagattttttttctccggcaaaatcattgttagagattatacggtgctattcggtaaaatttggttctcgttccaagttttttttttttgataaagtatttgattagttttaaggatttcaaaatttaagtttgagtttgactttttcagttggttttgtttacaacttttggatatcatttttaacattttctcctagagataaaattataaaatgatatgttttatggttgatgaaattgcaatctatgtcatggacagaatgttattaatccatggagaggatcatcgactgatcagcagcaagagaaatacaaagttatagatttgaatttggaagttgaaactgacttattcatcggtttgccaaatagaaactgctagtaacattatataatatgtttatttatttatcatgaaatattcaaaatcattcaataaattgtgaggtaatgatttgggatagtattttctgagttgttataattctagtccttatacaattaaagagatatatatatacagtatattcaaaatccttcaactaattgtggggtatgatgttcttacactattcacactgtatttggaagctcatgttaagaaacattcttgggttcatacttggaatgtccagtcatcatccaaaatctaaaacaaatcttcggcctaagttatgggctccaatcggcccaataaggatccaatggattatattaatatacagccaactacccacccatggcccaccagtctttgttgcagtttactcgtttgcaagtactgtatattataatcagatacacagaagttagatactactaattacttgataggataatattaatactctagtgtataggagataaatgcatcagctcacggttagctgcttaattctgctgtatttgaattttgaaattcactaacctcgaccgttgcttttgtaataataatctattcattagataattgtaataattgagtatggagaacatatacattatcaacatgtaaccaggagttttagagaaaataatcttttttttcttctcagtagcggtaaatttaccttcaagacaaaatatttatcgattgtaaaattatatattaatcaactcatcaagttatacttccagttgatgaaattacttgtatattatatatcgaaatattcaatacatttacattctcgtacacgtacatagattagaggagccatgcatatggctgattcgttttatagtctttctaagactttacatagtatgctttttaacttttacactttttcctgattttctgtaagtcccttttggctttctattgtaacccaacatataataagaaagaaaaaaaaaaagaagaagagtaaattagaagtggaaccaaagataaattattctcttttcttaaaagggtcgcctaactgcatttcccttgcatttaacttattgtaaattcatctaaaatcttttccataaacttattgtaattttacaactagaattagaatattgctagtttgttacgggccatgatttcagttttagccaatttatggttgagcattccttcgattaaaggaagaatgtctttatttgctagctatacgcacagtgtacttaaacattctcatgttgaaatatgtgtagtatcgaaactaattagctttaaaaatctcaatgtctaaatcttcaacttcatatattatgtataaaatatactccttagggaaaatatttcttcacgttttcttgatttcgtttttcatttaactgtatccgatccaaggttaccgtacgctcaaagagtactctcggacacttagaatttacactatacattttagaaaataatatgcatactcccaaaagtggactgtacatgttttcagttacttatttaatataactcgactatatatatgttcatagatttgccaacaaaacatttaattccaacaaactgggtagtcaattaatatttgctagaaaagatgcaaagagattagtttataagaacatcatttaatagattttggtcaacctttatcaacatcttgatatcatatagtaacgattagtaaaagaaaatgaaattattaaaaaaacataaacgcccatgtgacttcgcttagtttttttttttttttttttttgctgcttattttgaatttcccgctcaacggtcgacagattagttggacacctagacgacgacaaatataatacatctatacactcgcttacaacaacaacaaatacatatatcgaaaggcagttttgtcaattatatatagacattttatttgaccaaaaaagaaatagacacttaaatgtggaaatctgatgatactccagttgagtattatttttttctcttatacaagatagatgtaaaattttggatattccagcatgttataattagctagagtcatccatgttgatcttgtttgctgtacaaaaatatattttattaaataattagatatatcggttgtgaattagattttatttccaaaacaaatatattaagaatttcattaataaagttataaacggcaaaaaaaaaaaagttataaacggttaaagtgtttgaattgtatgcttttatctatcgctctaattattttttagctagataatgagatttcaatgcttaaatttatcttgatagtgcaagtttaattgtaactgtttcaggacttctgtaatgataaggtttgtatgtgcaagtgcaatgaaagtagagttacaatctcggccaccgtaagtctgtgaacaaacacaaaacaaagcaatttctttgtcatgcaatacatatttaacaaactatataattagcgtgttcttttaatgaacgcagcgtcagcgacaacaaagaagaaaaacagatctgcggcgagaaaaaatacagtgattagagaataactgccgcagaagatgtacgatgatgaagattgacgtgacgctgcttaatttcagcgattcatttgatgcagttgcaattcatcggctatcatcggcgactcatccaaaattattattttcaagctttaatgtcgttttacttacctactacttctcatgacacgtcgtttcagtccgctattgccgctgtcgcagcgtcaaataaaagaacacgctaaatgtatatgcattctaaattgcatgaatggtgtcttcattacgacagatgtagctttaaacttcacgtaaatgtctcgggtccatgcaaaatctatctttcgtcttgtctttttactactttacaaggttctcttcacctttttacttttctcttttcttttttttttccttaaaatatttctttatatctatcagaaatattcttctcttacattgctttgctgtaattatttggacaatcgtcagaattatttaagctctctgagatgcacaaactctcatgacatgataataagaacaaagatacataacaagattcctctcgaaatttacgtacgtttttttgtacccatcgtcaacgtcataatcgtcaaaggtttttgaaaacttgttgcttcatggatgtatgctaattttttattttaccatattttcaatacgtttaacacattcaaactcattaggtcgagaaaaagttgacatagtccataaatataacaaacaatcaaacagatatgaataatctatataataggaatatgatcatgtataataggaatatgaatataacaaacaatcaaccaaaaaaaaaatgatctatataataggaaagtagttactgtaatagctcatcagtcatcactaaacacattaaaatgtaatcaatcaattgttcaaaatggtttatatatttatctaaaaacaaattgagatcattttgtcacatcaccataactataatgtcatatttcttttggagtgaataattctttctgcaaaagtgtgatgtgtgtcacatcttcagaactttgaaacctttaactgttgtttgtgtcaaattaagtgggactaaagggtagattccaattaccggtaattctatatttctgaatatttttaatatgttaggcttgcctatttcatttatatattttgtgaattcaaagcgaatgattttattggataattttttcaaaataacttggatgattttgtaaatttcctttgtttgtttgtaattggtcggatgacatattacaaataatgaatctaattacatgcaatacacaaagcatacgagaccataacactcatcacattcttcataggacacctttacgtataaagtacatcaacaaagactctgcactacaccgacacttttgataaacttgcattcacaattcagaaactaaaatatgttatctgcaaatcaaatcattatggtctctaaacactaaatatttgaagatataattcaaactcatgtaaaaaaagtaagttcaaattttcagacaaagacatggctaatatggcaaaaaacaaacaaaatgttttgggcccaaagttattttcttctcctaaaaccactaaaatagtaaatagtaaatgcttctctagttttcgtgtatagtattcaaaactagacgactatttccgaatctagctacgatatgatttcaaatatttccaatagaccccataattcatcttgactaaggattcaatgtcatcaaatgcgtgaaagaaacgtctcttgacacatcttttttcccccttattgacacatctttatcgtcaagatttcattacaaaaagaatagccaacaacataaaatcaaaatattcaaaactcatgaatactattctttagtctacatagcatatgcaaaacccatgggatgttggaatacgcgggggacaaaaacatctgaaattgacagatctttctatcttctaacaaaagagctccacttcggtccacactctacaatttcaaaattttattttatttatttataacggctacaaaagtatttgaaaattaatataaataatctatatattaaaaaaagatatctctatacaaagaagaaccagtaaatgtctgccatgtggaattcttttatccacgtggaagccttaatctcaatgaggacgagtcgtggtgggaccccacatttgtagagtatctcgtcacgtgaacaccccacgtgccactgacatcatcgttacgtttcagcggcgccgttttgaccatccacgtggctaaataatccgtcgtcgtttcagtcacgagtgtttcaaagattcctctctcgatctccgtgacgattccttcgccgtcttcttcaaacgccgattcaatctccgggaagtccccggcgacgagagcgtcgatatcttctagaaccaaacactttgctaacggaaaccgctcgattctccgagataactcgtcgattagctccgatccctttagattcctctgagaccgaatcgggtaatggcaaacccaaggtttcaaatttatgtgtggctttaagatatcggcgaggatttcgtctactaagtggaagagtagctttctattgcatcgaagagagagattttccggtgaatttctaggtctggttgatgtaacagcgaaatgttcgaggaagtagaagattgatggatcaagtgggtgtgaaggagagaaccatttagcgtatgagattggtgtgtctctgtcgattcctgttcttcttagggttcttgttatgtactctaattcgccgccggcgattggtgcaatgtggtgttgtgattggctcggaaaactagggagctctgatgatgatgctctgtttcttggtgtttgtgtttctctgagctttaagtttgactgcaaaaacatgaatgaaacatttaaatatttaaactttggataagggaggtaaagagagtaagtaggtgttttgtaccgatttgtgatgaggttgtgaatctttcttcttgatggtgggaacactggtgaagttgatgagatgattaatggataaaggagttttcttgctggaagatttgtctccttggataagaagtagatgaccattgttgttgttgttgctgttgtttattgctggtgatcgaacaaacggctcttcctgcattgattgtggcggcttcactaatctcgacttgaaattctctggtttcttgcatttctttgtagatttcctctgtttttctttctctgttccttgtggctcttcatgcactgttggtaacctggtcttgtcttgaaccttcattgctgttgtttccagaatcttggaagcgacattatttgtctgaagtgaggttggttttgttttggggacttccgttaatcccaatctcggggatgatgatacatcatgagtgatgattgtggtcttagaagaagctttcttggactcatgaacctctcttggttgtgtttctttgttggttatatcagttcccattcttcttcttcggctaacgttctccttcaactgcatcactatctgtctagcatactctcgtggactccgattctctttatcttcgtgtatctctttgaccctcgtgagcctgacattgttaataccagattctctttcaggaaacacgttgatgttgttgtctctgagatgaagtgaagaacgttggtgttcgtaacagttgacatcaacggatctccttccaagtgaaatcctcggtgtctcgggaagagaacgtgtgcctccgtcgacagagtttctttggagagaataatgtctgtgtttctttgcgtgagaagatcttgttggtgtcttgagatcaattaaggtagaagaagatgacgaagatggagtaggagatgatctgtaattatcaggaacaagatcaagacccatgagtctagcaaccaaagtaggtgtctttatgctcggagagtaagtttcagtgggtgtaagagatgctgatgatgatcttgcttgtggtttggtcttgattttaatacccatctggaaaaaaccatgattagggtcaaaaggaagaaacttttgaggaacccaagaagataaaaaaacagagtggatagttttagttttattcacttacagagatatttaaatttccatcttttctggttggtgaaaatgaagtttcctcctccgttgattccaagctgtttcttggtgcatctacgcctgaatttgatttataacagagaatcaaataatgtaatgtaaaagagtgaagaagtggggaagaagatgatacctttgggaagatgaagatggtggtggttaataggaaactgtaaatgttgaaaatcaaaaatgttgaagacagcactcatgcatcccgccgccgttgcagtatttccggcgagtgacggcggtggcggctgcgtgggtttgatgtcttcttcctttgacttgcttgaggatttcttcttccctccgccgagccaggaccagtctcttcccattttttgttttgtcaagttttaaggatgagagctctgttgttgtctgagttgttgaattggttttgtgacttgaggaggaagaagaagaaatatgaagagaggaaatggtttttataagattaaaaaatatatagctgagagaaagtggatccatgagaccgtatgaataaataaatacgtatattttttcataggctttctttttcgtcaactatttttccgtagggttttaattaggagaagtttgtcaaatctaaaatcaattaatattttgaataaaaatgaaaaatggttatttgtaatgaaaataagaattacatttttggttagaaaaaggtaagtaggggcctgcttgttttggcttctttgaaatacacgtaatgttttgtaatcccgtcggtatcacatgatgtatatatatttgttgaaacttgaaagaatcaaaaaatacatctctagctctcttttttcctttttttttttttatctcaacagacagaactcgttagcataataaatctaaataatcaatacatgaaaaacaacacacagtttgaactgtaaaattttcaaaaaaaatgtctcatcgttttgtttttgacaacgacattgacaaatttttgtttgtattatcgtgtcattggttcataaatatttggcgactctagcaataaccaatcgtgaatagggagattctctcgattgctatcaccatatatttattctgcgacagttttctaacgtcttaaatttatgatcattaagagtttaagactgatcacgatataacgatatgccatgggagaattattagaataatacaaactgttcatgcgaatttcttaaaataataatatgcctatgcttagttacaaactatgtcagacttgcaactacaacactgtttataaaagaatccacaacactaattattttaaaattattattattcaaaagctcaaacaacaataagattcgtacacaaactccatggcggtattaccaaacaacgaggggatcttcaatcgtgacccttatgtttcaaaccatgacgtcttcctcctttcaaattttatccttaagattgattttgacttgctttctcataatttaatgcccagtgaccattaaacaagtacaatatgatcttatctatcaataaatgtgatgtgaaattcaccgcttaggtagtactatatactacatagtaatgactaatgagtagtaataatttgtagatgggatcacagtgaaacccaaatgaccgttgtttggtcatcactcttatgagtattaattagttttacgtcttttatttgcatatcggttctattcatacggatacatatatttattattccttagattctatgtatatacagtataagaatttcagatagcagtgaaagcaaaacaaaaatagcccatatatatagtgtgcatacaagaaagaaagaatgatatagtttgtacaatttaaattcataaatgaagagaagaggctggaccataacatggtattatttaagtgaatgtagccaatacaaatcacatgaattttttttaggtatggtcatagtacaatccaaattaaagttgtccttgtaattaaaacaaaactaaaaacaaagaacagagaaaaggactgatctttttaagaaattgtgcttaaaacaaacaaaacgaagaagagacgaaagagccaaagaggtatattgtctctccagtctcaaactaattaagaaagatctcagtttacatttctggatttttcttctataaaacattaatgcaacatcctgcaagtttgctatcacctaaaaagggaccacaacttctaatacatatggaccattttagatatgtttatgtcaagattccaagtggtaatcacaattcaaactacaccatttattggttatttacttatcttctaagtccaacatgaacggattagtatatttatttaatcttttcggtattctcaatcttagtcattgagttaatatttgttaacatgtatagaggattgtgtttatttaaaactactactctcagttttggtccattacttagtaaaaacaatagtcataataacatggtaagattgttaacctgtttagacgatgcaataatctcattcgttatttagtgatttaagacgtcattgcttgataagtcgagatcataaatctttatcgttgaaaatttaaatggttatgacttatattttaaaattagtttggacttttgattctgaaaacatgcaataattgtttgtgatacgtatgtataattaaatgccaagtgagtgaatcgaaactttcgtaacaaacataatgttgttgtatcattttattttcccgtatggcagagtggcaacattaatgtgctaaatcaagtagtagcttctataaggagtaggtccatattctaataatgaaatataactctgaaagtttaaataaatttcatttaaatgtcccctgtgagtctatgactaaactattgtgcccacaagccgtttcttccatatcagtaccgaaatttaattttcaagacttagttagaacgacataggtacaacaactaaaagaagctttgtatttcattaaaacattagagaccatttcacgttgttttagttcaaactttattttgaagacgtatttttgatattgagaatttgttgaatactatgttgcaaactcaacaaaatagttgatttgagacgacaaaagcagtaataaatttccaaggtattgacaacatgatcgggtgacgagtttccaaaatgttttgttttactgaaattgcttgctataggttggatcgttagaagtttctaagaaaagaaccaaaaattccaagttctttcttttccaaactactgagtcagctcccaatttgttttaagaacatggttaggtctctccttttggcggcaaaaaaaatattaaagaaaaacttgattagatcaacattggtacaacaattcaaatagatgccatgtgacacgggcctctcattactaagagagctctcaatagttgggccatcgttgggcttacttgt

SEQ ID NO: 946 - DNA, 81736 bp, Arabidopsis thaliana
ggcgggggctctatttacctccacgtgctacatttttggttgacagttttctacaatcagatttcacagctaaacatagatgtgttggccgacaaaccaaaacacgtttatatgcgttgtccttaaaaatacttacgataagttatctcattgcttaggcgaaattatcatttttggatggacaaataagttttcagttttatgggccttaatatatattgggcctaaactaaatatagttattaagagacaattttatgggcctaagattacacaattttattattttatacaaaaagtaaaaaaaaaaaaaagttacagaacagagaatatgaagtttttgatggaaagaaacagagttttacgtttagaaggatctctgatttcagcaccgtgaacatggccgccggtataatgctccaccacttctactcctttcttcttcatcagctttgccacatctttctgcagatctatcatcggatcatcctctcctccaatcatcatcactttccatctcaaccgtccgattttttccaacttctccgatccatctccaaccgtcggattcgaatactcatgatctcggtcaacgccgacgggaagagacagatcccacattacatcggtgactatgggaggacaaacctgatcgttcataagtctaatctcagattcacttcgctcttctccgccgaagaatggatggtgtagaatcaatccacggatctgtaacggactcagatcggagacggaatcgacggatcttagtccgacgttgtaagccaaattccctccggcgctagttcccataagaaacacatttgagaaatcggcgtgagatttgatccactcatcgtcggaggttttaatccaatccaacgcctcaactccgtcgtcatacgccgccggtaatcgatgctctggagctaatcggtacgaaggagatacgacgatggcgttgagatcacgagccacctcggagcagaaatcgtggaagagttgcatatcgacgctgcagaggatgaatcctccgccatggtaatacacaacaatggggagtttctgagacgaaacgttaccctcgttgacggcggaggagggaaggtagagacggagccacgttgactttaattggttaacgggaagatcttttgaaacggcggggtttagtggggaaggatcaggtgtagctgcggtgcaggggaagttgctgaggtcgcgagtgattgaaccatctggattatttacgatgttaagataagcataaggatcagcgattggacttggttcggacatttttttggtttttggtctttttggattctaatgtgtgcatcagaactcgaatatgctacgctttatataaatccaaaaccagcgaggaaaattatttttaaagtaagagatttggcagattcaagcaaatcttatttaatcccattaacttagtcaaaaactttgtattaactcatcaccaaaaacgagaaatctgagatctactactagaatggtagtcaaaaactaaggcaaatatgtcaagatatatattcttggttcataaaagtcgctaacaggtctctgtcctaaacgataatctagattctagaggttgctgttggcaaaagccaaaactaatttgaagtttgacgactcatttaccaggaaaggtagccgattcaattaaacagacgaatagcaaatcaattctagtgttaaaaacgacaacctgaaagatggattgaaacttacaaaacaattccaatgagtgacgaagttataatttaatcatcattatcatccaacattacacaaaattgataagagggtacaagagagcctccataagtttgttcaaggaaagaaaatggaaaacacagaaaagccacctattatagtgtagaaaacatcagcggaagaagatagtaatgaaattataagacggagtttagtttctttttatatagaaaggagaagttgggttccagttttcaatatctctggcctctaccaccactgcctcctcttcctctgccaccaccaccgccaaaccgatttcctccaccaccaccaaaccgatttcctctgccaccaccaccgaatcttttttgtggcaatggttctctctcctggagtttaggcatcaccttaaccacttccaaactcatacttccagcactcttttgtgctcctgcaatgaacaagtctagatctgattgcttaacatcgaacacagctcctgttttatctgctgttagagataacccttcaatcatttccaccttgtcatccggtaaaactctccttagcagtccataaacaaatctgttgcagcaaatcattttagtacttgctttcaatgtaaacaaagactacaaaagcagagtataaggagagagaggaacttacgatggcgagtatattggtttccctgcttcaagatgtagtgtcacatagttctccattgatgtaagaagtgaccttttctttatctcagtgaagccctgtaatgatcagaactcgtaagtacttgttttgataggaacaaaaaaaaaaatgttacaagggaaaattttcgtaagacaaaccgcagtttttgcaagagcttttgcgaggagtacttcagctgataaaccagaagtttctaataattccttggcagcttcaaggaatgcaggaaccacactgcatttaacatattcttaggtaaatatacgacatcccaagttatttattatacttttaaaaaatcttgagatgcaagtgtcagcatacctgtcacacacttgtttaactttctcagcagcttccataccaccagatctggcaatttcatcaggttgaggtgcagcaaggtgctcaaatttgataccagcttctttttcgatcctggatacactcgactttctagaatcgtagagtgtaaccgcaactcctgtgttgcctgcaacaaaaacaaagtaacgattatggcaacagcaagcaaaccttacactatcattaagcaactgcgcaaaaatattaaagagcagtttaaataaatttctgtgctttaccagctcttcctgttcggcctgaacgatgaatatatgcttcaacttcacgtggaggctcacactgtaacacatttaaacaagatgtgatgttagaacaccaacgaggcattaaccaaagatgaataaagctcatgggcagtaactaacctggataattaactgcacatcattgatatctagaccacgagcagcaacatttgtagccaccaatgttgcaaacttgccattcctaaatccagcaagagtaacctataatcacaggactcatagttagcaagctgatactgctctgtttgagcaatttaacaggataagaagatcaaattctccctacttaactttgcctatgcaagaaagcttgaaagaaaacttaaacacatacctcacgttgtgattgaggtatttcaccatgcaaggctcttgatccatccaacaaaccagaaagctcagaaacttgaactttagtttcagcgaaaataatagtttggcctccactagatagtgaaaacaaaaattggataagacaaaaataattgaagtataaatattggttagaaaatgtagtactaaaggatacctgctatagcaactgataatatcaggaatcaaccgagccatggctgccttattacaaggaatagcaatgtgtcgaacactattactggccttcattttatcattaccaacaagatcaatagtcttctggtctcttttaagaaacctgttagagatctagtagaagcaagcgaaaaggtctcaacaacaaatagagagaaaatgaacatagcagcaaactataaagcttaaaacattaaaaatagccacaaatatttgaaagggacgcacatttttcacccatgatggcaaagtagcactgaagagaagagtctggactttagtagaatcctccactttccctgaagttatagaaagaacatataagatacaaagagtaagctgtttcatattaggaaaaaaaaccaaaaccacgacatacctaaaataagttcaacatcctcaacaaatcccatcctcaacatttcatcagcttcatcaagaacacggaattgtaaatagctgaaatcaaggttttgtctttcaatatgatcctggaatgaaagtcaattacaaggtcaaataaacaaaaatgatgatctgaatccagggaagccaatattaaaaattaatgtttagaaaagagaaagagagagagggagggagagagacgtaccttaatacgaccaggggttccaactacaatgtcaacacctctctttaatttaccctcctgaactggatagctatcacctccatagagacaacatgaacttaacccaagtgatcctccatatgcatcaaagtcagcagccacctatcaaagaaaaccataccataagtaaaacctagagtaccaaaaaagattttgcaccaaatctcttaataacatgctgagaatcattacctgcttggccaattctctggtcggtaaaaggaccaaaacacttggtgacctgccatatcccatcttccttttgcttttggcaggtccattaaccaaagattccaatataggcaacacaaaagccaatgttttaccctgcaccacaccacatatgatcagcaaagacccctaactttgaaaaattcactctaaagtccacataagcaggagattcacaataccgagtctctaagtctcacaaaataacaattaaatagcaaattaggcatccctaataacaagccttccacataaatatccaaaagcctcaaacttgacaaattcatacagagacaaacgcataataagcaaaacccaaatttcaaaatcaaaccaatacctgaccagtacgagcccgtccaactaaatcagcaccatcgagaaccatatcaaacgtggaagcctgaatcgggaaaagagcttcaataccattcgccttaagcttctccctcaaaggcgcagaaatccgaaacttagaaacagcattagggttatcaacttcaacatcctcaacgcccaacttaaccttcttgctgctcttcttcttctccgagcttgaatcgctcttcacttcatcctcctcctcggaagccttacgcttcttatccttcttcttactcttcttcttctccgactcttcttcatccgaatcagatagtttcagcttctgctccttcttccccttcttagaatcaagctctggggtatccaaagccatcttcttcttcatcttcttctcctctttcttatcagataacattagggaaggcatttagaaggaagataatggagaatcgaatctcttctgcttgttgagagattgaggctatgaagtgcgaaagcagggagagacgacaaaagaggacgacaattgctagggtttacctctctttttatatagttttgagattttagagaaaccctaatttactctaatgtgcaatctctaatctgccgtttatttattctgataagagaatgcgtgtcgtttctaggtcaaacactcaaaaatatctatctttcctttttttaatcaaagactcaaaaatatcttctttgttggcttttctattaaaatagtaactttcttcatttttcgacgatatgataaaaccaaagctcaaacataatcaattcgttttctatcacatatatagttgatgaactgtcacaaatttctaaaatggatacacactgctcataagatttacagactctgtaattaggagtaagtaacttcatcatagatttatggttaatacttaatacagttctgagacccatttccccaaaacggtacacatttattcttcacaagtcctaatatgtttatacaaaaccggaaacataacagcttacaagagcaatgtggtaccggcgacaacaaaacctaggagtatgatcacgctccttctgagaccaatggcaaggacattagaatctgaggcgctgttgcagtaattgaaaccataccatacactctcaggaacatatgtgttatatgggaaggtgaccgctttagagccatggctatatatctttacagtgtttgggatccaaccatctggaccagacctgtagagatatacatagcatatctggtatgtacatggtccgtttatctgaaatgtatctgatgaacattgctcaaacgtttttgtagatggatcatcaagccttggtgcgtatatctgattcaaataaacaaaacttgagcagcgaaatttcattgaacatcgaaccgaagcgaacatccttacagtttattagtttattagtgatagatgcatgaacagattagacactagttacaatcaaaaccaatccattgaaactttcatctattccaaagatgtgtatatttctctaaaactcaaatgttcagatcaaccagagcaaccagagctaagcatttgcaaacttttggtagctagaattcttccataggagtgacaatgttatgcatattcagtagctaactagaactggacctgaacatactaaaaatctaatgaaaccaaagatgagctcaaaatctgagaaagtccattgtaacaaagctcaattacgaagaatcagatatgtgcgaaaacagatgtgtattttggaatgaaacattcaattggaaccctaagcataatcgataaaccaaagtgttaccaaatcaaaatcaaatgttctgaagaaatcaaaatctcactcagcgaagaaatctaacctggttaccatagccatcgccgaaagcgacgctgatctgatcgcgcgtgtacctagtcgacgaacagctcgtcgagatgatcactgtgtaagcacaagtattccccaatttctgcatcatagatataaatttacacgcatacaaggaaaatcataagtttctcgggaaaagtttctacccaaagacgatgaaggaaagttcaaacggggaaagagagacgaacctggatgaggctaacgttgaatgattcagcgacgtgaggaggatccaatacttttgattcgtaaacagaggtggatataatgaagacgaaggagattaaagtgaagaagagtcgtacggacgccattttcgtgcttcgagaaatcgctcgcagatacacaagcgaagagaaaacgaaagagtaattgagaagataaagtctcgaaccagttgaggataaaccggattagaccgggtcaaattcaaacaaattcaatttcggtataagaactgaaataaatggcgacgcgcccaagttacaggccacacatctcttgtcagtgtcataatatttaggtagaggagaaaatgtaattaatgttttgtatagaagaaattgattagagattcgacatgtaactgtaggttatgtgcttttctagatgattcttaatcaagtaaccactttaagctttgaaaaaaaaatgttgtatacaaatcaatacaaaacttgcacactgatattaaatttttgtcatgtatcatcattttaccatccacagaaactgaatgtgatcatgcactaagtaaatttacaacatcttgatatactggaatttctataataaactaaagtcaacattttagaatcatttgtttactctatagctctagatttatgtaaaaagtttagagttttaagagtacttggtatttcgaagtacataaatgtcattatcaaattgtattttcatggtgtgtggttgtatagttgtgtaatctaatattcatagatttatcacatacaaaacattgatgcagaatttataaggaatagtacgttaaaaactcgaactcatacattagttaactaattaatgttaccacaatatgaaattgtcaatgttcaactacaaagagtcaaagacaaaacagagggattacacgatactcgttacttattgagacaactcttaattcttaacaaaataactcaaacaaccacagccgcaaacgcaaacacaaacgcagcaaacgcaacaaccaaactctgaccacttccacgtccagaggcagcagacggcggtgatggtggtggtggcggcgggattgaaggtggttcaggaggaaaataaggtggtgaaggcggtgggatggatggagaaaacggagggaaatccggggaaggcggtggcaaatcggtgttgttacaatagttgtttccgtaccaaatgttttcagggacgttcttgttgaaatcgaatttcacggatttggaaccttccttgtatatctcgacggtctccgggatccagccgtcggtaccggaacggtagatgtagacggagcagatagtgttgagacatttacctttgacttggaatgtgtccgatgaacatttctcaaaaccacctcctccacttagcggtttgtctagtctcggtgcgaccacctaataaattaaaaccaaaactcaatgatatacgtatttattaataagatacacataacacatgcatcgtcactaaaatccatcaaaataagactgttatattcaaaataagtttcattaaggttctaatggctttggtttatccggagtttaacaaacttcttacgtgaatccatcaaacaagatggaatatgtataacttcagggtttgaaataatacgaacataacaaatatttggacccacaaatagaacaaaacaaccaaagagtttttgtatatcaaacctggttatcgtcggcgtcacccaaagcgatagtgacctgatctctagaccaatcaggagagaaacagcttgtggtaacaattacagtgtaagggcagctttcttcttcatgaagatcaagagaagagattagtggctcgaaggttagagaaggaatgggatgagtgaagcagagtacaaggagaaggaggatggatgagagagagcactccattgttgtcttcttgaaaagagatctgggagatgagggttaaatagagaacttgagaagttacccttgttatattaacttaccttcatacttactcagttacacttggcacaacacaatccacaaacaagcatatagtgatatagcaagcatatagaagcactagactacgaaaatatctttcatgaagaaaagtgattgtcgagtatttgaagtgtactattttttttctgtgttactattactttgagtactagtattattttcgaagcatagaatatattcaatttacaccaagtatctatcatttcttaaggccatgttagttaggtgaacttatctcccgttcattgtaaccaattttgttatatacttactacatatattggcaaaagacatgacaaaactgatccagcttctttacttgttacagatattggatttattggaaagtaacagatttaaactttcccaaagaaaacaagagcatatatctcaattttacctagagtaatcaacgtgtcacgagtattacacgatgatcaaacctaacccccaaaatcaaattctacttctcctacctaccacctttttatcatcgtacaacttacttaataaaataacccttctacgtgcaaagatgcgggcctctggttgatttttcacttcccacctaccaaattagctcaagagattacagatatataaaacactcaaaaactatttagcctatcaacatcgagactgtaaagtaagtaggaatcagaaagaaaactataaattgtctccaaaagagaatatataaatgagaattcaacacatagaacaacttacttacttgactactaccaaaaattcaactaacacaacttattcatctctcaaaacaaaaatcataaatttacaagtgtaatcataactttactggagctaaaaacttgaaaaatccttattaaataaataaataattttatccaatcatcatctccatttgtaccatttctcttgctccttgaatctcctaaaaactccatctatcgccacatcaaaagcgtctttgaaagtctctaacccattcggagacttagcgtaaaccaaattcggtatcaaatcaatcactctttctctcatcttcctcacatcttctttgctataccgttccaacacttcctttatagacgtcgtgccgtttgttacctcgttccggtctataaaaaccgaataactatccggtttatccggtaaaaaccactgatactgcatgtaagcgcttcgtctccaaaagaaaaccggaatcgaaccggccaacatacaatcaaatatcgaccggcgtgtgaagctatctcctcgtggctggagacaaaaatcagacccgagaaacgtctccaaaatcgccgacgaaccattcgagcatttcccgacggtacaatccaccgtccgacacttcccacgcgattcctcacagtgacggagaagcaatcctctaaaatcattcacaatcccggcgcgtggagctccagcgaaacagaacaacgtctcacgacgtcgattccgaacaaaatcttgccaattcacgacgtcggagtccgatctagggtggaatccggtagggtacggtacaccgacgtcaaaatgatcccaagagttacgctcaataaggaggcgcgtgatgttacgcataccagggatataaatacagttagatccccaatcttcgtctttagacctgcgaaaatcccatgtgatgcgtcccatagtaatgaaatgatcccaaccgttggatctattccaataaggttgatttttgacccactgtgtcatcatcttacaatgacggtcacgatcagccgctgcgtaatttgaccataaatattgaccaactgcgagtccagcgtagaacggtatataaaacgccgtagctgattccggatccaaagtccgacaccggtggtttaaaatccggttatggaaaataatttcggttacgaattggtcagtccaaaaccatgattgaaccaaatctttagggatcacgttgcttaacgacgtcgcttcttgaccaaacccgtcgttagaaagtgcgtcgcagcgagagctccatggattgagattatcacactgttgtagaatcacttcgttgaagatctttggcatgtcgtagacgaagactcgacctgaatcgcatcgttcgtcagatgaggaggatgagagagggggattggaagaggcggcagaaatgacggtggttgtgacggtggtggtgacgacggcggcgggagaagggaagttttcggggatgtgacggtgaggaaaagggatggatcggagagtgaggaagaggatcagttggagagatagaagagagaggatcagccatgtgcagtggctacgagaagcggcgatgtaggaagagcggtttccgaccgagtgaagcgagttaaatgagttcttacgatcaatggaggtggtggagtctggggttctggattttttgaggagatgttcaggactggaaggatttgagacaggaagcatagtttataattagctgaaaatgagattagaatccgtcgccgggaattatgggtccgttacgacgacggagctaaaatctccggggaaaaagaaaatgagcgttttgggtagttgtgttcttgtgtggttctcgttgaaggcgtaaagctaactctgtgagagagagagaacttaagagtgctcgagaaacggggagattctgtttctttttctttttttttatttacaaaaaatgaaactatatttatttgctttttcttaccaaactatttatggaaagtttacggttttgtccccttaactattttagatttcgaaaattagccgtaatattagtgatttacactagatttttttatattatagttaaatttgtcccctcaactattttaattaaacgaatttcattgtagttaatcaaatatacgtgatgcacagtagaaaataaaaggaattaacaaaagataaatctgttttcaactacaatttttgtggactaaaaaatcggtttcaaaattttcggagtcaaatagcacatgctgaaactttgggaacgttacataaagtttaataagatagaggtcctgattttttaattgttctcaaggcgttggagacattacggagtggaaagaaacggacacgtgcctgtggcattgaccgtctgtgccggcaaccgacaagggaagaccacagcagccggtgaagagtgaacacttggaagttagtgtaattgacaacgtgtctttgtagaaacagaaactattattctagattattttttccaccagagtttgtgtcagaaactaactagtattatttgcatatcaatcacgatttctatccaatatctgggaaaaggaaataatatcacattagaatcattgattttaaagattgcttaaaatttagatacaatcaccggattttagtgtaatcatatggtcagtgatcgtagaaattaggaaagttgttcaataaatataagcgttacaaacttgggaaaagagcaaaaaaaacctaggaaatggaaagaagaagatcgtgcatatggggcaagtggcaaaatcaagggtcataaatttattaacggactacaaagacggggatggcaccgaaacggtgacgtttacgtgtagttgacagattagagtgaactgtgttcgatgttgaaagaacttaagtaagcgccatgtgagttttgtggccatgcctctttaatccacgagtcatgccgcatgacgtgtcacattctccaagtttttgccgacaaaatttgttttattcatgacctatgtcataaccgcagaaaaccggatatattgagactaattttggtttgatcggtttgtgttcagtctgatttgattataaattagcccaactacccaagcacagagtgaactctaacttgattcggttcgatactggagtctggaccatctttagtggcaagcatatcaactgtaatgacattgaattttaatcgaagagttcgttggaataataactaagttagtaacaactcacaacaagcgttaattttatgggtcaaagtctatgagtagtttattattgatttgtcggtcaagctttcacgaaagtgaagactagtattaaagttaattatagagtttagaaaaatagatagtgccatagtggtatgtgataattaacaaaactagagaaaactaaaatattaatgtagcgttatggtacactaggtcactcactacccctttttcttaattaatggtcaaatcactacttattcattgattataaataggaaagagcatatcgcctaaacttttttggttctgattaattctattggaaaatatcatataccgtacagtttgacctcatagtcgaatgacagtttgaaaaatagtcccaagatgagaaaaactgagacggtaattagataaaagaatggagcaaatggatatttctttaaggaacttgtttgttgatacttctattaaacaacgtacactaaaatatgatagtcgataaatcaataacgtccttgtgactagtaaaaacgaaattaacccctgaataaaatttaaaatatcatcgtcaaaatacatgcatccaactcaaaaagcaaagctacaattatcccaaaccggacgacctatgagtcaatgctttaaaatatgaaaatatagtgattattcgtttatacataatacatgtttcgcatgattagggttttgatgcatttgactttcagcatcgtgcagtacggaaaactaattatttagtgcggggatatatagttcaatagactgcagtattttatacaccaataaaaatacacagcaataaaatcgctacgtatatatatatataatatgtattatctattacaagatagtaatagagtatagcaagttgtatcatctaacaaactatgcgaataaaatttgaacattgtgacatgtagatgtagtgtaatttagctaagtgcttatcatcagtaacatagaccgacttaactttttacgaaaaaaaaaaagtaacatagaccgaaaaaatgcatatcgtaaatttaatggaaaacacaatttacgataagtaaaaaacaaaaagaaattacgataagtcgagaaaaatgcaacaaattgagataaagtattgataaaaccatgaaagtgtcggcgtatgtaaatgcggtgattaatgtgatcattagagcgtgtgtgttaaacgcggcggttttagtggagattgatcagctgataacactcttaccgggacgaatctaattccatattcatggcttgttaaaacctaagacatacgcaatctctaatttgctagtatagttagttctatattatttttcgactaataatgtaaacatatgattattaagtcgcaaaaagagtgcttaacaaccaaaaagtggattaattaacttggtgggaaaagttacaaaacctttaatgattactctttgtaccaagaatagtggcgaagcactataagagcagagaaaagaagctcaataatgtactaaaagttgtagatttttacagcttaaatacaccaaaattaatagaaaagttggtaattttttaattcatggctactgatttagattttagaaaacaatagtagtatcattgtcacatcttaaacacacaataggtatgttttaaatcaaaggccgtagttaatttgtcaaaaatgtatgcatttggtatttggatgtctccgaaaggatggatatatggacttgttagataatttcatacctcagtatcaatagtcatggagcccaaattgctcaaaaacatatttttaattccaagactttgatgaagacgtaataatgagtccaatgggccatcagatacaatgttcggaatttaacgggtttgttagttataagtattgggcttgacctatctggttcaatgatatgtaggaacaacccaatttgcaaagctttattaaaagactctttagttgtcgtcaaggtttaacttgtagtagttggtaagaaattctacgtgaaataggcaacattacaaaaacaaaaatcaattcgaaatcatacaaaacgaaaccaagtagtaaccaactacactattatgacattaatgattagacattcccaaatcatacaagttcctgtcatgaaggaaacaatggtccgtatttgcaaacgattacaaaaattcaaaccaaaaatgaaaaaacgagttaaattatttggtttataaaaatagtaatgtcaacagaagactagattgggaaacctgaagcgaacagagcttttaaaaacgagtttgaacggctgggatcatttggtacaatacccaccgtaagtttgtttaccctagggatgcaagccaaaggcccaaatcagttactacttactgctacaaccatcgtctcagctttttgtctcagctttttactaatgaagcatacaatttcttgggcatgtcacatctcgacacgtgtccactattctcttctcttattggctactcgttcgtaggcttctgttaatagatgatctctctataactctaacagtcttttctttctctttatttcgttttggtattttaagtttcaaattgaaaataataggaggaaaagtctagttttaaatattgtttttttacaagtgaacgtgaaccaatttacctctttttttttatatatcctatcggctaatctggttagtatcggtagaaatgcaccgaggtgctacagagattaatgctagggatagtcagaccgcttgtatttctgactatcaagtaaatctacgcccaactcacatatttcccaaacaaatgtgatttttttttttttttttttttttttttttttttttgtaacaaatgtgattttgttttcaaggaaaatagaacttacgtttgggaatttcacccttcactaaagcttccttctgccattagaccacaaaggcttgggcaatttaccatttttgtaaaagtagaaaacaaaatgcctaaaatgttcatacttcattacatcaacaaggttatgcccacgatatagaggcatgtaacatttatatatatagtggaagaagcctacgagctttattaataagtataaactctgattattaggtaaataaattacttaaaacgattactcaactgacaaaaccgtagttgaataataaggttactatgaataccgattgaatattgcaaagccggaattgaaaaatatataacagatcaaatgttcaagtgtggtcataattctcacataggtcatatagctgaacccatgcatctatttactagtctatagaaagtactagagacgcatacagctgaacctactctattcttttattaattttggttctcgtggatacaaaattcctccaacatttattagaacgaataaaaccaatatgatgatgattagttattggtaaacatataaacgttgagtaaacttcaaaatagattgaagtactattaagacttgcattttttccccttgggttatattcttgaatcgtttcgaagtattttaactttcaagaatagaaggttcctcaactataaacaattacattaatcaaaaccatttctatgtaaacaacataatttttgtatattttagtcttccccaaaagtttgaccgatagggcggtttagaccgtatagtacgactgtacaacaaaaaggactctggagacctaaagatccaaaactatgcaaaataaagatacggtcggaccaatttaatctaacaaaaccaaatccttatactaaactatttaccgatacatttccatataacacagtacacacaattaaatcaaacattattggaagaacaagatagaatattggcttaatctcgaacgattagagttatcctagagcctcggagcttttgtcacatataatataaactatggtatatataaacatgactctcatttgtatttatcgcaaggtacaattccaccaatttttttcgtcccactcatacagctttaattgtgaaatcaatccataaaaaaccaacatgtgacatggtctctataactataactataagatagtaaaaaattcacatcaacataaaagaaaaccaatcatattggctaaaaaaaactaacggtcgaaaaacgtataaccacaaaaccaaaccggtccaaccggtgtccccaatcactatcaaagcattaactaactttcacaaggaaaagcatagttcagtttctctacatcgcttcccatcctcttaaccctgtttactcgaatcatccaccgttggatcaaacacgcgctacaaatctagcgcgtgaccgaggtttttacacagtggaatattaccatgcattggaaagcggcgtctacaacaaacggcgggtcatgtcaccgtcaaaatcaacctttcttaattcctaacgccgttacttatctccgtttactaaaaatgttaatgcgtgtgagagtgaagatcatatactaattagaagtggctaatgttttaacgtgacattattatcatagttaatggttcgatcagagttttaagtagtaaatgatataagtgtgtgtatataattgcatacatatatactctcacactctgacagatttgtcgtggtcttagtattctctttcatggctagttatatagggctctagtacattatctctctctccccatttctctgtctctctcttctttaacatctctggctctgcatttcttgcagttcacgctaatcacctgttttggtacccttttctctctgcaacaatggcagaacaagcctgaagtttcgttcttttgtgttttggtttcctctgctttgttgttattgaatcaaaacttcaacgagcttcttggcttattaccccaaaaggaaagaagaataagaagaaaaaaatgaaggagaagatgcagcgaatggttttatctttagcaatggtgggttttatggtttttggtgttgcttcggctatgaacaacgaaggtttgtttcttctaactcttttgtttttgtcttttttcttgtgatctctgtttaaaattttgattatgtgcttcaaaaattagggtttagttaggtatatctccttaaacccattctctgattttttctgaaagtttgaatctaaaatcgtctgtgttagaagttatcatgacatataatctttggtttatgtcaaacatttggtttccccataaaaagagagttaaagttgaaagctttttcatacccaatacttagctctggcttgttcttcatcaaatgcatataaagatgcaatcttttctccatttcccaagaaatttgatcatgattagtacacagagaatgcctgttcctgtaccatggaaagtttgtgtttttttcaagctgtttcccgagaaaaaaacgaagcttaatccctagtgtcctggagagaaaggacatgaaatttacaaaaattccttagttttggtttatgtatatttaactatgtgactgatgttccgcgtttcaaatgatttattactaatcctagttgagtctgtttatgaattttgaaaacccacagggaaagctctgatggcgataaaaggctctttcagcaacttagtgaatatgcttttggattgggacgatgttcacaacagtgacttgtgttcttggcgaggtgttttctgcgacaacgttagctactccgttgtctctctgtaagaatcttatttgagttcaataataattcttgtgttgttgaaaaatgtctctcttttgtggtcttgtaatattctgctttttttctatttttactttgtgaaggaatttgtccagtctgaatcttggaggggagatatctccagctattggagacctacggaatttgcaatcaatgtaatggttttttttccctttctttctctgttgatttgcatgtttgaactttgaaatgttgtagcttttgttcataaaggctttttccaattgcagagacttgcaaggtaataaactagcaggtcaaattccagatgagattggaaactgtgcttctcttgtttatctgtaagtcttattaaacttgtttttttgagttttcaattttcatgtctttagttttgacgtccatatcctctgttgtacagggatttgtccgagaatctgttatatggagacatacctttctcaatctctaaactcaagcagcttgaaactctgtatgtgttatacttcaacattttgtttttccgattcaaagttcaaattttgtctacttgttctttttttttttcgagtggatttttgtgaacctttgaacttgtggatgtatcaggaatctgaagaacaatcagctcacaggtcctgtaccagcaaccttaacccagattccaaaccttaagagactgtgagttctttagttacatcatttactcatgaatcaaaatttgggaatagattttgaacttactcattttcttttttccaatcatgatgttgcagtgatcttgctggcaatcatctaacgggtgagatatcgagattgctttactggaatgaagttttgcagtatctgtaagttcgtcagagtcattttctctgatctcaatatagtctacaccatagaagaagttaattttctccttctaatactttctttctgcagtggattacgagggaatatgttgactggaacgttatcttctgatatgtgtcagctaaccggtttgtggtacttgtaagtggatccaacgctctgccatcttttgagtcttgtatagatcctggtccttctttgattcattcaagtcttgagttatattttttaacttgtgttttgttgttggaagtgatgtgagaggaaataatctaactggaaccatcccggagagcatcggaaattgcacaagctttcaaatcctgtatgtgccatcttaaattaaacattagacttccactataggagtgaattttggactcataccttttgatattacagggacatatcttataatcagataacaggagagattccttacaatatcggcttcctccaagttgctactctgtgagtattgagcctcttttaccttagtttcatcagtaaattgttaacatgcggttattgaattgtgtattattactttttgaaggtcacttcaaggaaacagattgacgggtagaattccagaagttattggtctaatgcaggctcttgctgttttgtaagttcaattcatatggaaaagtaacgacaaagtacattcttgaatttggctcgtctgactttgtgaatcctattcaattcacagggatttgagtgacaatgagcttgttggtcctatcccaccgatacttggcaatctctcatttaccggaaagttgtgagtcttttttgtataactgtagtatctcatatgttcagctaatcagctcttggcatatgcattgataccttttttttttgttgaaataggtatctccatggcaatatgctcactggtccaatcccctctgagcttgggaatatgtcacgtctcagctatttgtaagcttgttttaaacttcaaatctgtttacatagctttcgcattccatatacttatctattttgcttttcttttaccgattttgaaggcagctaaacgacaataaactagtgggaactattccacctgagcttggaaagctggagcaattgtttgaactgtgagtttcttttccttgctctaaagtttttcactttagctgttgaagcattacatttgatccttgtttttactgatccattttttgacatgaaaggaatcttgccaacaaccgtttagtagggcccataccatccaacattagttcatgtgcagccttgaatcaattgtaagctataagatagttcattttgaattcatgctttactcttcttattcacaaacctaaattctgctgctctacttgaattcagcaatgttcatgggaacctcttgagtggatctattccactggcgtttcgcaatctcgggagcttgacttatctgtgagtttcattcaatacaatgctgtaacattgcttccctctaaacattatagtgactgttgaatccttttggatgcaggaatctttcgtcgaacaatttcaagggaaaaataccagttgagcttggacatataatcaatcttgacaaactgtatgtcttctcaactttgttacatcgtttggttttatgtttcagtttgaatttgctgcaaactcatcatatgtttttgtttccagagatctgtctggcaataacttctcagggtctataccattaacgcttggcgatcttgaacaccttctcatattgtaagtcttttacacttaaagttgtaaatttgtaaatgtttttcttgtgtttgttaacttttaatcttttgcttcattaaacagaaatcttagcagaaaccatcttagtggacaattacctgcagagtttgggaaccttcgaagcattcagatgatgtaaagcttatagttgcttcttttggttatatcaaaatcatattttttttctgacttatctgttttacttgtagtgatgtatcattcaatctgctctccggagttattccaactgaacttggccaattgcagaatttaaactctttgtaagttaataatatgatcttatcatttgtattatatacaaaatagatgtatggtttgatctttatgtttatgtacagaatattgaacaacaacaagcttcatgggaaaattccagatcagcttacgaactgcttcactcttgtcaatctgtaagttcttctgcaagagatacttgcttatgagcaatattagccctttggaagatttgtgaatccaacattttcttcttctttcttcgaaaacgttttaggaatgtctccttcaacaatctctccgggatagtcccaccaatgaaaaacttctcacgttttgctccagccaggtatgaagcttctctcagtagtctgtcattatgatcaatacgcataagctttcattgtaaaactaaattcataacctctgtatagctttgttggaaatccatatctttgtggaaactgggttggatctatttgtggtcctttaccgaaatctcgaggtatctactagatttatccattaagcattttcttcaatagatgttttttcttgtttatttgagcttgcttttcttgttcttttcagtattctccagaggtgctttgatctgcattgttcttggcgtcatcactctcctatgtatgattttccttgcagtttacaaatcaatgcagcagaagaagattctacaaggctcctcaaaacaagctgaaggtaatgatgatgccttcatacttcttcataactcatattctgttcttatatgacaatatcaatctttaccgattctcagggttaaccaagctagtgattctccacatggacatggcaattcatacatttgatgatatcatgagagtgactgagaatcttaacgaaaagtttataattggatatggtgcttctagcacggtatacaaatgtgcattaaaaagttcccgacctattgccattaagcgactctacaatcagtatccgcataacttgcgggaatttgagacagaacttgagaccattgggagcattaggcacagaaacatagtcagcttgcatggatatgccttgtctcctactggcaaccttcttttctatgactacatggaaaatggatcactttgggaccttcttcatggtaagttcttctaactttttttggttcaatttgtgaaagattgatttgcagataaacggtaaaaatgttttgatttttattttcttgaaaagggtcattgaagaaagtgaagcttgattgggagacaaggttgaagatagcggttggagctgcacaaggactagcctatcttcaccacgattgtactcctcgaatcattcaccgtgacatcaagtcatcgaacatacttcttgatgagaatttcgaagcacatttatctgatttcgggattgctaagagcataccagctagcaaaacccatgcctcgacttatgttttgggaacaattggttatatagacccagagtatgctcgtacttcacgaatcaatgagaaatccgatatatacagcttcggtattgttcttcttgagcttctcactgggaagaaagcagtggataacgaagctaacttgcatcaactggtatatgaatcaagaatcactatagattatgatctttgaaccttaaaagagttaacgttttttttttttatgttgcagatattgtcaaaggctgatgataatactgtgatggaagcagttgatccagaggttactgtgacttgtatggacttgggacatatcaggaagacatttcagctggctctcttatgcacaaagcgaaaccctttagagagacccacaatgcttgaagtctctagggttctgctctctcttgtcccatctctgcaagtagcaaagaagctaccttctcttgatcactcaaccaaaaagctgcagcaagagaatgaagttaggaatcctgatgcagaagcatctcaatggtttgttcagttccgtgaagtcatctccaaaagtagcatataagagaaagattccagggcttttgtttagtttcttgtgtcctaaggaagatagtaatgctgattggaaggaaaggatggtttttctatagtgaatttaggtagtacaaggggtattttgggtaaggaaaaataatttatggtaagcatttaagacaagaacaaaggttatatgaaagaaacggatatgtgaagttaatgtttgttttctcccaagaacatgttcacgagttctgtgaagtcttttggtcttaagttttaaaagctcatgtcactatcccacaaccaaaatttatttaaaaaaatctctttctctatgcatatatctaaacaagtatacacgtttacttatatagacataggaatgcgtgtgttacatgtataaaaaatgaaagaacatcttcaaaatgaagattaagcagtgattaggttccttgcaacttcctgagaatcgaatttccggcacaaatccaggctcctgttcaaagtacatcatcaatggcgtctgatataatattatggcctgttcttttttgaactatttgagctttgaatagatgattgcttattagtttacctgttaatatctgtcctgcatgagctctgatttccatattcgatgcggattgcttcaacgaggtcttctttgcttgatatctgtcaagaaaaggaagattttggagtaaaagtaggacttttccatggatttttagtcaaaaaaactgaattacctttgggtctagaggggaagatttagattcatacacttggcaatttatctttctgctgtgattttctttgactatcctagtttttaaggaatcaatgggcttttttagtctgcagaaaatgtgtgtgagaacgttttaggaaaagtagattcactgaaagtttcaaagcaattggcactaacgttctggacttagtagcatcattctcttgtacgacatcggttttagcctgcaatgtgagacacatcatttaactaaatgtaaacatggaggtgaagaatcgacaatgagattcgtgacttacatttgaagagcgttccttcgctctcagtgatgtccttaaacgaaatgcctgatgcagaaatttttgttaatggatgaggaacgattataacactttgagtttgtagctattggaagatacattatacctgaaaatgttgggaccgtggcgtattagttttagccaaagatgttgaaacaggttccagattaatctgcaagatccaaactcataagcttctgagaatgtggtggtaataaagaaactgagatgaaaatacaaaagaggatataaagtacatttttgttcctaatgtgtcttttagaatttgatgtcgcaatctgctctctctgtgtgttaaccttagacctgaaactctcaagagaaaacatgttatacgaaagccaacaaacaaacatttttaacacaaagtccttaattacctgtgtctttcagatctttctgcagttctaagattcggttcctttggaacagtgagtttggctctgctgctaacatgagccaccttaaaggaaaaaacaatgactcattgaaagctatcagtataattgtataaagataactagaatcagcaaattcaaaatccataagagaaacacacaccttagcttcctgtttttgcctattggtgtcttggttttgtaacttagagactaagaccggagctacattttcaccaaacttggctaatgatcgctgacatctgaaacatcaaatacaagttgttgaagccacaaaataaaattcacataaatggtttcgtcattggttttagtaccttgtcagaagttgaacagagtaaatatctaaaggtttgttctgccttgcaagcaaagaagccgtaggtcttgtcaaagtagagttacttgttttggttttagatttcgattttttcttggatacatctttaacggtttggttataatatatgaagcctgacaacaacaacaacaaaataaactaaaggtctcaaaactgcattgaagcatcattatgcataaacaaagatttcagaatcattaccgttgaatttatctttgcaattcaaaccggtctcggcttccgaggattcaataatctccacaggcttagactctgatatggtgtttgtaatttgcttaaatggctcaaatttccaattgaactttgggctaaaagctgagataaatcacacaaatacataaataatatgaatagtaaagagaatcgttgaagatgaatgtgtgttcttacgtgaaggaggatagtttccagaggattgaaaccagatttcgatttcttcagtctcggaataaagctcaggtctagagaaatcatagaacctcggtgcatcgaattcgaaatcaatatcgaattcgaaatcatcgccagaaaaactcattatcctcgatgatgattcgggaaccattatcaatcctcgatgataactccgatctcagacgacgggaatcaagtaggagcgtttcacatcaatcgaatcgaaaatgtccttctccttctctccctcctcctcctcctcctcctcctcctcgagaatcggagaatctctggaaaaaatcgccagaggataagagcgaaggagagagagagagagaaattggagatgagagaagagctctaacttttcttgtggacaagaagagagagagagagagagaaggtaacggccctaaaattcagttggcgcggatgtataacaataacagctcatatttttagtattctcaatttggttcttcagttttctaaaatcacaaattagaccccaatttatatttttttgaaccacaacaccagttcatctaataatttatgttctttagtttctatatattaaattttgcacatgttttctacttcggttcttggtattggcaagaattttagttactttactagatgtaaattcaaatcttaaatatatgaaaatagtgttttaatttgtgaattaaattatggtaatttcgtggttaaagatagttaaagcgtatctaggaaattagaatttgtttttcttctataatttcaacttgtcgtaacgctcttaaatatgagatatatttggcgcatcatatatctttctattgttaaaaaaacatgacaacaagaaaatctatgtatcatgaagcaaaaggaaactaatatctacaaagttttattaggggagaaaggagagatttcaaaagattagggggaagcaaacaaatatacgaaataagcgttttccctctgcctgtaatttttttgtttacaattaacaacttacctgtaatttttttttgactagattatttttatttgattcctaaattttatccgaatttttttcaaggaaaaaccaacggctgtgtccttcaatccaggtaaagaatctcgtatttcttccaggaaaattcaaaagaaaaaagtttcagcaattaaaatgattatcatttagaaagaaaaaaattcttgtgttttctaaaaagattttgttatcgtttgagaaattttatgaagtaacctattgaggaaaaaaaacatcctcataggattgaataagataacgaatgtggaagaattttgaatttatttgcagagtttggagataaataatgtccaaatctcaaatcgaatcaacttggtcatctcttctacaagaacttgaggtttgtgacgattgcttcaactccaagaaaacgcttttttttttcaattacaaaaaggcatttccattttgatgtggattctgttttctgatgcagattatatggaaagaggttggagaaactgaaacagaaagggagaagattttgattgagatcgaagaagaatgcagagaagtctacaatcgaaaaatcgaaaaggttaaagaagaaaagattcggataaaacaagagattgctgattctgaagcaagagttattgatatatgttctgtaatggaagagccaccaattcttggaagacaccatcaatctgatcaacaaagtggtaatgggagaagcttgaaagatgagttagtaaagattcttcagaaacttgaagaaatggaaaagagaaaatcagagaggaagattcagtttattcaagtaattgatgatataagatgtgtaagagaagagattaatggagaatctgatgatgagacttgttcatctgatttttctgctgatgaatctgatttatctcttagaaagcttgaagagttacatagagagctttacacacttcaagaacaaaaggttttttctaaactttaccttaaatttgatttcatttcttgatcaaaaagttaactaatactttactgtttattttggctcagaggaaccgggtgaaacagattcaagataatataagaactcttgaatcgctttgttcggttcttggtttgaattttcgagaaactgttaccaagattcacccaagtttagtagatactgaagggtcaagaagtataagtaatgaaacacttgacaagttagcttcatcagtacaacaatggcatgagacaaagattcaaagaatgcaagaagtgagttagaatgtttttaaacattttaccatcttaaaaactctgctctttgtttcttatatatatatgctatcttatggattacagcttcaagatctcgtgacaacgatgcttgagttttggaatttaatggatacaccagcagaagaacaacaaaagttcatggatgtatcatgtaatatagctgctactgtttctgaaataaccaaacccaatagtctttctatagatttgctagaagaggtaacttcacaacaactttacatcaaatctttttgtaaacttactgagactattttcgccgatggattgcttaatgttttaaataggttaaagctgagctatgtcggttggaggagttgaagtggagcaaaatgaaagaacttgttctaaagaaaaggtcagagcttgaagagatatgtagaagaacacacattgttcttgaagaagaagatatcgcggtagagaatgtaatcaaagccattgaatcaggagatgtgaaccctgaaaatatactagaacagatcgagtatcgagctgggaaagtgaaagaggaagctctaagcagaaaagagattcttgagaaagctgataaatggttgaatgcttgtgaggaagagaattggcttgaagagtataatcaggtttgtcttttttttattcattaaagattcagttctgacattttgccgttacttaatgtttttttgtataggatgaaaaccgatacaacgctggaaaaggatctcatttaatcctcaaacgcgcagagaaagctcgtgcacttgttaataaacttccaggtttgatataaatgatcccaacgtacacattgtcatattgatgaatgcttatcttactaaaaatctttttcactcttcttagctatggttgaagcattagcttccaagattacaatatgggaatcagagaaagaatatgagtttctctttgatggtgtatgatcttatcttcttctctcaaaaaaaaacccctcttcttctcttttctcctttttctcttttatatacttcatttgatctcttaatctgattttcttcattcagaatcgcctactttcaatgctcgaagagtatacggaactcagagaagagaaagaacaagaacgccgcagaaagagggtattagttttacatgcaaatcatatttttaatcaaattttctattgttccaagaatcaccaagaacaatgtttgtaggatctgaagaaacatcaaggtcaagtgacatcagagcaagacaaaggaagtgttacgaagccccaaagcgcgaaaaagggtcttaaagtgtcaactaacaagagatttgtctcatcacctcatactcctcaaactgattcgcctcactcagcaaaatcgaatcaatcgtttagtactcctctatcacgccatggctgaaaaagatagagctaagatttcaaaaacagtctttttatagatcaactagtaatagtttctttcttatatacacactgtcacacatgttatgtacaagtatagttctaatgcaaccatagaaacaagacatgctaattcaaatagagggtctcgaaactgatgattcttgatcatttgtaatctgtcaaactcaggatccaagtgtgtactatacactgattgttttgcggaaagattagtttgactttgaccaaccaatatacttgctgcaaaaaaaaatgtcaattgtttcctaacatttttttaaaaccaaggaatacttttagttggtcgattttgtaattaacatcatcggtatagattttgacgcatagttagtcttattacaattagtgaattagctgagaaataaatctaaatcttgagcttatctagaaaattaattggtcttagtaaggtattcaaagcaataatctttggtcaaccttatttcaaaagtgatttactggaaaaaagacaaaggagattgtcagaagttttggtattctttattttattttccttttcttttcgaaatttcactttaatttttcttcgtatttccgtttattttattacaaatattaaatttccaagacggacgtggatctttccctaaaccgaaatcaatactttgatttttgtaattattatatcgattttcaactaattaaatccttaatattcctattaaataatacaactgtctacatgacatttttttatatatattatcgtttcttttcctgaaattttccattttatttatttctttgcaaaaaccctaaaaattcattcgtctaagagagaaaaattatcttctttttcttgtgaatttttttttggggatattgcatgtaattttttggggatttttgaggtttaatctccattgaaagaagctctggcatttctctgctacagtgttggttttcagctgcagaattggtgaaaaagtaaatctagaaactgtaatcaaatttctctgctttgatctttggtccttttgagctactatttcatatctcttgttccttttattgttcttagttattattacaaagaagaagaagaaaaaaaagaaacctttacttcttcttcatctgaaaaagctcattttttttttttttggaatcagagtttggtgaatttcaggagcagagtatttaagtaattttggggaattagtgagaaaatggaggagaaaggtgaaataagtccaagtggggtcgtcacagttaagggagatgaagctttggttccaagaacagagtttcaacaaaaccctagttttctccaattcgtgagtcccacaacggtagtgactcctctccctcctccaccagctccgtcttcggctccggtaccaaccaccgtgactcctggctcagccacagcatcaaccggatcagatccgacgaaaaagaagagaggaagaccgaggaagtacgcaccagacggaagcctgaaccctaggtttttgcgaccaactctgtctccaactccaatctcatcttcgattccattgtctggagattatcaatggaaacgaggcaaagctcagcagcagcatcagcctcttgagttcgtcaagaaatctcacaaattcgagtatggaagcccaggtaattaaaagttgagatatttgtgtttgaactgtttgcattggtttcagtgagacaagatctgatctgggtttcgagtgattttatgttgttgtgtggatttttgagatgttgggaagtgggaccaacataactggattttgctgggtacacttttgtctgaagaagctattacactcagaccagttagagacagagaaagggaatctgctgatgctgaccaaacaaaaacagaaataaaaagaagattttgtctttaaaaaaaaaaatacaaagacagaataatctctgtctcttcctttttatcttagaagataagtatgtctagttgtgattataagttgtttagcagatcttacgatttctcattatctgttttaattactgtgtgaataaaaagagatttagattattagttggtctttgttttgaatcatggagttagttgcttgaggattaggattaattaattagctgattagactaatgcaaactctgttttactatctcttgcagctcctactcctcctcttcctgggctctcatgctatgtgggtgcaaattttacgacccatcaatttactgtcaatggcggtgaggtaataaatttcccacagaggattcttttgttttctttcttcaacacggtgcttgtaactcaagctttggtattaaattctatcagtctttgtttgagaatttcttgttttgatcaggatgtgacaatgaaggttatgccgtattcgcaacaaggatctcgagctatctgcattctttctgcaactggttcgatctctaatgtcactcttggtcaacctaccaatgcaggtggcactcttacatatgaggtaacaaaacattgaatcaaatttcgttagtacctcgttttgaaatatatatcgagtaaaactgttatgtgttttttcttttctaagggtcggtttgagatactatcgctatctggttcctttatgcctactgaaaatggaggaacaaaaggtcgggctggtgggatgagcatttctttagccggaccaaatggcaatatatttggtggtggccttgccggtatgcttatagcagctggtcctgttcaggtgacacgatttgattacatgaatgaaacatatttacagattcaggagtatagaaaactctaaagtcttataatatgtgacaggtggtaatgggaagtttcattgtgatgcatcaagcagaacaaaatcagaagaagaaacctagagttatggaggcttttgctccaccacaaccacaagcaccaccacaactgcaacaacaacaacctcctacttttaccataacaaccgtgaattcaacttctccttcggtgaacaccgtagaggagcagaaaccacaagcttatggtggtggtatagtgagaccgatggctcaaatgccttcttctttccaaaacgacaattcaactatgaacaatttcacaccggcctatcatggatacgggaatatgaacactggtactactcacaaagaagaacatgaagacgaagatggtggtgatgatgatgatgattcaggcgatactaggagccaatctcatagtggttgagcaattctctgatcaaagtcagaaagttttcttgtgtagaaaggaagggagcttaaaggagtgcttttttttagagggttgttttagttgtgtgagggttttcttcttttgtgtgcttttctaatttctagggttattcttctttgtgatcggtttagatttaatcatgtcgaagtcatagactaaacgatgttcttattgttgaggtcattgggattcaaatttagtaagacttttgtgatatggttcatattcttgcaaagtccattcataagattcactacaaacaaatgtttttgatgtataatacaaagtaggagtactataaaatcctacctgtgattcatcattatttgtctatgtcattaaaacattcatcagtttaaaaattgcttcaagtctagatcgtgcgtaattgcaaaagtctatataatttctgttccacatacacagactcatcagtggattctgggtttaaattgtaacaaataaaaagtcaagatacaaaaggaagtgagcataactaaagcaaaacaactataaggtgatatttaaaataaataaagaaatataggggttaaaacataaatacaaactcttcgctaattctcaaaacccttccctttcctttatcgcagtcgtaactggcctccgttggtctctatcgtgactcccttcacgccattaattccgattaatcggagcttcgacttctcatcttccttgggtaactcgctctaccttatcttcatgtaatcaaaattcgaactttttgtctgtgtgttttagttgtttattgggtaagttactagatcttctctttcgattttgtttcagcgttcgtgcgattcaacgtttgatttgaagaatcagtagcaatgtataaccttagtaggatcatttatcgtttctcctcggtttcacttaaccctagcacgagagcatctgggtttctacttgagaacgcttcatcaaaaatcttacaatctgctacgaatcgagcattttctgcaaaatcaggatctgatggagttggaggcgatgataacggctggaatatttcaacaggaggatcatttggtggtacaggatctgctgatcttgattgggacaataaatctatgtggtctactggtttaactaaggagcatttcgatggtgtctccgttggtcgtcagaagaacgcggcgaatccttcttctgataacaccccttctgattcgggtgatgtaatgagcaaattgggtccaaaggaggtagctttggttaatgaaatgaatgagtatgatgatttgcttaaagagattgagcaagataataggcaaggcagggcttttgttgatgggattaaacagagaatgatggagatcagtgtgttgttgaagcaagttaaagagccaggtgctagagggtcttatcttaaggactctgagaagactgagatgtatagattgcacaaagagaatcctgaggtgtatactattgagaggcttgctaaggattataggattatgaggcagcgtgttcacgccattctttttcttaaagaagatgaagaagaagaggagaggaagcttggtcgtcctttggatgattctgttgaccgtttgcttgatgagtaccctgagtaagttactttacatggactagtatttctataccttggtataatgttacttcagttttacatgaattgaaatggagtaactgtgtgtactctcttttatttagtcttctttatagccaaaatagttaaggtagttggatctagcattgttagtgaacgatcatgatgcaaacttgaataggttgcggattatgtggcttcgtcttcctttaaccctcattttgatattggtatacaggttcttcatttcgcatgaccgggaatttcatgtggcctcacttaattacaaacccgacttcaaggtcatgccagaaggatgggatggtacaatcaaagatatggatgaagtccattatgagatctcaaagaaagaggatgacatgctttacgaagaatttgtccgaaggtttgagttcaacaaaatgaaagtaaggcccttcttttgcccacttgagtatgcattgacttagtaaaccattactacatttggtctattgagacattttcccatccatatgttaattatcaagtgacctgcttgcaacttagaaggaaaacttgagactagatgcaagtttggaaccctctattctaaatttggtaacttgtaaaataaccttgaaagattgaaagtaataatggtattgcaacttgcttgtggattgtttaaaaggttattggtttgaatagatccacgccttttgattgatatataacatcagcgttcctgcttgagttcttgctgagttattagacgttctttggtcatttctccttggtgataacaaacgttactttaccttttgctctctaaaccagtggagaggagaagtgatgtgccacaagtacagcaggagacgttcatcagagggatggaaaatcacggttgagaaattgggtgctaagggcaaacgtggagccggaggtggctggaagtttatgagtcttccagatggatcaagccgaccactcaacgaaatggagaaggtctatgttaagcgtgaaaccccactacgtcgccgtaagatctagactccatcaatggttatatcaggatgggaatgttatgtctcctgtgggttcttgtttgattctgattttgcttctgtttgatcttaagttgaatagaataagatgggtagcttttgtttttcgtttagctctctctaactttatcagtgaggttcaaataaatcataagacacagtgttgttttaatagaatcatgatcttgtattagaattctctgttatgtttaagaaggttccttcatcgtttgaaacgaattgaaagatgatttagagaatcttgtcctaatttgttgtggtatgttaaaagttgtggtgcgtttggcaaagctaaaataaaagtatgtttgtttttgtctaggaagcattatatcaacggaggtgatgcgttactcgcccgcgaaccagaagcggaggtcgaagcggaaacagaagcggaaggagaggcgcatagcatgtctcaaagccggtaagcaaacgtgattccaaaaatgaggtgttttggaagcgtagtgaaaccacatgactctagtttggaaacgttggtggtgtggatcggaagcgtcgatggtgacttgcaattctaattttgggtttataatttgttttgtggcccaacttaccttggtcaccataagcatttaatgtttggtattttaggttatttcatttttgctaatatattcaaacaaacatataaaataaaaagacaaatcaccacccatgatattaaaaaaaaaacactaataaaagatgatgtctcctggaatggtcgacgcagaatctgtagccactcactgttctttatcgttgtctcctcctcaacattatcccaatcccacgttcgcttaattttttaatttttaggttggattttatttttcatcaaccatataaaatcattgaatagacccattcttttatcccaacctttgaattctttacctcctcccacttacaattattcgagatttagtttgaatacatgtatacttccggtgatttgatcttggtcggaaaaaacaatcttttacgacttttctgaagtatgtcgcgacgataaagactattgaggattcatgtctacgtctacggtttcaaaatgtcttataatgtctactgtgtagtacatgcatcgaactccaattatacctacacgtacgtatttaataaagttttgtgctatttaaatttgtatacgatctaaacatttctaatgtattttgaacgtcggaccagtaaaatatatgaaatcgatcgaatgtagtagaatttagaagttctctaaatatttgttttgctattttttgttatgtttttgtcaaacttttgatatttttctttcttatctctttgttcatgatctacaattatcaaatcaaccaataggaactgtttcgagttgcacttggaccacaatatcccacactaaattaaaacttgaaccagatcaaaatctcttcggacctttgccctttggaccagttcggtccaatttaacctttcaatacccttatcttgatagagtactataaagaaataataatgacagatgcatgaaactagttcaagtggaaaaagcatcgtgcactgatatatcttcatcaattgcaagaacatgtctcaataaacccaaaactattcaaacattttttctgaatcatatctatcagcatgggacactgtggctctttgtgcctttggattcaacgcatccttcacaatcttttttttgtaactgcatctcattatcgcattagtagcaatcaccacctatatgaaatacctctttatatgtatatgatatcgatttaaaagtatttagtaaaaatcgattaatgttttctacaataagattagtcagacgcgattgccaaatccataaatccaaaaagaattatatagcaattgatatactattactataggatatattatagagtggatatgtttcaccataagcttaacattaatttctcaatcttggtttgcacaatgattaatgcataattagattaagtgtatatgaagcttcatggaaacccgtacgtgagaggacggtcactagattgtacaatcaagaacgtaatatatatatatccattaatctaaaccgtacgttgtagctaattagttttgtgaaatcgagaatctaatcttgtaagaaaaactgtaggcttgttgtcagaacaaacatggacccatgttctctatgtccctaagatgtgtaccaatctcaattcacttcttttgttgcactattttttaaaaaataacttttattttatattttgagatctccattgcccctgctgcactagacattacagctcattttttccttataattcaatccctagctatttttctttcttattagtttaaactaatcatatttgggtaattagcgttgaaactatctatcatatcaattttaatgatacatatgcaatactttatgtgagtatatgcatgtatgcatgttccaacatccagattaatgactaacgtttaagccctgattttttcagagaaattttgtgttgtacctatgtttgtattacacacaatatttaccattgtttaacatgtacacatgtgtttataaatctccgtacactataatgcatatttgaaccatatatgacagaaagttttccactagttctaattacattttgttgccctttcctactcgtctattgcctatagaaatattattttagttatgattaagaattgggatgcacattccgaaattaattattaaatgccactatgaagaacccttgaacatagtctaattcaattttaagatcataaggaacattaacagtgacaatagctaaggtctctcgacaatgagacaatccgctttttaaatatatacatataagagataccatattgtatacatatgcagatacaattacaacttgaccaaatttattcaatttctccttctctttatatcaataagaaactattcatgatactggaccagcctgtttgaatcttgtcccatccacaaatctcccaatatataaataaagaaccttcacccgtaaaaccaaaaccatcaacaacttcaaagctttctaagcaagagattgagagaaatcggattttctttctaagactcaaaatatctaaaaacaataatggctttttggtctgctgagaatgctactaaagcctatcttagtacattgaaaacggtaagagtttattcttataaccaaaacatttacccgtgatattgtttcaaattacgataaaagattagttaatgtcacattttgacatatttctctatatgcattttcaggatcaaaggacaaaagaaccaaacgtcgccgaattcatatcagccctagccgccggaaatagcgctagaaagatagccgtggcttgcgccggagcagcaaacgccgacatactcgttgcactaatcgcagcggctaaccaaacgcgtggtcaagttgtatgcgttttacgtggtatcgaagaactaatcatatcccaaaaaatgttggaaccatcagagattcatcagatacaattcgtagtcggagaatctaacgacgacactctaatcaataatcatttcggagaagcagatttcgtcctcgtggattgtaacctcgaaaaccaccaagagatcgttggaaaaatccttaatcatcacgaagaaaacgcaagaaccgggggtggaagcggtgtggcggttgtggtgggttataacgcgttttcgagagggtcatggaggtttagcgatggaaggaaaacgcagtttttacctataggagaagggttacttgtgacgagggtcaatgataatcagaagatgatgatgaaaaatcaccatcgtgaccaagtgatgaggaagagtcgttgggtggtgaaggttgataagtgcactggagaggaacatgtgtttagggttagggttccccgaggagaagccattattgaagcttaaattcaaatcttatagattattgggtacgttagagcaaagatgatcacctctgtgatggttcagacgagtgaaagtagtaattaagaagatgattagttattttgtataagtaattatattaagagagttttgattggctttggagtattttgtgtggtgagaagagtgaaaaagtctatgtttttcgagtaaatgactttttttgtaagtgtaaatatgaaatgatgtgttttggtttaaacttctctctgattttggattttttttttttttttttttgtcttttcttgagcatatgtacacgcattgttattcttcagattttggatgtttagcaaataagatattcaaaaaatgcacatgcatgcatgagagatggcatctgaaactaatataatgaaacattaaagtaagcatatgtatttagctgtcttatacagattctcaaaatagatgtagacgtatattattgagaattgacaaaaaaaaacgtatattattgagttgttgagtctaattttttttgttgacactatttaaaaccgacaagcacgtcaaacagatattagtaatagtatatagggtcttcagacatgtattcgtttgccttaaaattgtattttaaaaagatcttcttctttttttcatcaccgttacctttattataaaaccaagaagattaatatatagtgaaatccgtaaagacgaaaaattaacgtagttcttatattgaagatgaactaccaaaatctaattaattcttatgtgattttgttaatcattgtcttggaattcactatataatgaagttcatcatctctaaggaatggttttactttggtccgattctttcgacttttggtcgttccatttctcattgaatcaaatctatgcccaaaggtaaaacataatcttctacagtacttttagatatatgatccaaattctcatcgacctaaacttataagtcattgaattcaactaggcttgtgcacatagctgggaggcaccaaataaactccttcttcgaagtagacaactcgtaatgaatgtatattatttttatcaaccgacatctccgttaagaaaatagataacaatttgaagagaagagtcgttgttgacaatgatccgttcattaatataaagcattgtcacaatctctatatgtcccataaccttcccctatccccatgaatgaccacccccatctcttccttatccatcatctcccacacctcatcactctcaaagacaacgacatttttcacccataaatatatttacataacaaaatttattcgaaacaacattaatcaacaaccaaacattacattcacacaaagtaacaaaaaaggttcaagggaaatggaccaccagagagacttatctgatctcaatagtttagtgggcttatgttttaatgtagtatgggcttttttaacgaagcccattttgtcaaaagccttgtagtgttcttcatcagtaaacgtaacaaatcattcctctgagaaaccctaagaaaaaccctgcctgaaaatctctgttttttttgacgattctttctttgtgatcggaaaaaatggtggctggtctaagagatttcacgctcagaaccgaagatggctccgggaaaccggtactggatgaatctaacggcgaggaacttatgcacgttcagacttccgtcgccgtcgctctcggaaaccgtcccattgagtctcccggaactctctacatcacttccaggtacaaaaattaactcaaaatctagtccttctcgattgagataaatgtcttagcttaattttgtgatttgatttcaggaaattaatttggctgagcgatgtagacatggctaaaggatacgcagttgatttcttatcaatatcgcttcacgctgtttctagagatcctgaggcttattcatctccttgtatatatactcaggtattcaactcttgcaatttttctgggttttgttagacttggtagcttaaaagggaattagtgttgttctcgttgattgtgattagttcttaggcctgtactgtaatgttgcttgttgcaagtgcttgctggaatttgagaaagtggcttacacgttttaattggatttgagaggtgtgattaagtcttttctgttctcattttgctaagtttttggtttaatgttttgaagattgaagttgaagaagatgaggatgatgagtctgattcagaatccactgaagttttggacttatcaaagatcagagagatgaggcttgttccttctgactctacccagtgtgagttgttatgtagcaatctttagagctattagaatcggctgtttcattatataagagtcttggatattattaagctgatatatcgttttgtcttgtcatatgaaagtggagacgctgtttgatgtattctgcgagtgtgctgagctgaatcctgaaccagttcaaggtaaaacatataattactggtttaatagtatcactaattgcattttttggttacctagccatttatatctttggtttcattgcatctttcagaagaagaagaagaaagcggacataattgggtgtttagtgctgatcagatggatgttcgtggaggaggtaattaatgttttcatatgacttagaccgaattaaagagtgtgttaatgtattcatcttgaatggtacgaatgaaatgtgatggttttctatgtgtttgcaacagatgatgatgcagagtggcaaatatctcagagtccgactagtgtaattggtcattccaatggagatgaaggtcttaatcagcctatgcttgaggtaatacaaagttacaaaactctgctttcaatttttcctctttttttgtttttaaaaaattgagcgtggtttcatctgccttttgtattcacactgcagctccaaatcaatgatcagaggtttgaggatgctgaagagatggttcatgaaagtgagaccaaagatcactagactcttcacaattgtactcgaaaacatagtagttgtgttattttaacgatgaaagagttgtattatgttcaacgataaagtattatgttcgtgatacttagcttttcaatttatggctgattaaactttaatctttctcgtaatagatctctcaatttgaaatgagatagcaagttggtaacttcatacagagttatgtcatcgagagggtcaaaagatctcaagttaagaataaaggacgaacttctaattaaaaaattcaaaatctattaaattaagaaaacataagaacttgggtttcactacaacaaaacatttgttttttttttaactcaaaaggaatgtcgttacgggaaaagaagattgtttcttaagagaatttgaaaagagataccaaagccacagaagggttgatctacgagtcagcgatggtgacctcaacttcaacaccaggttcaatggtgatggaggtgatctgcttgaccacatcaggagagctgaaaagatctataactcgcttgtgtaccctaagctcgaatctgtcccatgtgttggttcctgtttacaataccaatagttaagagagtttcagcaaatgtgaagacacttgcagtgacagagtataaaacagtattgagcacaatcacaaattctaagacctaaatcctaggtttaatagagcaaatgaactaagggagtggttccaacaacaagctctagtgattctgaaggcaatataaaagatgagatgagcataatcatcataccttcaccacaaggagctttacgggtagtgatcttgagaaccttggtgggcattctgactggacccttaactctcagtctcttgtccttagctccacgaaccaaatcagtacacactacatatcattttgtagaaacagaacaataacaataaatcagtatcaaaatgtccactctcaaaccattcgaatcatcactgaagcaaatcgaagtcaataaatctatcatcttctactgaaaaaactaaaccttcaaaattcactaaaactaggaaaacattgaatcctcaaacattctttacggttttgaaagcagctcaaaactaaattgctgaagcgaaatgataagataatcaaaataaaaggataaaaaagaaagacctttttccaagttcttgacattcttggaggagagagtaattctgatcttgtgaatctgctcgagtggctcttccaaaccagccttccctggtttcattggttgatacgctgtcgccatatttgcagcttcttctgaaaacaatcacaaacacaccaaccaatccatcacattaacaaatgatccgataaactcatgtaaacatgaaaaatattaaaacttggatcaagtgaagagaacctgagagacgaacgaagctcgacggcggattgctttttgctgcaaggaaggaaggagtcgaatgatttaacctaagagacggttgatttaatatgaaaaccctaatttatatggacttgttgggcccaaacaatattcagcccaataactacaaaaatatttgctctgtatttttcttttgtgttttgacccaattacttggaaaacaattcattttattaaaaaatacaaaccatgtttgatttaattacataaatttttgtaatgaataaacgtgttattataaaaaacaaattaatattttttagaagttttaaccaaaaatatcttggtaccgtgttttttagtcaacccagagaaaacatcacgaacggctattttttaaaattaaacaaaaaaaaattaagttctttgttatttctagaaaatggggaagacatgcatttgttggaagcacgtagtttcgatatggacactctcccacatgattattctttaagaactatacaaatcataaaatatcaccattcattaataacttaaggtgttgtaagaataataaagtcagaaattataactttagcactatggatataagaatacaacgaataatcacaaatcacaaccataataaaatctctgtctgacttttgaatttggaactaatttagaattattttttgttgacagcaaatctttataatttaaagatattaagttaacatcaaatagaagtatcatactataactatagtcatattgaattaaagataacaaattaccataaaatttagatgtaaatagtcaaatttatttatctgcaagaagaacaaaaaaaatggcgaatgagccaatttttgcatcaagtagtaaaaacggagtcccccacttcccgcgaaaacctcagtctctctctctctctctcgcaaccgcttctctgtaatcgttatgttttgataaaatcacaaaacaaacaaacaaacaaaaattaaaagagtgtaaatatgaaaattcaaataattctccacaaatttttctattaataacaaatgtctacgacggaaccgtcgcctgagaatgatcgggatccacaaccgaccaccatatctactccgacttccaccaatgcgaagcttctgaagaagatccctgcgattcctttccgccattcggataaggaaggagaagatgaacaagcgaagacggacgaggttactacggaattagctggggaaggtccgatgagtcacgattcgccggaaattcttgctccttcttccttaggtttgaatcatatcagaacgaaatcgtctcctgcgccgtctcctttgagattttcatctgccacgcctttgatatctccgggtcaagatgataaagacgtcgccaaggagaaaccgagggttggtgttgttgatgctcgtgctgatgctcgtgccagatggccgattcctccacatcaacccgatcaaggtagatttctcgttgattcgatttaggatttatgaattcgaaaattcaacttagatgatgatgattcagaggatcttaatgatcaggaggtgtttgttgttttgtcttttagggaaaaaagttcagtggagtcaatcaaaatctcaacgagtgcctgcaaattcaaatccaggggtagaggtgaatgtcttcttctatgtttgtttttcaaattcttggaaaattttatattgctgattcgttttttttgttgttcttgtgaatgcagagtactcatgtaggtcttgccaaggaaacacaatctccacgttttcaggcgatattgcgtgtcacaagtggaaggaagaagaaagctcatgacattaagagcttctctcatgaacttaattctaaaggtgtgcgaccttttcccgtgtggagatctcgcgcagttggtcacatggaggttagtgttggttgatgcttcttctcacctctgataagttctgctcatttggttgatgcaatctgtggaacgttttacaggagattatggcggcgatcagaacgaagtttgataagcaaaaggaagatgttgatgctgatttaggagtttttgctggctatttagtgacaactctagagagcacaccagaatctaacaaagaattaagagtgggtctagaggatttgttagttgaggctcggcaatgtgcaaccatgccagctagtgagttttggttgaaatgtgaaggtattgttcagaagcttgatgataaacgtcaggagctacccatgggaggactgaaacaggctcataatcgtcttcttttcattcttactcgttgcaataggcttgtgcaatttcgtaaagagagtggttatgttgaagaacacattctgggaatgcaccagctaagtgatcttggagtttatcctgaacagatggtggaaatctcgcgacaacaggaccttcttcgagagaaggaaatccaaaagataaatgaaaagcaaaatctagctggtaaacaagatgatcagaactcgaacagcggagctgatggagtggaagtaaatactgctagaagtactgattcaacttcgagcaattttcggatgtcatcttggaagaagcttccatctgctgccgagaaaaaccgtagtcttaataacactcccaaggctaagggggagagcaaaatccaaccaaaagtttatggtgatgaaaacgctgaaaacttgcatagcccgtcaggccagcctgcatctgcagacagaagtgctttgtggggtttctgggcggaccatcaatgtgtgacatacgataattctatgatttgtcgtatctgtgaagttgaaataccagttgtacatgtagaagagcactctcgaatatgcacaatcgctgatagatgtgacttgaagggaataaatgtaaacttaagacttgaaagagtagctgaaagtcttgagaaaattctggagtcatggacgccaaagagcagcgtaactccaagagcagttgctgatagcgcaagattatcaaattccagtagacaagaagatctggatgaaatctctcagagatgttcagatgacatgcttgattgcgttcctcgttcacagaatacattttctttggatgaactgaatatcttgaatgaaatgtctatgaccaatggaacaaaggactcgtcagcaggaagcttgacaccgccatcaccagcaacaccaaggaatagccaagtagatttgctactaagtggtcgaaaaacaatatcagagcttgagaattatcagcaggtaaatgtttacattctaataattcatgctgaaactctcaattacttctttctttatttcagctgagtattccacttctcctttacttttatcttgtgctttgtgttgacagataaacaagttgcttgatattgctcgttcggtggcaaatgtgaatgtatgtggatacagttcactggacttcatgattgagcagttggatgagctcaagtacgtcattcaggataggaaggctgatgcccttgtggtagaaacgtttggaagacgaatcgagaagctactgcagtaatcatttttatcattttcacttgtcctgcgtttttctggtcagtactttttaaatgcaaaatttcattcatgctgatttattgtttctcaaatccagggagaagtacattgaactctgtggactgatagatgatgaaaaagtagactcatccaatgccatgccggatgaagaaagctcagcagatgaggatacagtacgaagcttacgggcaagcccacttaatccacgtgctaaagatcgaacatcaatagaagattttgaaattataaaaccaattagccgtggtgcatttggaagagtttttcttgcaaaaaagagagctaccggtgatttgttcgccataaaggttggtattactaacattatatttttcagtttggctctttgaatttgttcttagcataactcgatcttttcgaaaccattgtacaggttttaaagaaggctgatatgatccgtaagaatgctgttgaaagtattttagctgagcgtaacatccttatatcagttcgtaacccattcgtggtatgtaatgccggcaatgcataatttccttaatgaatacatttgtgaaaaactgtgatgcttctctaacgcttcctttagctgttcaggttcgttttttctattctttcacatgccgggaaaatctctatctggtcatggagtacttgaatggtggagatctcttttccttgttgagaaatcttggttgcttggacgaagacatggcccgcatttatattgctgaagtggtaaggccgttcacctcaagatttgctcaaatgtctttgtccggatcaaaacttaactgtccacatgatgaaaattgaatttaatcaaatgcattttcaggtgcttgctctggagtatctgcattctgtaaatatcattcacagagacttaaagccagacaatttgttgatcaatcaggatggtcacatcaaggtcaatattgtgttatgcatcttgaattgatagcgagactgctcttctcacaaaatctaacccttctaatacagttgacagatttcgggctttccaaggttggtcttatcaatagcacagatgacttatcaggtgaatcatcattgggaaacagtggatttttcgcagaagatggatcaaaagctcaacattcacaaggcaaagatagtcgtaagaaacatgcagttgttggaacccctgattatctagcacctgaaatacttcttggaatgggtcatggttagtatctcatttgcctttcattccatgacatcatgcagttgtacatgggacttattatcactactcattacaggtaaaaccgctgattggtggtcagtaggtgttattctctttgaggttctcgttggtattcctcctttcaatgcagaaaccccacaggtatatattttcaagctgaaatcatcagatatcaaaagtaaacatcattctaatgccttaacattttctctcattcatgggtttgcagcaaatttttgaaaatataatcaacagagatataccatggccaaatgtgccagaggagatatcttatgaagcacatgatctgatcaacaagtaagatcccacactttctgcaaatgaatctcagaaacttcattgctttcccgcgttttctgtactttcgccatattagacgcttttcatcaatcaaagtgaaacaattacctgttgattgtggtaacattatctacttatgtccttgtttcaggctgctaactgaaaatcctgtccaaagactaggggctacgggagctggagaggtaaagctctagttagttcatcatatagctaactttatcaaatcctcggtctctaaaaaattccttccttacaggtgaaacaacatcattttttcaaagatattaactgggacacacttgctcggcaaaaggttcgtcccatattctgaacacaaattaacttccctttgaaaatcgatctcttactactaactttcaattttatctattgttacaggctatgtttgtaccatcagctgaaccacaagacactagttatttcatgagccgatatatatggaacccggaagacgaaaatgttcatggaggcagcgattttgatgaccttacagacacatgcagtagcagctcctttaatacacaggaagaagatgtatgactttactttctttaattccttttctcttgcaccaaatttagtgttatcatctgaaaactcacataatcttaacaagtgtttatgttgtaaaacagggtgatgagtgtggtagcttagcagaatttggaaatggaccaaatcttgctgtgaagtattccttcagcaatttttcgttcaaggtcagttatagttaatccccaagatttgtttttagtgaaatctataaatgcttaattttttgacaatatttgtgtgttatcagaacctctcacaactggcttcgatcaactacgatcttgtcctaaagaacgcaaaggaatcagtagaagcttcgaaccagtcagcccctcgacccgaaacatgatgactactaatatgtatggatcatttatctaacttcaagagctgattggttcctgttcaagccatcaaagaaagtaataataacttggaagcatagcatagctaggaagcaaaagagctacagagatttgagtatgatattttatgtaattacatgatacacttactgaaattacaagattttttcaaataaatctaaaaaaatcttgaatttgtatacattatgtgtaactgtgtatcatgtgatctgttctatatatttccagcttaagctctataatatatcaagaactatcaggtcagggacattcaaagtgcaaagcacatttattcattagattaatttggaaatcaaattacaatgttttataactttgattctttatactggtccaactacacaattctagaatgaagtcaatgaaccttatgattaatcaacctacggcctaattaaacatacttgaatctctaaacatcgaaacatccaagttctaaatcttcgtatccgaattctccatacttcatccacaaagatgacgaagaagaacatgatgacgtaatgtcaccggacaatagcatcgtaagctctccggcggcgtcgccacctcctccttcgtcattttccattagaaagctccacggctgatcatcaccgtccacgtcagccaattggtttagatttcctgataacactgctgacgtgtcattcttcaaagcaacagatacctcggtctcagacagaggctttggatcgttgaccaatatcgtttcctcctcgttgactttttgttggtcaaatcgacgatgtgtgtttggatcaatacccattcttataagcttcctctttatatgagtgttccaataatttttgatatcgttgtctgttcttcctggtaactccactgcaatcttcgaccatctataaccaaattatatataatgcattagaatattttcaacattagaaatagaaatcatcaaatctaacatattggtttaactaggagggtcataattgtcaaagtagtgtaatagctcgtttttatataatgaaattggtaacaaaattgaaaatataaaaacctattgccaaggcgagcatgaagatcaatgactagttggatttcttcttcagtaaaaagacctctcttgagatctggccggagataattagtccaccggagacggcaacttttgccacacctccttagccccgccagttttggcacgtctctccagcaccatcctcctccaccaccaccgcagttgccacgtgcccttaagaaatcaactagtttcccatcttcttccactgtccatggaccctttcttaatccaacctcatcacaacatggtttacgaccacccattatttatattatatggtttaaaaaaagcttcatcaaattaaaactttattggatttgaaaatcgtgaaagtaattagctacacccaaggggtcgataaatggaaaatggagaaaaagaaaaagaaagacaacacaaaagtggtaaccaagtttatctcaactaactaactatatatacacacgtatggagtttcttggccattttttgtgatgcttaattaagattaataattattttcattttcattcaatataattaagaaaactcgatgatccaaaagtttcttgaatcttttctgatgtttttgtggaatttgctaaaaccattgaatacggtgttaaataagtaattgtgtgtatattatagttcgatatataaacctttttcttctttcatttttatttttaaacactttcatattaaagtataattaaattcttttgacgtactgtttagcggataaatttcgtataattatgtatttaccttcatattactttacaattcatgttggattattcgtgatttgatgatatgtcgtttacagtttacacgtacaacaaagttgtcatctactcttagcaaacggctaaaacaaaacaaaaattataactataaataggcatatacgtgaaataaacaatgtatttatcttcttgtttatctaatttcaaatcttttataaacttggctctttagaattttgtatgtacattcacatgttttaaggaaaaaagatcatgctgcttgcgttttgatcatgacaagaaaatgagacttcatttataaataaaatcttgaaatagagaaaaagaacatgagacttgcctttgaagtttaacaaactgaaatgatattaatttcgaattgagaatttattaaatatctttgacacgtagtatatatataggacttcacaaaaaatgttgttttctatttctaacacatatttttcgaaacaatctcagttttatccacattatttcaacttataaatataataatgatataccaaaatttaaacacatttataaaaacaaaacagaaagttaagcatttcgctatgaatgtgtagtatgatcatgcattataaacttgttacaagaaaaataattttgacaacaacttgattctgtcggtaaagataaaacaatttaggaaaagaaaaaaaaaaatctattgataaatattggtcgtactaacggaattgatagaatgctcctcttcgatgaagacgaaagttagttcccactttcttgtatagacaattatggtgggaaaaattcgtttttcccgatttggatgaatcagttgatatctggttatttctcatttttctaatctttcaaacgaaactacagatatatttttcactaagtcaactacatgttcatatattattttgatgagtcattttctatattagttttggtaaaacaattaacaaaaaaaaaaaaagtatataaacatttataagggaaaataattataaattggctgtcaacaaaatgtatatctgcatgtgttgggtgtaacaatccgatcggatctggttacgagatagtaatttacaaataccatggatatataaaattaagacttggaacgaaagtgagtggaagatacgtgatttttatttgaaacaaataaccaaaatatcaaattaatcatggtgattactgattagtatcaatatcaagtaatagtgcactctaaaaaggtagcccgtactataaatatttgaaccccaactcttttctattcacacttaattatttcaacctcaagaaaaaacaacaatcatgacaaaacaatgtcaagctctctttctactcctctccgtctcctacctcttctcctcagacctcacggctgccaccgtcaccgcggccggaacttctacaaaagcactaaacttcattcaatcttcttgcaaagttacaacgtaccaatccctgtgcgtggacacgctctcggtctacgcaaatacgatccaaacaagccctcgacgcctcgtggatgcagctatcgccgtgagtctgaaacaagcgctgtccacgaagctcttcatctcacacctgaggaagagccagttccaaacccttgcagactgccgaccaacaaccgaaacatacactacagatgcgcagtgttctgtcgaagaactccaagaggtggtgaattgtaacagttggaccgaatgcttgtttcacacaaacaatgctgaagtctgtgccattgcgggtgagtatatggtcgagaattcttgctccagcccgttcgcggatccggtaaagatgtcagtccggggcggagtctcggatgcggtaagaaagtcacttcatacccagttcgctaagttgcaccatgaaataaacaatgtcaagatgttgttcatagcttttgctaagaattagtaagaattgacttcttttgttgtatggtattcatgtagtatcagtccaaaatgaataaaagagtttcgaaatgattatcgaagactaaacaaaaaaccctagcttaaaaacacatctagattttaaacatgtttttagtcccttttcacttatctcgaataccaaactggccttacacttatgtaaacctcgagattgttgaagataaattatcaaaaagatcctcctttcaactcatcattaattgtacgaacttatcaaatatctgttcaataaccagattaccagaacacatacaaatattgcacatgcactagagagacacgagacaaacataagcaaacaagaaatattttgcctcgggctttgccgagttatattgtgccgtaacaatgatttgggccttattagtccccaatatacacatcgagccacgtaacgtagcccaagatttcaacttcttaaataatcgattcataagactggcatatactatagttggatcttagatatgttagtactattgtccatgtgtcacaactggaatttaaattcttctaatatatgcggtcgaccacaagaagaggtctggttcacattatttattgtgtaattttgggggttttaaaaaaaatcagtaccaatattcttctgagaaatgtaaaatggcttggactcttgcttatgctttaatatactgattatgttcataaagattgtacaagctaagttcatttacatatagtaatagtattctgtcacatagtaatgaaccaaatgaaaaaatgactaaaaagtttataattgagacattaaaaggcagtgaaggatgtggatatatcaaaggtaactattatcaaaataattataaagatttattttcactaaaaataataaatcatataagggatgggatgccattttctgttaaaagatgagagtcgtgtatattaagataagttaaagactactgcattgagatccaatatcgataaatgagtttatctcagtcaactacttatccacaaatagttatgagtcatttatatatattattttcggtagttacaaaattttctgcaattggctgtcaacaaaacagttatctatgtgtgtctgtgtgtaacaatccgatcggatctggtctggttacgtgaatacaatttacaaatattatggatatttaaacttaagatttgaaacgaaagtgagtggaagatgcgtgttttctatatgaaacaaataaccaaaatatcaaattgaatattggtgattataatatcaactagcaagtatcaagtaatagtgcacgccagacgccagtagtactataaatatatgaaccctaactctttcctattcacaccttaattctctcaacctcaagaaaaacagcaatggcaaaacaataccaagctctctttctactcttctccgtcttctacctcttctcgtcggtgctcacgaccgccacagtcaacccggccggaactaccacaaaagcactaaactttattcaatcctcatgcaaatccacaacataccaatccctgtgcgttgaaactctctcggtttacgccaatacgatcaaaacaagccctcgacacctcttggatgcagctatcaccgtgagtctgaaccaagcgctgtccacgaagctcttcatctcacacctgaggaagagccagttccaaatccttcaggactgcgcaccatcgaccgatacgttcagtacagattgcgagtgttctgtccaagcactccaagaggtggtgaattgtaacagttggaccgactgcttgtttcacgtaaagaatgctgaagtgtgtgccatttcgggtgagagtcatagcgtcgagaacacttgctccagcccgttcgcggatccgggaaagatatcagccaggggccggatctcggatgccgtaagaaaatcacttcatacccggttctctaagttgcgccaggaaataaacaatgccaaaatgttgttcgaggcctttcctaataagcattagtaataatatatttcttttgttgtatgatgatatattcatgtagtatcagtccatcagaagatcaataaataaaaccctttcgaaacgaaaatggaagactaaaacaagaaacccctagctaataaacacatcgagatttaaaacatttttttagttatttttcacttatctcgaataccgttacaccaaactggccttacacttacgtaaacctcgagattgttaaaggtaaattatcaaaagattcgtccttttaactcagattgtgcgaccgcatcaaatatctgctcaataaccggccggaacacagacaaggattgcacatgcactagaagacaagagacaacatacgaaaacacaactttttcgttgggcttttccaagtgatattgggccgtaccaataagttgagccttagcacccaatacacccatcgagccgcgaaacgtagcccaacagtttccattttaacaacttgttgaataatcgattcttataactaggacatatactatagttggatctgttaattaatattgttgatgggtcacgatttgaccaacggaagagaaccggttcagttcacaataatattgtctatttttgggttttgtttaaattattcttggtttacttagaccatctccgatggagagatacccaacatggttctctcaattgtttatgaataaattttccattttttgagatgagaatctaagtatttctttttagtttttctgcaaagtccaatgctggtatctcttcatggaaaaaaaactaatgaaaaattaagaaccctaattcattgattgtcctccgatgcagattcgccgttcttctattggggtaaaatcgattctccgatggataacagtgattctggagatgaagaatccgacataaccaaacactcggagaaacgaaatcatgtttaaattgagtaacaaaacaaggaaatcggaatcgaattccatggaacgcgatgagaattgagaagagaaacgtcgaagaaaagagaaagataaacgtcgaataattttttaaatggcttgcactcttgcttatgtttcaaaatttaatataccggtttgttctgctcacaaaggttgtacaagttctttgacaaatagttttgtggcataattttagcagttatgtgacatatttaacacatcacgaagacatttcaacatgtaccatttttctcaatatatattctagcgtttatttatgaaaccaacctttttgattttttgtttataaggaagactttttattaattaaatggaaactcttttggtttgacaaaaaaaaaaaaaaaaatggaaactctttttgtatggatttccattgaaatgttttcccactcctttttccaacaagccgatccagtccacacattctaatcatctgaaccatacttttgacaatacaatatatatatacatagataaaggaagatgtggttctttaattccacaattaaatacataaacattaaaaagtgatatatgggccttacgcggagaaggcggtacgacggtgcttttgacccagtaatttctggatcacgttcacatgccgataattattgttaagttgtttgcatattttattatgtgccttgtttgtgggattttcgctaatttcttttctcgttttttcgttctcctcttccctcaattattttctcaacttcctattcgaccaaagcattaattctacacacgacagtaaaggacccactcaaacaataattagttttcaactctttcagaatatattttagtgacactaaaatagcatatcataaacacaacagaggccaacgactctgaatgatccgtaccgcagtggaaataacagtccggttatgtcggtaggctatataagccactactttcatttcaatttctcaactttgttgtacttagttcgtatcctatcagtttatcatcactttaatttgttaccatatagtatctgtaaaaactaattaatatttatgaatcatgctcatattttcaaatcttagagctactcaacagaacacacacacatacagtcaaaattttatactacataatttttgttttaagtttacagttataaaccaaacaaatcacctcacaaaagtatatagttataccaaaccaagcacctcataaatgaaaacaaaattaaaaataataatatatataataagaaatattcatcaatactaacgttcaattttagtaaattggcaaaaataaaatattagtatcacttccagagattacattattatttggtgaatttggcaaaaataaaatatttcgttggtggatgctttgctgggacgactttgtttattaccgtcatattgtagtaacctaattttattacctaacattcatttgaacattaaaaacattaatgtcatttgattggaagagtttattaatgaccattatttccttatttccaaacctaataaacccattatttccttatattaaattatggcttgattggtgcaatttctttctagctctttctgtttccgtcttgattcgaataaaaacgacaaatgttatctctacccgtatccgattatgtttaatatattatgcattgatatttcacgctacgatctggaccgacgtttagtgtggaccctgtcacgagttttatctatgacggaccaaaagaaaaactaattaaagcagaatatcaaagttagtcgggtaagttccaactaataaccgagccctgtttggctttgagcattagtagtaatcaaagtaaacatatgatagaaaagttattataatctattatatacagattaatatgtacgattccagattctatttatgtttctcgtatgtaaaacatataatgtgaacctacttaaactatactaagactattagtttggtttcaaattagattaattagtttaaccaaactgaacatatccctagattgtaaaagtctaatatatccactaattatttttgcttgccgacctctaatccacaactttttgtttttccatttccactgattttcaacattccaccgggtgttaccaacagtaacatacatacagtgaattttttcaacactccaccgcatgttaccaatagtagcaaaaccctcgacaaaaatttgtaccgactataaatattcaactccaactctttcctctccacacactcaaatatctctccaacactaaaataattgtaccgactctctctctctctctctccgtaacaaaaaaatcaccaatggcaaaacaatatctctttgtactcctctcaatctcctatctcttatcactggagctcacggcggccaccgcagcctcacagaccggagcttccaaaaaagccataaacttcatccaatcttcttgcaaaaccaccacataccctgccttatgtgtccactcactctccgtctacgcaaacgacatccaaacaagccctaaacgtttagctgagaccgctatagccgtgacactaagccgagcccaatccacgaagctcttcgtctcgcgtctaacacgtatgaagggtcttaagaagcgcgaggtcgaagccatcaaagattgcgtcgaggagatgaacgataccgttgaccgtttgaccaaatctgttcaagaactgaagttgtgtgggagtgccaaagatcaagaccagtttgcgtaccacatgagtaatgctcagacttggactagtgcggctttgactgacgagaacacttgctccgatgggttctcgggtcgggttatggatgggaggatcaagaactcggttcgggctagaatcatgaacgtgggacatgaaaccagcaacgctttgtccttgattaatgcctttgctaaaacttactaatttaaaactatattttgtcctgtaaaatatatatatagataaatgtaatgtcttgctaagagtttgatgtgatatatttttttcgattttggtagtttctttttgttttgtaacgtggtttataatagtataatgtgtattttgagctataaagttgtttttaagattggataaattgcccccaacaaatggtagctagtagactgatacagtcattttccttaaagggtaattgattaaagtttggactagttggcagatatgtttgacaattctctttcacaccaattttggtttccttgtcgcaagttgggcacacattttaattttctatatcaaccttttttcaaacagagaagataaagtgaagatagttgaatttagatatcactataccagtaatgaatttctacataactacttgaaaacggtgacaagaaaacagtatcatttaattcatggtgatggtctcaacttaagaaattcaatacatccttgatttcaaatttattgtccacattttcggttcaggttcatttgatgagtttgcaggaaatattttgccaaaaaaatgtgctcctttatcaagataatttggtgaaatctagatatcctgtattaaataagagaaaacgacattactgttgtgaaataaatttattttctagcctaaaaaaatatagtggatctgaattctgatattagtgttatatatattttattatatgtattcttcgtttacaccacgtgagatgtctgatgatacaactttttcaaaagtagtgtgcttcacatatctcgtaagtcgtaactgcttgggtttggtccatgatttttgttatggctttgattctctaccaatcatttatacgatcatacatacgtgatacgcttataaacacgttacacacacgttcgccatcgtctaacatatttgggataccactattcgcagaaacagcttttgggcccctaagcccattttgatatctgttttcagcattattattggctgttaaactttttttttccaagcaatagccaagagccaacatgaataaagtaataagtcatgacaatctgacagaataacattatcagtgaaaaccacgagttatacaaatctcagtgtttaatatataacatcctaaatcatataaagatgtatggaggaatcaatattatatattcaaaccaatcttcttcttttttgcgttatcacattcaacaatttttttttgtgtgtgtttagaaacgttgtactgttttcattcaaaaaaagaaagaaatgttgttttgttatgtttggatgaagttttagttttcttttcccaaatgtactttacatttttaaaatggacgaaaccataccaaatcttgtatctaaaaggatcaaactcagacgtgtgcatatgtgaattctagatgatatgccgtccaaaataaaataaaaaaattatagaatgataaaatcatttattatagactaaaaaaaaatatcccaacagtatatattggaagcatgataagagtctagctctttacattaccaactaaaatgaagaaactaacaagaaaatgagtcatgcacaacttaatttccctttcacaatacaacttgacactttacatcgacctactgcttctaatatacatgtgtatttatatcaagatatatatggatatatatggatatttgggagcagacgcaatgatttgtgccaaattggtattgaaaatgaccctagtcacatgcagctccattgagtacaaggacgataagaggcataattaaatgtttttggttcacgtccacgattcggtttccacggtcgacatcttttaatctttagtgtaagtgtgtaaccatttttgagtcataagtttttttttttaatttataaaattttgtatttatgtttacaaaattaaaaacaccattttctaacaaaatagaacactaaatttagtattgaatatattttgggtttcatatttgcgattgttagaaacatatagttcagaaataatataacattgtaaatatgacaaaaaaatatatatgtatattcatgagacaaacattcaaatcaaaaaccatcatgtgtaattaatgacagtaattgtcgtttatcgtaatcgttgttgtggatcgccattcgctatcgcaagcaagtgttaaacgaataggacccaactagccgactccattaagatatgaaagagaccaaaaatagcccactagaatgatctattaaccaattaaatagatcattctaaatgtagttaatgcttaattaatcatatgattatgttttgtcttaaaactacaaattccaaaccctacaaccagtgtcgcctccgtgttgctttcacatgttagatattttttcgtttttttcccccatttttgtgtgtgtgagaaatatcttcattatgcaaatcccattggccacttgatttttaagtgctttttaaaaaaaaaaacgtctcctttttctctatataaaccccaattacataacaatcaatactagaaaacatatcattatcacactttcataaagctcataacatacataaaaaatgggtgaatcttttagattattcaatcatcatcacttcctcacaacttttctcataatcatagccatgctcaaattggttcatacaacaacaacaacaactacaacaacaacaacaaacaccgagttcgtaaaatcatcatgcactttcacaacgtacccaagactctgtttctcttcactctcaactcatgctagtctcatccaaacaagccccaagctcatggctcatgcggctctcaacatcacattagcctcggctaaagtaacttcagcaatgatggtgcgtctctcgaatagtcggctcaagcctaaagaagtctcggccatgagagactgcgtcgaggagttaggtgacacgttggaggagcttaggaaatcgattggtgagatgtgtcagctaagtggctcgaactatgaagtttacataagcgatatacagacttgggtcagtgcggctttgacagatgtgaacacatgtactgacggatttgaaggagaagatatggacgggaaggttaaggttttggttagagggaggattttggttattgctcatttaacaagtaatgctttagctttgattaatcactttgcttctattcatggctaaagagagttatgataagtactgttagtttgttttttattgatttttctagtgattttgtgtgtataatgataatataatgtatgtgtctttatgattccagaatcaatatgtaacaaatgaagtgtttcatgaaaattgattttaaagattttccaacaaaacatttattttatttttcctacccaataaattttgcatgcatctatcattttctaactttaaaactttccaataattgttataaaaaactgattatataattgaatgtatataaagtcttccattaatgctctttaaagtttacatttgattgacctaaattaatttaataaaaaacaaagaaatatttatgcttaatttgagatttttttaaaaaacaatggataactcacgtgaagaaaagctgtctttttctaccacttttgttgagtaaatggcagaccaaacagcttacagttgttagattttacacatggaatctgtttcttttttaaggtttacatatctataagaaagaagataaatgtaattcattatactacataacatttacaagaaatttacaatatattgtaagaagaaaaaaaaaactaaagttgttgattctggttaagcattttcaacaaaccaggtttagtacaattcaacaaagatcttccagattgaaccataatagcaaacaaagcacgagcctctctcaacttcttctcttcacacaaaatataaatcaaccaagtgtggtttattgaacgaggccagatatcaagagcagccatgtctttaaccaccttaaccgcttccatggtcaatctagagtaacagagacattgaagcagcttctcataagagtctttattaggattaatcccactcttctgcatttctaacatcagagccaaagcatcaagaggtcttttaaaatcacataggcccttaagcagagtactgtacataacttgatccggctcgcaatttgttccctcaaacaaatctatagcagactcgatatcacctgcttcaatatgagatttcatcagaatagtgtaagttactagatttggaacaatgccttccttttgcatcgattcgagatggttatatgcttcgtctagccttcctgcagcgcagtatccggttataattgtgttgtggaggtataaattggggattatagactttttcactttcccaatcacttccattgcaaagctttttgatccgtagttgcctaaagaagaggggattgatactaaaggctttgtgcgaatgagacgttgaagaagcttttctttccctggctcaacaataacctgcctcttcttctttcgtgccatagctctccataaaccgctaagtagtgtaatgtaagcgatgtgatcatgtttgatatcattttcgcccattaacccgaacaatgtaaaagaaaacttgaaatctcccttcttaaggaaatgaccgatgagcgcagtatacagaactacgtttggtgataacccatcttcaagcatcttatcgagatactgacatcctttctccatcatacccatcttcacaaacccgctgatcaatacagtgtaagtaaaagagctaggtcgaagaaaatgtttgacgacttcttcaactaactcatttgcttcgtcaattcttccgtttctcgcgtaagtattgatcataatcatgtaagcaatctcatcaggttgaatcccagactcaagcatcttagcaaaagtctcttctgcttcaacaacccttccctgtttgccaagagaaccaataattgaactgtaaatagctacagtaggtctcaatccaagctcctccattgcatctataatagcaaatgcagcatctctgtcattcttcttgcataactcattcaccactatcaaataagtatcaacatccggaacaaagtctaactcttggataatattgactaaagacgccaaatcttcaatgatattttcctgaaatagacatttgatcactgaattgtatgaaaagggtaagggtgtgcatcccagattgaccattttttctatacgagataaagctgcgatataatttctttgcgaacacaacgcagttgtgacaacagcaagtcccacagcagctaggttcgcatcttttctagcaatctccccaagcaaagactcaacctttacctcaatatttccaagatcatcaataactggtggattaatcccacatccgttatctaaaattgattgtaagatcaccatagcatacttaagctcgtggcattttgggagcatcttcaagagaacaaagtaagtaatatggtctgggacaattccattgtctaacatcctcattaacaagtcaacagctttatccattcctcccttcttgtaaaacccgaatataagatttgtataacaatgcacgttgcgggatatatcttcactccctgtgttgttcacgaaaagcctcaaagcataatctacattcccttccttgcagtagcttccgatcattatatggtaagtgaaaacattcgactgcacacccttttttatcatttgactaaacattacccttcctttatcaagcatacccaacttcatgaacccatgaatcaaagtgttaaaaatacaaggatcaagctcaaaacttctctcgaccatccgcaagtaaagccgcattgccatcgtcatattattgtccttacaatattctttcatcaaacaagtgtacatgaccttatccacatagtaaccatcaacttccatatgatcaaacagagcctctgcttcagcagcacatcctcttttacaaaaacagtaaaagagagacttatacagattaactggcagaggcattcttgtcatcccacatagagtatctaacatcccaattgcttcattcaagtgaccgtgaccgcacaatcccttaaacaatctcttacaacaccaaagccataaaccactgcctctctctttgacttgttcaaagcaatgaaacgcctcgagaaaccgatcttgattacaaagctcatcaactactaagctagaggagtttctactaggagcataaccagaagctataattctatctaaatgtgctctagcttcatcaaatctccttaacttaaccaaacaaaaaaccattgaatctaaaaccgacgaatcaggaacaataccgtttccgataacacgttgattgtagaaagtttcggccactccaggctgacccatctccgtaagcttccttatcaatgcaccgtagcaagacgaatcaagttctattccattatcgactgcaaaatcagcaactaaagctgcctctgaaatagaagaagaaccatcaataacacggcgaatcacttcccgagcagagtctaagagacctctccgaccaagtttgactatcaacgacaaacatcgagaccggtggtcaccagaagcggcggagaagacggcggcggaagtggagggaaatagttccgaagaaagagcacaagttgtagcttttctggatttgaagaagcgataacataaagctttcgcctttaacattatctaaaaccccgaatctctcagggcttctcaattaaaagcctctccaggtttttcgatttcacgagttccccagttgcagaatctaaacaaagcattgtactttactacagatactaaagaaaagtagagattttgaagataaattaacgccgacgaagagtagcaaagcgcggtttttgaaacaacatcctccgcaaatgcctaaaaccctcgtcgtcgtctttttcaattcgtgtttggtttaagattgtgaaccggtcgaatcaaaattatgaatctaaaccagacatttatcgacgcaaatcgaaccgaaatgttaaatgtttaaaatgagcccaagcgaagataattcaatacggcccaactacaatatatgttcaaatattctttagttttttctctcttaattctgaaaataaacaaatggtacaagatgtaaaaaaaaaaattgtattaagttgataaaaagataataagatagatcacatataaaatgtcataataaaattatataatcattctcttgtcctttgtttgttctaatttcgtagtcatatgattaagagctataattctcattattatttaactatatgaggtgactctaaaacaaaattaaagaaaaggattataagagaatgaaggatttatccctaataatttagcattaggtgggattgggaacgttgacaatttgtggaggaaacgtattcacaaagtgcaaatatattaagcactaaaaaggcatgattatttattggtaattatttacacttgagcttatttttaataatcaaattagttacgactcttgtgcagttgtgcacgggtgattttgatttctttcattttttgtttctacgttctcttgtactttaagacagaaactttgattggtttgaaagttacaaataaaacaagaacatatatcaccgttacaaaaatgctattttatgcatgtcaataatatgatttttgaagaaatatcagtaagttatatcatgccaacattgcattacaaaaaaaggataatcaatacactagaataaaaggtcaatcattcctaatctaacatacttgaagatctaaattttttaatataatattatgaattgctttaataagacaaaactaaactccgaaaaagtcttgttatctatttacaaatcgtacgttttgcatacaaatgattataatgttccctatgatttgtatttttttttgtcgtcatatccttataggctcatataaccatgaatacatcttggtggaggaatgatccccgcaagtccacaatcaaccaatcatttttcatgaaattaatcaaaatttacacctcctcctctttttcatcttcttcttatgattttctttccgatatatagttttaatattctttgccatgccacaaactaaacttccaagactaatcataaccaataatttcaatctaatatatagcagcaaatacaaattctcatcaccatacatacatacatgtgtcatgtgtccaatgaaatatggattggttgtaatatagagataggtaaattaatacacacactcacgcacgagcttcacgtgtagcccattactttggctccccaagggaatgataacgggtccctcaaggcccactcattagaccggaaagatcggtggttcgttggcaacggctgacttgacagtggctggaccacgccgggctcacgagtccaatcatataatttgtagtgggaccagccttaacggcttcagtcacaagatgaaatttgtgttaggatcaaaccagccaaaccggttgttcttcaagttcggtctgggcaaagaaaacatgtgatatgatggttttgataactgtcactctctcagttccctaagcctatcaatgtactcaaaacagtcggtttgtggaacccatcatccaatgagatgaatcaaacaaaataagatgaaatttttggttttgaaatttaagaagtggcattctcaaaactctatctaaacgtagatgatagaaataatttaaatacgtaccaccacttatgatgaaatgagacatccagctctttctagtacgtacatactactcacgaaaatagatgcgtgcaatatataaatctttatagaccataataaaataatatagaaattgcaggtataatcatagtgtttgcaagtggagaattggagatagaagcgtactgcttaagaaccatctttttattttgttttcatattaatagcaatatcatagagacactgaaatcagagaaaagagaaagagactctgccgtcaaagatataaaataagaggcctagcaatctagcattaggtcataatattttgctatggaatctagtgatccatatgatcactaattaatttctctgattttgtttaagaagaaatttatacatacaaacaacatgaaaacaaaatcttaaaattctagttagatcgataaattttcatagaataaaaacacaactaatctcttatagattaaagtgaatttgatgtgaccacaacaattaatcgaatgaagaaaaacacgaaaatatcaaagattattttgattgaacttgcggattaagtttttgttgaataaaatggcaatgtggaccatgtggtatgagtagtacataaaatttagaaactcaaatcgggcttaaatactcctatatgtgatttcgttagaattgacctaaaagattcgattatctaaagaagtaattaaatattaattatgtttgtctaagttataaactggtatcaccttcacctatatatgaaaatcaaacttccagagtagctgcattttattcgagagtttattatagtatctctgtaattctatattagaatggtatgtaatatgaacaaaattaaaaatggaaccaaatggagaatttgtatgtaagtttggtgggggcaacaggaattgaaatggggccagcaccgaaggcgataaggagcttttttgccgcgatgatgttccctgtgttattacgtaaccactcatctcacgccacgttattttattactgtttttttaaaacaattatttactctgtagttcacttcttttttcctttacgatgttgttatgggttatccattaaaaaaaaaaatatttgtaaatcgtctatttaaggaaaataaaataaaacacttcatatcatgttatgtagtaccaaattaacaaagtattaacttcaaattaattcgccaaaaagatgttatgatgtgatgcattctttaatatagattaaactattggtgatttgtttttctatagttaatcactagcaagaacatttttcttttatgtttacagtttttagattataaaaaaatggtgtaataagaacatgtcaaatcaaatgtatttaatttgttaatatagatttgtgtataaacaattggtagttttgataattcaatttttcagcaatcatcataataatactttacaagaaaagctaaatcatctgaaaattttatatgaatacgtacggtttaattcccaatctacaacttttttagttggatttattataaccgtttttctaaaacaaaacacattaaaatttataagtgaagatccaatgggttcaaaccttttaattctcaataaatatacatagattctcgaagatatcctatcaacttgtaaaagttgtttaatcaatcttttgtttgatgaaatcttgttcaactgttgatttggttaagttttatagctgaaatgtgtataagtgtttctgaacctttttaattactgctaaatcaatttatgtcttacaaacttgccgatgtatcatgtatgttcattaggggtgtcaaaatgagccagctcgctcagctcagctcatgatgaacttaaatcttttatgagccagctcagctcaactcatttattatatgagcttcaaaatacaaactcggactcagatcatctagatcacgagctaaatgaggtagttcgcgagctaatgcaaataaatgaaaaaatttaaattttctaaaatttttatgtaaattatatatttttaaaaatatatttctatttttatagattatataaatatttatgttttgattgttgactttttgtgtttattactaatatttattttcagaaattattatgtaacttatatattttctaaaatatatttctattatttatagaaaaatatatatatactttgattgttagttttttgtatatattacttcaaaaaagccaaactcatgagctagctcatgttcattaaagctcgctcatataactcgtgagctaaataaagttcgatcactaaactcatttattaaatgatcctaaaaaatagaattcgcgctcatgaataactgagtcgagttgagccagctcatgagctatcagctcattttgacaccattaatgttcatataataatcgtaatccatcatgaccaattaggcaattaagacatactataacaaaacatttttttttttttcgtcaaacattgttttgttaaaggtttcaaaaagaacatgcgtatcaatttcaccaaacgaatctaataaatagcacgaccatcggatattatattgctatttgacgatcaacgtacgttcgattaaaaaaagtacggggattgtttagtttaatccaagtgtagtgttatttagacttcgagtaacatcaacgcgggagaagaaacgcatgggatgaatgtgtaaagtggttaactttcaacaatgtttcttaattgctaagatgtttaaaacgagtttacatgaattcttgtgttacttatcgaattatcttttatgagataattagtacactaccttattagggctccatttctttttctatctaggcctaggtcgatcagtactgtgtatgttacacatatgatattaaaaaaaaaattgattctataataatcttcataactaaaggcaagtatagtttatttgaaaacgtctcattcaatagttggtagagatagttctaaaagatcacattacttctctatcacacagagtgtagaaaagtgaaaacttatgcaacacttcaggtagaaagagaaaagacagtgatagcttagttataattaaagacccccaaaatccaaatagaatcttctcttaaataaactattgaaaaaatattcacaaaaaaataaaaagcacatttccttttgcttgcatcacgagagcttttgtctctctttacatttatgtgcctatatataagcctagagaatccaccatcatcggagtactcgttgtctttcatgatctcaacataaacaagacaaaacgcttttgtctcttgtctatctaaattaaatctacgaggaaacgaagagaagcaacaaaattcgatattttagaagtcttgcataaataagaagaaggtttcaagtaagtttctttcagtacatagagaaaccatgtatatgatttatgattgtcaagatgttacacagtcgtatatataattataagtatttcataaaagtaatttatgaaaccatgcacataactaacttttgtttttgattttgtaaattgagtagtttttgtttttattatcatttttatgtgtttatagttggttcagccgagatattatgagtaaccaaacgtaacctttttcataatgaaacggatcaaatatactttaatctttttcctacatatgcttagttacttgaaaacttgatttcacattacttctatgcatatcttttctatgtaccgcgcgatgataaagtatgtgttacaaattgccacattgcagaaaatataaaattaaaaagatcaaatggaaagtctcgcacacattcctcccggttatcgattccatccgaccgatgaagaactcgttgactattatctcaagaacaaagttgcattcccgggaatgcaagttgatgttatcaaagatgttgatctctacaaaatcgagccatgggacatccaaggtatgtatgcattaccaacattcattatgatttcatcagttatatcatatactactaatactaataaaaactcaaattcttctcattcaaaatcactgctgaaaatgttaccttttgggaacatatagagttatgtggaagagggacaggagaagagagggaatggtatttctttagccacaaggacaagaaatatccaactgggacacgaaccaatagagcaacgggctccggattttggaaagcaacgggtcgagacaaggccatttactcaaagcaagagcttgttgggatgaggaagactcttgtcttttacaaaggtagggccccaaatggtcagaaatctgattggataatgcacgaataccgtcttgagaccgatgaaaatggaccgcctcatgaggaaggatgggtggtttgtcgcgctttcaagaagaagctaaccacgatgaactacaacaatccaagaacaatgatgggatcatcatcaggccaagaatctaactggttcacgcagcaaatggatgtggggaatggtaattactatcatcttcctgatctagagagtccgagaatgtttcaaggctcatcatcatcatcactatcatcattacatcagaatgatcaagacccttatggtgtcgtactcagcactattaacgcaaccccaactacaataatgcaacgagatgatggtcatgtgattaccaatgatgatgatcatatgatcatgatgaacacaagtactggtgatcatcatcaatcaggattactagtcaatgatgatcataatgatcaagtaatggattggcaaacgcttgacaagtttgttgcttctcagctaatcatgagccaagaagaggaagaagttaacaaagatccatcagataattcttcgaatgaaacatttcatcatctctctgaagagcaagctgcaacaatggtttcgatgaatgcttcttcctcttcttctccatgttccttctactcttgggctcaaaatacacacacgtaagatcaatcctcaaaacgtgtgtgtaaatccacacggctatatataattaattcatgtggctcatgcttattgattacaaatcatatacatatgtcttaacgattactgattataattttatacgaaatttgtttatttattatgatgtaactttatagttttatgagatatatataaatacaaactttataatcaatttctaattcatgatggagtagaaataagcaaaaccaaaaacataagcaatttgacaaaacagagtctacaagtttgggaacacaaagggattacataacctgacaaacagaaacagactaagaagagacaagatttgagagatgagactgatgcgagcgagacaccaatctcttcttcaagccactctcattattaattttgtctgcataattagaaacattcagaacactaatcaaactaaagaggctgatcagttcttcccagtcacaaacaacaacaaaaacagcccctgagtcacaaacacacagtgctccattccatcattcttcttccgtttcaagcatctgcacaatctgagtcactccctctgcgatttctttgcggatcaaactgtctggcatatcaaatgttcttcttctcatcgacaatgatttcccctgcggttgcgggtctaccacatctaacattgcttccagctcatccaccattgatctcttcgctcctcgaaccatcacatcaactccctgataccaaacaaacacaatctccataattcttatcacttaataccttaaaaaccttttagcttaatcttattctaaatgtgatatgatgatttgcaaaagcaaaggcattcccatttgaagagcaaatagagactatagaaccataaatccactgaattaaaaaaaccaagagaaatacctctatggcgtcaacagtgaggaggagtacaatgatcttctctgagaatttctgacgctcctctccatcacgagcaatcaggcgacggtagctgaagttgtggaaagaagctcttagctccttaagtttagtctttgcaatagcaagatcacgaagagcacgcaatgattttgagcgacgaatcaaataagctttgaaggccctctggatcatcacagccgcatattcaggtggcatttccttgttcttccccttcttggtcctaactgctccattccttctggaaaacgcctttataaccacacaaccatatagtaagtacaacaagctttagttaaagatgacatccaaataaatatctgattaagtctatgtctataacttaataatcactctgttttgctaacctaaataccaccactcaaacacataaaggttccaacttttgaagaaaccatgcctatcgctatcaaaatcaaactcactactctcaaacaacttcatgacagtgacactaaagcagagcaaacaaaacaacagtcaattcaaatggtgaatgataccttcctaagaacgatagcaccatgttctgacgactcatcatcttcttcttcctcctcctcaatcaccacaacacgagttttctccttcttcttgctcttagtctctatcttctctttcttctccttctcctcatgtttcttctttttctctcctccagtagtagccttgatgatataagtatgcgaaacctcaccattctctctctcactcttcacctccgtcgtccaattataactcttcttcttattcttattcttcttcttctccgcttcagcagcagcaatagctttagctttcgccttctccttcttcaaagcagctaactttaacccttcctcatccttcttccctcctttaatctccgtcgtccatctatacttcctctctcccgaaccttcaatctcagcttccaacttatacttcctctccaacggtccttgaatctccgcctcccatttatacttcctctcaccacttccctttatctccttcgtcaatgtatacttcctatcactcttaggactaaccaatctatcaaactttgattccaaatcagaaacacggtcacaaagatacttcaatggatactccggctctaatctccgacgaatcaccttgtacttgcaagacgacggagatttcttaatcttaaccagatccgtcacggtttcgaatagatcgagaggattaggtgatgaaaactcgaagagatcttcaatgtcttcgtcgatgaaggaaggaaaccctaggaacaatgatgaaggttcaacaatggaggtttcacggacgatgagtggtgtacacgtgtacggatcgatgagatcgagtctatggaacaaagtcatggttttgttttagagtgtttttgactcggaagctcgtgaactctgcgaatccggtcacgagtaaggtgtattaataaaagctcttttggattggtagtgataatggctttacgaataaatgagctttatttagaatttgatccaaaaatttgatatcagatttaagacagaagatggagaagacgacaaattcttgagtttaacgatgttgagattgaacaaaagagcaagaatggtcaaaaacggtgggccttgagggtaagtttgacatttacgatggggattatccggtttggccatttccatgccatttcaaatataaactaataaaagtttactaaagcttattgtattagcaattaaatattactagtgaatagtattttcattactggcgagataagttggtttgaaaatttctttattcgacgtataaattggttttatctatgataaccagcccggttcgatgaacagatgaggcggatattgaagataaccgtgtgtttagtggggaaatgacgaatttgaccttgaagcgtgtgaggtattacgtcgacaagagaatctttcggtgggattacaaccgggtaaaagatggcacgtggggcctggttactcccacgtgagccacaccaaacaaatcttacgttattttgaatgtgttttatcacgaagacaaaaaatgccaagagaatcgaaacaaacaaaaaaaacataaatagaaagcaaagatctattgaaaattacatcagaatcattgtaaaacattaatagaaagccaaaacctattgaaaattacatcataatcattgtaatttaacattcacatgatcccatcataatcaaaacaaagtaggttcaatgaaaacaacgaaaatttgtcaccaaagttaagtaggagtgagaaaaatggtttcctcgttcatttgattacaaagataaccatagaaacttaccatactcgtaacaaaaccaactataccaaaactaaccaaacccctaaaccgcttcttcttcatcttctcggttcttctcatcgccaacttctcttctaatgaattcgcatcttgatattctgcatgtaacgattcaaccaacgagcgaaccaaagtggtctcatctacaccaccaccactttccaaactctgcaagtccagttggttgattggaccggtcttttccttgaaagcctcttcaagttcggttaacctcttagccatgaaacgaagtttcaacatctcttcttcgtcttcatcgtccttaaccgacgatatctccgcacataaaagggtttgcgtgaaaacaaaccgggttccgaattcccggtatgcgttaagatcaccattgccagaaccgaattcttgtaggtaatactcaagttcttcgagtttcttccccaagattgtgtttgctttcgccttcgtcgtcttcatccttttcttaaacaattatttctcccattttcgaaaggttttaaactcttaaaaataacttctcgtagtcgatcggatggcgacggttaatgtgaagctacacgtatcataaatataactgtccaaggccaaggttacgtggcctatagaaattagatcctatagttttgctccctcgacgatatcgatatccgttgtgtggatctgcgccatgcatgtcgaacatgatatatgtgcattaacaaacatagcaccattcattagtcatattcaaacaaggaatgaaccattaatttgtgggtgtgaagcagagtgggatatcgttgttaacatatgaagtatacatgtataaaattgtacagaatgtatttgataccatcaaaccttctgaatggtgtggaaggtttcagaactgttcccaaagttcactttcccgctccttgtgttcccaaatcgaaatgcccttgttttcaaaatcccaaatcgactcctaattatcttcaactaaaaaaccaaaattgacttcagattcgccttcttcttctcttgcaacgtttcaatttcatgtgccttcgaccttagattccaattttgaattcgaatttctggggtttcgattgagctcttctcgcttttttctagggttttgtcgcatatgctgcgagtgtgagtggaaatttgggggaagaagaagaaggaagatgcatataaaggagatatgcttggagggttttaaatcatacgcgacgaggacggtggtttctggtttcgatccacatttcaacgcgataacgggtctgaatggttcgggaaaatccaacatcctcgattccatctgtttcgttctgggtatcaccaatcttcagcaagttcgagctgctaatcttcaggaactcgtctataagcaaggccaagctgggattactaaggcgactgtctcggttacctttgacaattccgagagacacagaagccctctcggctacgaagaacatccagagattactgtgactagacaagtatgttctttgtttctcttttgttgtactcatcaattcatgtgcttgacaaaatttgagactttaacttggaattgtgtatcttttggtgttaaaaagattgtagttggtggaaggaacaagtatttgataaatgggaagctagcacaaccaagtcaagttcagaatctatttcactcggtgcagcttaatgtcaacaatccacactttctcatcatgcaagggcgtatcaccaaagttttgaatatgaagcctccggagatattgtccatgcttgaagaagctgctggaacaaggatgtatgaaaacaagaaagaggctgcattgaaaacgcttgaaaaaaagcagaccaaggttgatgagattaataagcttcttgatcatgaaatattgccggctctcgagaagttgaggaaagaaaaatcacagtacatgcagtgggctaatggtaacgcggagctagatcgactaaggagattctgtattgcctttgaatatgttcaagcggagaagattagagacaatgctgttcttggagttggagaaatgaaggcgaagctcgggaagattgacgcggaaacagaaaagacacaggaagaaatacaggaatttgagaaacagataaaagctctgactcaggcaaaggaagccagtatggggggagaagtaaaaactctgtcagaaaaagtggattcactggctcaagaaatgacacgtgagtcatctaaacttaataacaaggaggacacccttctgggagaaaaagagaatgttgaaaaggttagagactgaagaaaattatttctgttgccagaatgttatagattctcagctatttctggcgtaaataacttcctacttggtgttgacagattgttcacagtatagaagatttaaagaaatccgtaaaggagagagccgctgctgtgaagaagtctgaggaaggagcggcagacctaaaacaaagattccaggaactctccaccacattggaagagtgtgaaaaggaacaccaggtagtaccactaaaaaagtatctctattccatgccaaataatatccattcgttttatgttaattggctttatgtcctttgattattagggcgtactagctggtaagagtagtggagatgaagagaaatgcttagaagatcaactacgggatgcaaagattgctgttggaacagctggaacagagttgaaacagctaaaaaccaaaatagaacactgtgaaaaggagctaaaggagagaaagtctcagttaatgtcaaaacttgaagaagccattgaagtggagaatgaacttggagctaggaaaaatgatgtggaacatgtaaaaaaggcacttgaatctattccttataacgagggtcaaatggaagctttggagaaggttagcatggtcactttagttgattttgtctttttctacagaaagtatacttctctgactgaaatatatatttaggaccgtggagccgaacttgaagttgtgcagaggctggaagataaagtgcgtggcttatcagctcaattagcaaattttcagtttacatacagcgatcctgtgaggaactttgaccgatctaaggtgaaaggtgtggtcgcaaaactaataaaagtaaaagataggtcctcaatgacagcgttggaggtagactggatatcttatcatttcacaataaacactgttgggatttcaattgcctgaagtcactttgcttcttgtttccaggttactgctggtggcaagttgtatgatgttgttgtagactcagaagatactggaaaacagctccttcaaaacggtgctcttaggagaagagttacaattatacctctgaacaaaatccaatcttacgttgttcagcctagagtgcagcaagcgactgctagattggtatgtggatcttttgtttggtccatttagatttaatctctttgttttcattttcattgctaattttttattatatattttcaggttggaaaggataatgcagaactggcactttccttagtcggttatagtgatgaattaaaggtacacgcctgcacagagtaacatgaatctgatatataatcctctatttttcaagttttcaagaatacataataaatttcaagttcaagctcatatttgtgtgaatcatggtattttgcagaatgccatggaatatgtttttggctccacttttgtttgcaaaactactgatgtagcaaaggaagtaagtatttcctaagcatttagtattatatgtgggcagggccttcagtttttctttcttgtgagatgatgtcagcttatatataaatctttacgtggaatatgtggtgtgtacatttttttaattgcctaagcttgtttttagtaactcttgacggataatctattctaaagtttatcacttttgttggggttataacttataagtgcaacatataccttgagtttattcccactgtcttagctactatttgatagttttgatttattgcttttgcctctagagttcagtctttgatgtgcccctcattgcttcttctgcaggttgcttttaatcgggatattcggactccaagtgtcacacttgaaggtgacattttccagccaagtggtcttcttactggtgggagtcgcaagtatgtctttctttcttggacgcttatatctctagtgagagtcatctccttataaaagtattttggtcttttttttttcctttgccttaggggtggaggtgatcgccttaggaaacttcatgacctggcagaagctgaatcagaattacaaggacaccaaaaaaggttggctgacgttgaatcacaggtaaacccctattcttccgtgataagtctaaatacaacttggaattgaacaggtgctagccatattttgaaattactaagaaaatgataaggcagtagcttagtaatggtctctgattgctctctctagactcctcatgtcacacagttataaagtactttcagtattttaaacgtaaactgctgatttatcttgacatgacagatcaaagagcttcagcctcttcaaatgaaattcacagatgtttatgcacagttggagctgaagacgtatgacttgtccttatttttgaagagggctgaacaaaatgagcatcacaaggttatatctccatcttctatctatatctttcaagctaaattatctgcgtcgttggtttttttgtggtacttgaatcacatacatttatactttccatcacctgttgtatacacagcttggcgaagctgtaaaaaaacttgaagaagagcttgaagaagcgaaatcccaaatcaaagagaaggaacttgcttataaaaattgttttgatgctgtttccaaactagagaattccatcaaagaccatgacaaaaacagagaaggaagacttaaggacttggaaaaaaatattaaaaccatcaaagctcaaatgcaggcagcttccaaagatttaaaggtattttatattttttggtcagttacttccatgccattgaacttcttgaatccatttttcttttccttatcctgggttatccagttttatcatggaagcattgccttcttttgaatttgctgtaacgttgtctctggttcgtcatgcgcatagagtcatgaaaatgaaaaagag

SEQ ID NO: 947 - DNA, 69927 bp, Arabidopsis thaliana
aagcttgtgatggaggaagaagcaatgaagcaagaacaatcgtccttggagagccacttaacttcattggaaacccaaatcagcactctgacttcggaagtagacgagcagcgagccaaggtgctgtagttttgctactcttggtgaagtttgttgaaaataaagaaatatatcatgttaatatatgattcccctgcaggttgatgccttacagaagattcatgatgagtctcttgccgagctcaagttgatacatgcaaagatgaaggaatgtgatacacagataagtggttttgtcactgaccaggaaaagtgtctgcagaagcttagtgacatgaagcttgagagaaagaaattggaaaatgaggtactttctgtttctgttctattcctgtttctaggttttgcaaagctacaagccatgcttgtttcttcctcactaccaatctgatttatgctgttcttgcacttcgtataaaaatctttcgtattcactaatcttgcctattaagagtttctgccttggatttctttaaaattttgaaagttcagtaattgcgttaaagttcaaacgtctcaatgggtaacatacagctgttggggatggtgagtgaattagtaattgcatagaaaattaagactttcttgtaacgtgattttgatataaaattggaaaagttcagtagtttctgaaatttctgcatgtcaaggaatatacttttcgtgacaactgtctcttccaatttatttataggtcgtaaggatggaaacggatcacaaggactgttccgtgaaagtagacaaacttgttgagaagcatacatggatagcatctgaaaagcaactttttgggaaaggagggacagattatgattttgaatcttgtgatccgtatgtggccagagaaaaacttgaaaagctccaatcagatcaatcagggtatgtgtatgagaattaacgttttatctttatgaaacctatattatattgtcgtcacatcattgaagtgaaatatcaatatgacatgcattcttcttcttttcctggttatttatttccctcatgaagcttggaaaaaagagtgaacaagaaggttatggctatgtttgagaaagcagaagatgaatacaatgctctgatatcgaaaaaaaatactatcgaggttagttacagaggacagagggcctttgcaatgtatttcaatagcttcgtgtgccatcataacacaattttttcggtttttttcctagaatgacaaatcaaaaatcacgaaagtgatcgaggagcttgatgagaagaaaaaagaaaccctgaaagttacttgggttaaagttaaccagtgagtgtctttctaatctccaacaaagagtttgtctttgctcttaggctcatgatctcattcctcaatgtctgaaaagataatatgatattagcctttgttaaatccttcttttttattagggatttcggatcaatcttttcaactctactacctggcaccatggcaaaactagaacctcctgaagacggtaacttccttgatggtcttgaggtgcgtgttgcctttggaaaagtctggaagcagtctttatcagaactcagtggagggcaaagatctcttcttgcgctatcactaatattggcattgcttctcttcaaaccggctcctctttatatattagatgaggtacatctctgcttttcaatttcagatttctcagtttccaattgatatttcaaattatcatagaagatctatagggttggtttatgtttccgatgtggaacactgattttgcattacaatcagcgagtgaagagagaaaatactcatgattttgaattatacaggttgatgcagctcttgatctcagtcacacacagaacataggaagaatgataagagctcatttccctcactcgcaggtctaaatctctatttcaagccttactaatatactcttctatgtatttacttaatccaattttggtctctaaacattttctgctttttaaactcgatgcttaaacagtttatcgtggtttcgctgaaagaaggaatgttcaacaatgccaatgttcttttccggacaaagttcgttgatggagtttcaacagtccaaaggacagtaacaaagcagaccaagtgatatgcttatacgtcattagatcaatccaatcagtattcagattttgcaattccatttggccgtttccgtctaacattttctttgtattgaaaatcaagatctttgtgtagaatatgactgagttgtacaaccactttatgcaatgtaatgcacttgaaatcttgaatttctttgcaatatatggtcctgattatagaactagagacagcaatcagacactgcgatcacacttgaagctacatagcaacagatcatgtttcagagataccaagaagtcatttcatcatttgtatatagttcataataaaactatacttcatacataaaactatacttcatacggtatcatttgttcaaaatgatgaaataccaagaaatcataaaattgtttcaaatgatgaataataaaactatagttcatacagattattttttgggatccaaacgttcaaaccaagacgcaaattaaaacgctttatttcttaaaagttttgtttacggatttcgtttcgatattattcaaaaaaaaagttatcttgtaaaagtttgtttacgatttcgtcaatgatctaccaatagagtgtttgcatgcgctactaacacaaaattaggctaaaaaaaagtcaacaatatgcagtgatgccaagcataaattttctgatgagatgcaacaataacttgcggagaatgtacaattaattagttttcaacatacattagtttagtagtattgaagagaactacatattaaaaaccacagtttttttatgtaaaaagattcggaatataaactatcacaatgcattttgtcatgctgatatttatgtttcaaccgccacaaatttaataacgaccaacagaaagatacatttgatctaatttgtttcagtttattttttaagaaaatttctagcatgaatcacgaaaaggttgatagacgatattttatcatattggttggagaagaaatgttttataaagaacttagaaaacagagaaacattttggttatcgaatatataaaatgtgagaggtcaaaatatagatgaaaagaactattaaattaaagtaggagtatgtggtagttgacatttaattctagtttacaaagcaaagattaataactaataggactgcaaattcccaacattgactaagaaaacaaaaaaatcacatggaaaaagatttgtgaaatctttaggcggtgcactagaaaagcaggaacatgactgtcttctgttgtaaaatactacgtgaaccaccattacatttaattttatttaagttttatccatcaagagattagacaattaatttaattgtcaacgcttaattcatttgtaatttggttagtaagccaacggtcgattccatgcaatcgcatttgatttgacttccactctctttgaaattttctattcaaataaaatcattgacaagtaatcgtatgtcaaaccgccctttctaacatcttatactatatattcacaactatactttaatcctacgaaacgcctcttcgagtgtgaatgtgattctaataatatactactcatactaaaaaaaattaataatctattcctgctgattcttaatatcatgtatatctttgaaaaagaaaacagtggttagataatccttttgcagattagttgatatgttagtgtcgagctcttttaactactactatataattcgataattattaactcttatcaacgccttaaatagtgaaaataatttgaatttcgcacatgttcgagattggtgtgagacctagtccaatatttaccggtttcaataaaatagaagacaacatgcatgatattttgtccataatgaatcttgtgacacgataaaggtcaagtttaaactcttgagctattagttgtcatttattacggaaaataatgctagatcattacttcaataaaaagttaaatgagtaaagattaaacagttgacaaacaagtaattagcttgtacgtacaattccagtggaatatatgatcaagttgcaaaataaaaatgtaatagcaaccatattttggaaacactcaaaacactaatgaggaaaatttattgagatcagaagatatcatcttgaggtttgagagattaggatttgggtaggctaagaaaatcccacaagacatggaaaactctcgtgcttcgatacctccacagtcctagccttattatatttcaaaaacttctaaaaacattaactatcataatattccataaataggtcatatataattctacatataataattgttgtcacaacgaaaaaaaagtcaagctcgttgaccttttagtggcctatataaacatgtcatagacgcaacagagagtggacagaaaaatcataaagagaaaagaaagagatagaaagatgaggagtgacgtggcacgtctcaggtgtggggagacgattccattgcttggaatgggaacttattgtcctcaaaaagatcgagagagcaccatatcagccgtccatcaagctattaaggttcataattttcatgtacttactttgattataacaaacaacttaatcaaaccattcccatagtcttataagatctttcattggaatggaagcagatagggtacagacattttgacacagcaaagatatatggatcagaagaagctcttggaactgcattgggacaagctatctcctatgggactgtccaaagagatgatctttttgtcacttcaaagttatggtctagtgatcaccatgaccctatctctgccctcatacaaactctcaagtaagacacacaaacactcacttacgatacaaagatcaagggatatcaatctcatgatcacattgtttatgacttataggacaatgggtctagactatcttgacaactacttggtgcattggccaataaagctaaagccgggagttagtgagcctataccaaaggaagatgagtttgagaaagatttgggaattgaagaaacttggcaaggcatggagagatgcttggagatgggtttgtgcagatctattggtgttagcaacttctcttctaagaagatctttgatctccttgatttcgcttctgtctctccatcggtgaatcaggtttggattcaacattacacccaagatttcttgttggagaaattcaagaaactaaatattttcatatatgcatgtataggtggaaatgcatccattgtggagacaaagaaagctaaggaaagtgtgtgaagagaacaatatccatgtaagtggatactccccacttggtgggccagggaattgttggggatcaacggctgtgattgaacatcctatcatcaaatccattgctctcaagcataatgccactcctgctcaggtaactccacaatttaaggtccttcctcttttgttgattaagagacttcattgacttatggctattaatgaaggtggctctaagatggggaatgtcaaaaggagcaagtgtgatcgtcaagagttttaatggagcaagaatgatagagaacaagagagccttagagattaaattggatgatcaagacttgtcactcattgaccatttggaggaatggaagatcatgagaggagacttccttgttaatcaaaccacaagcccttacaaatccatccaacaactttgggataatgagatttaatttattaggggttcacatcattcacttcaaaatgtaattttatcttctcattctctttgcttatgatctttttcacattcgggtatataaagtcattacgacatgaatggaccacatgatcaaaaccattgccgccggcaagattgttatccatcgtaacaaaaacaattctgattaggtattcggtaccggctcaacttggtctaattagctttactattcttgattatgtataattgatccggttatgctaaaccaaaatctgatattatatgggctaccgtgtggattaaaaatccgattgggggaactcgtgcaaagcccaattaaagagaggcggtttgttttgtttttaacttttaactcgttccaaagtcccacatcgctaacaacataagagttgaagacaagaggagtagtataaataacgagaccacttcacagatcaattcatacctttctcggccttttggctaagattaagtgtagtatctgttcttatcagtttaatatctgatatgtgggtcatcgactcacacgatattaactctattttttaagggggaaagcccattaagatagcttgctatctggactttcacgagtcgcctatgcgttgcactactgcacaggcttggctcatcccgccaacaaatcagttaaattattaacattgcgaatctacatttatgttaataaattatttgcactaatgggctttgggccctaaataacagtatgtaactggtggatgagctaatcggtttaagcagtaaatctcggttctatcgacggaagtaccggtaggaaacctcatagttgatgcacatggtttggaatcttttttggatcgaattcacttgaagatgagcattaggctatgaacctcagtaaagtctgcttcctttgaacttgagctgccttcatgaaagctaatcgaaagtgatcaactgaccatgactttgtgtatatgggtatgagtagtaagtttgagctggaagcttttaacatctgttttgaaagaattaaacccaaacatatatattcaaagaaacagaatcaactttaatatggatatgaagattcatatatacctctacgtatagcaatccaaaaaagttaactcgttagaccttcttctcctctgttgcagtctttttcttgtgtgcatatgaatgtaaattgatgcccataaattttcacctttttaacacacaaaattatgcacagagctttcaaatagttctttttgtttttttggtaaaatagttataaactcttttgaaatttctatgttgatataaatccacggctcaatggtaatatgaaagtggctttaatttctttgcactttgattcatcctctggaaaaaatatgaaaatagtggctctaatttttttttaagaatgaattacttaatgaatggccaaaagtcaaaaacacaaaacattgtctcttttctctgtttttacacggtggataccggtcatctataaaggcgaagtagacggattacttacacgtgtcatactcgtggaggatgccattcgtgtggaagtctactcacccaaagttttccttttaattaactttctgatcaaaaaataaaaagtggacttgaacctttttcagcttatttgtctacttttcttccattttcatgtcacttttttctaatgtgtgatcgaaagtctctttttttttactaaatcaaaaccttctttaatatttattatgtgctttgtgttgaaccttttttttgcaataatacatgagataataaaatttacagaaattgtttgaagacacaaattcaataacattcaatgacatcaagacacaaattcaatgacataaaaaaaaaaaagatatctgaataaccaagaaaaatggttgaacgtggttacaaagctgtttgattcaaatcgactctagtgatcgacgttaaatactgtttcatatatgcattcttattttgttccatatgtggaggaaagaaaataataataatgtatgaacaattagagaatttatgatattgaatatttttgggtcgcagagataatactgtctatattcaaaagaatgaaaaagcaacgtgtcctgctctttactttcagccaaaaaaaatactctgtcccacgttattaacaatttcaaaggaaataataaaaaatggtttaggataatcacatttgtggctaatattagttgagctgtccaaaatatctaagttgctatcagacacacagaccaaagttcataaaaataaatgaatttgggagcacaatgatccatctttttcagcataattagttaaaaggaagtaaaaataagcaaacaaatgattatatacagactgtctcgacgtctatttctgatttttttccatatattcctcgttttaatctaaaaaaacctttataccaggttttgattagagaagtattcgttaaagtacattcgtttgatacggttggtcaacaaattatccaagaactaaattttttaatcaatctaggatatttattatccaaaaatactatgtactttaccaaaaaaacattacacgaaaatgatctaaaatacaacactccattaaaaggggctaagttgcaaagaaagtcaaaataaaagtaaatagattaactaacgataatttaaaaactctgcaaaacttgattaaatctaatttcattatagtttattttatttgttgctgtttgctttgttttccatattcaacattattatgttttgtgctgttttatcgtgcccacccgcaccagcacacatgacacaactgttagttatcgcacaaaagaggtcaaattcaagaaatctttttacattatcttatcttactttacttatccactcgtgtttaaagtaaatcagatgtctatctcaaatctcacaacagtttttttatatttttactgttagcttttaacagcgtatttaatttgaatgcaagataacggtcaaaaagaacttttatttcatcgtatttaatcttacaacaaaaatcaaacttaaaagactaaaaagtatatggtacaaaagctattataaagcttcatgtaagccacaacgaaagaacaaaaaagtcagattttgatggatctaacttaatcttccaccacatctatacatacatacacgtatatatcatatgtatacaatcacatctgctcatggaaattgattgatcttgataacgcagcagggtttgcacaaagaacaagtgaggtctctgtttcttctttgttactgagcttaacctctttcttcgaaccaaacccattgaacataacttcgttcttgatcccaagtgttgtccatatcgaactctttgcagcttcattaggatcatcaattctcaaagtctttggaaccaatacagatccattcctctgtttttgcttcaccgtctcgtcttcgtctctcgaatgcttaccaagagtagaagtaggacttgaacttaccggagaagacaacactggcatgctccaataagggtaaaccgggtaaaacgcaggattccacgtgtacggccacgaaactcccggaaaacaattcaaaccgttcgaagtgttgttattagagcgctcgtcattgttctctatcctagcaactagcttttgattaccaaacctattactcgagaccttttgatcatctccgaggctgaaactaaggaccggaccatttgtttcggagatagtcacatggtggtaatgtgaagttggtgagttgttcttgttcttgcgccgtcctgctccgattggaacacttctcatggtcccacctgaggtccaatatctctgacaagctttacaaaaatggcgaggttggtttacgttgtagttgttgtagtaacagaacttagtctccatgctgttgcatcttggacatggaagaatcttggttggtttctttagggttttgtctttctccgattgatcagttaatgtcttgttttggttctgatgcaagacaatgaaatcggattattagggacggatgatgaataaagaaagaataacatttttgaagcatgttaaacagaaatgaatttaaaactttgtattataatgagtatgattctcaagaagaaggttctagatgaaattttggtggaggaaaaagtcttttaaagaacacgctttagttagaagtctaaattcgctcacctttattggtttcagtgtgtatactataaagcaacctttttcactaaaaaatatgattactttatggagaaacgaatatgctttttcgtttcatgaaaagtcatcaaaccaaattgcaacctctggttcaccaacagagaactagagttttaattaaacagatggtttaagtgtattttcttaggaattctccaaaaagtttaccaattcatcaactatgaatataaaacgataccaaaaaaagaaaacagttgcctttgatgggaaaatgaacaaaaactcaaatacccttttcaaaacaccaaaactcattttctctatacttgtatataacaaaacatactcagccctttcagaaacaaaaaagtagacataataatgagtaccttttcttcttcttcatcagcaacctctaaaaccgtcgggaaaggaattttcataccaaagagctttatcgcaggatctttagtttccagcattattatcgttttcctaagatgtgctcttttttactcgtaagtttctgactctctgtgtctcttttcctttcttttcagggtgtttttttttgtttctcttcgaagatgttttgtggggggtttgggtagtttggaaatttttggtttggaaatcgtgagatttgggattttgatacgttttaaaaagtgaagtggatgccaggtcagcattttggtttgattctagaccacaagtttatgtggcctctgatattttacttttctcccaaaccccattaaaacccatagcatataatcttttgttattttctttaaactttgtcaaaactattcgaagaatcgatttttttatatgttttagattttcactaaactttccgttaaccaaacagatcaaaaaggtcttatgtagttatatacatggaacaaatgcataacaagtttgaacgataaaaaacgaagtgctcctacgaggatgcaataaagttttcagaaaaagtgtttttataaacacgcttcgttatatataatactgatataagatttctaacatatcttaacaattatctatctattgttgaattgaagaaaaaaaaacaattatgtaaactgtttagaaacttttgggtaggtaaatgtcagcatcgcggggatggctttggtgcagctcacacgagagctgtcttgttacgtgcaatttcttaattggttggtagaaggataaaaatccttcatttgaaaacgatctacactttttggtttggagaaacatatacccttcttttatacacaaagattaatcacaaccattaatagaaaatcaattataaaaaaaaaaacaaaaaaaaaacttcacaaccatataacatccattgacgaatttcattaagtgaacggttgtacgttaagataagaagactgcagaagaaggtaatagatatgaggtgctctctcattggctattaccaaaaaggtctctgccacattttatgatttaccaaactctgccttttttccatgtcaacttctactgtaggtcccttactcacctgcatcttggtcagatcatagatttcacaaactgattgtgttgcagtaagatcgtagttaagaagcttcctaaatctaagaaggcttaacaaaacaaaatttgttgcatcttcaaaagacaatttgtgtatgtgtctatttgtatattgtgtaagaagacaatttggaatattaatccgaataccgaatatcggataatgtttctttataattcataatgtgtttcaaaataatccattattccaagacgtgtgccaaccagtgttatcacttcatgtaatcattttttagcagggttaagatttaagacagctttagtttgagggcattgtctttctcttagaagggtcgtaaacggtgaacatgtcacacacagtaagttaccaaagtcaaaatgtcggtttttcataacttccccaattctttttatttaacattatcatttagcaaccagatcaacactacactatcaatggaaagtgtttttttttcatctagattttgatttgagtttttcgtttttgaattattggtttttaaaaactagatcaaccagatttttagttctattgacgcgtctgtgtttttttctgatgttgtcaagatagtagggacaatattcttcttcttcagcaataatgggttatataaactgacaatttttctccaacaaaaagcagttgcattagacaagatcataacttttaaagtttttggcaaaagaactaaatctgaaattttcaaaattttcttttgaaataaggcatcaagtgtcagcatattcatcttctgaatctccctcctctaccaccaccacgaccgcctcttcttccaccaccgccaccgcgacctccaccatgtccattgccgttagctccaggagtcttcatgttttcaggcaatgggaggatttgatcaacacacttcctgaagctgaaatcgtctgcagtatcgtcttccctaaccagaaagaagcatctgcttttccacattgggtgggttcttacttggaaggttttgattcctcctccaatcttcttttcaggctcagaatggcccttcttaatcagatctagcagcaccatgtgctcatactgaaatgtacaatccagaacaaagttcagtacaacgagttagttagttggaagctcaaaagaaactgcaacaactgtaatatattacatgactatgcaatgttttatcttttatttgtgccctcaaaatttgacattaacttcattcttctaaccattatatgacatcaagacccaaaaaaactttctaattcacacacaatccacaatcatataatcagtaagaacacgatacatttgaacttttcaactagtaaaaaagctgcaaaggagtccaatttacaagctatctccacttcactaatcctctccctaaacataatacaatatccacaatcatctccctaaacataatacaatatccacaatcattgtaaacaaccactaatttgagacaaaaacaaaattctaacaccaaacactgaatccaaaatcaaatcatatgaccaatacaaaggcgaacccaattctcaatttcttttagtttaaatacaaagcacgatcatcatcagattcattgataaaacatcttcctaaacacatcacagaacttaataatcacaatcagagctcttagattaacctatataagtctcgagcaaaggaatgaatatttccaaaaaatttgaaactttacaataaacaaagccaaaagacaaagacgaagagtaaacccaaatatgtattaccttattaacatcgagatcagttggccaaaagtgtaaaaacttgacaaagtaatcgaacatcgccacagaggtaacaaactccttgggaccaagtttaaccggacctgacttctcttcctctccaaccttctgcttcttcgattcacctccgttctcttcttcctctgtctcctctctctcacgtttctcatcgccggtctcggctttcggggtcgcggtttcgacttccatgtccactttctggtctgggttcacttccgctgacagggaatcgacgatctcttgttcttcagccattgttaagctagtaaagcttccgcctttttttcacctttctacgatttctagggtttaagcttgagggtgtgtgacctacagaaatcgtctaagcggtatatttatatgactttggtttccgattgaaccgaactggttcggtctatttgattttttggctcgacggcatacactacatgaaaaccaggattttcaatgtagtaactaatttgtcgtcattgatctgtccaattattatttttacgtctcttaaatcttttcattttaaagtctacatttttctaatatatttttttattaatcatctcaagatatttttttagtctacaaattacttttactgttgtagaaaatttggataatagtcagtaattctaaataatagaataaaaactcaaatcttaatataatagtttaacaaataaatcatattatactttttttggataaaaaatgttgatataatttacaatgttattaaaaataatttttgggatacctaaacgttttagatgttcagtctgtcgggatatcttggagacttaacttattgatcaatcacaatttttgccaaagaggaaaatgtcaaagtcaaacgaacatcttttgaaattatttacatctcgtggaattaatggaacttcttaaatttttcaaaaatttgacataattggaatatattttttttgcttctagtcaatcttaccatattatctatcaacagtcaaacacctcaatcttaaattttctaaaaataatggaattattttatcgtattttggtaaagagttatttttgtaatattatctaaaatctaaaaagaaccaagatagataggtacaaaaaaaaaaaaaacttttttttgtgaaaatctgattatcataacgttaccgtgtcaaatcgtcaacctccataactccggttttgtgtatttaattatatatttatctgtttacacgcgcttcgaaattttgatttacttatctgaatatttttccagaccgaacatcaaacaagaaaacacatttgtccgaatttcatcttgagagctgtttgtgcccttcaagaaatcgaaagagagcttctttcccccattttctgcgattcacgatatttcttcttctataggtaatcataatttgatcatcttctcttttatctctttttttctttcattttcttcttgggttatggttggttgattctgctatttgggaattttgatttctgtgacttttggggtttcaatttcattcctgaattgtgatggaatcgaatggtatctctcttttgttttcatggttgagatgtgattctgaaatttggggattttccgattaggtttatgtcttgaaaatttggggaaatttggagacaaagacatattttaaactcagatcctaatctcttccaccaagacattttccctgaattgttccgctttaatgaaatgaaatcgattgtctgagctcaattatgatgtttcgattcaaagaaatggagatttttgtgttgatgatggaacatttatcattataagagttatgagatttttattttgaatctttggatctttcttggtttttaacaggacaacgtttttttacacattgaggctaaaagagagatggctgatgatcagagttcaagtactgaccgtctcgtgaaacctgaaagtttaaactcagatagaggatccaatcaatctattgaatcttctggagagagttctagagctcagggttccacaagcctgtctactactaaatctatggatggtaagaaaaccgaggaagaagagacaacggaacaacgcgatgttgatgatgaagaggaaccgctcatccaatcggttgaatgtcgtatatgccaagaggaggattccgttaagaacctcgagtccccttgttcttgtagtggcagtttgaaggtgataattttatcaatgaatctcattgttttatttgtttttgttggtatctttcgtttaaaacagttctcatcaatttggtattttgtgtctatagtatgctcatcgtaagtgtgttcaacgttggtgtaatgagaaaggcgacacaacctgtgaaatatgccacaaggtataatcaaatcactaacaacatttttggtataatcttttggttacaccgaatgcaagtttatataactgttttttcttccttatggaaacagtcttatcaacctggatacaccgctcctcctcctcctcccgctgatgataccattattgatatcgggtaaagttttccgtaatcctatggctttatgtacctgcactcaaaaattgaaaaattcttccttttcatatagattctctattgtgggataagacatagctaaatctcaatcgagcacattactcatgctgctgtttttgctgttgttgtgtgtgtgtaatgcagtgaagattggggcaatggtgttcacttagatttgaatgacccacgcattttggcaatggcggctgcagaacgccatttctttgatgcggactatgacgaatacgctgattctaactctagcggagctgcattctgtcgctctgctgctcttatagtaagtccacatttggttttagtttcttactttgaaatggaaacttactgaccgttaaaaatggcagttaatggcgcttttactcttacgacacgctctaaatcttacaaacaacaactcagatgacgaagaagacgatccatcagctttcttctttgtacgtacatctctcttactcacagttcgttacagaattctcctttttgctttcttgttataacatttttcgttttcttttgtcttctttcggttagcttttcatgcttcgagccgctggttttctcctcccgtgttacatcatggcttgggctattagtatattacaacgtcgaagacaaagacaggtatataaatctttggaaaaacaaaacacataaataaacccatgtgtatgtatgctcatattctcgtgtttttgtgaaaatcaggaagctgctgctctagctgcggcagaagtagcgtttatgttacatagcggtgggggcgggggaggacaacgcagaggaggtttgcactttgctgtaccaccagagcttatatctaatccacaccaccaacctgaagcttcaccgcagtgattatatattcccgtcaccggtaagagaaatcaatcatcatctacgacgttggtttctctctatctctcacttctctctctgtgtagtagcttgtgtgtttgttgtgtaccggtcttgctctctcaccaaacacacaaaactgagattataaaacacggcaagtttctttgtctattatcttcttacagacgagaaaagaaagattcttcacctattggatttatgtttatgctttttatttatcttgttgataattcttttttctcgctaatacagtacaatttagtacttaagaaaatggcaaaatggtaaataagggagtaattaaatattggctcaattagacaaaaatagtctcttacacgatgggctttgcgcctttgccccattttgtcttgtggtatcgaccaagtggacccttttgtaggcccaaatgtaatggagccatttcgacaaacgtcctaattcctctcttttatctttttgacatagtcttcttactctgtttgatcccaacaaagcaagcagagaagagtcgtcgaactctttttatgccagcagagaggattttgacatcagaccaaaaaaaagtcttcttcttccataatccaacacgcaattctcttgtatgtgttggaaattatcataattatttcgagattttcttttggtttaataatgtcgtcgataaggtagtacatatatttatttggctaacttaatttcaaacgtattgacgtattgtactgtttgagaacaatttgttcaattcataatacgaaattttctcagacatattacataggaaagagaaaaaaaaactaatctagagagattcaatgggaaaatctaaaaaaatgataaactttaaagacatgactttgaacaatttcaagattcgatattcctcagtcttacacacagagacattgcaccgaaaaataactgacatatcctgaagaatagttcagtttttatccaatgaagtcaacgtccgagataagaaaacaaagtcaacgattgtgatatcacttttaaaagtcttgagagtgtgaaattaataagaatcgaaaaggagtttttcggtggcaaaacatagctcactgtgtttcacaggaacaagtcaagcccttcacatgttagcatttaatactcttttttatttttgcttgattattattctttatttgtatatttttcaaattcgtttccaccactagattttgcctcctttatttattgtaccgcctatgcgtgtattgtatacgtatagatatgtctgcgcctgcatatgttcctcttcattacgtatcctattcacacatttatctcgacatgatttgttggattttggattatatggctcttattttgtttaaagatacaccaacaacataatttcatgagatgtatagtctactgcaattccatcatttgcatttaaatccgtataatatatctaaaatgatgtcaaaatgtctatttttatgtttggtttttagaaatattcagaccactcacgcagttcaaacataccattggaaaaaatgaaagcctgaatttgtttaggaaaaaaaacaagaaattggattttgacaactcataaaatattataataatatttatgtcaattacaaaaccacattatcacatacagcctcataattagttgtaaataaataaataaaataattaaatgtattaatgttggaattaactcagttggtggactctttaatgtcattttttcttccgggattatgattgatttgaaaggacaaaatatacaaatatcaatttgtgaaaatgttgaactgtcccgttttcaatatttaaaaactgaacattgaacttttgatccaaaaaaaaccaatattgaatctaagcaaacgttctgaactaagataaaaaaaatatcggatccaaaagtttggatggacaatctcataaatatgtcataaaaccgcatgtgaaatagaatgcatctttaagaagttacacttaaaggtagaaaataaaccttacaatgacgaattttgtgtgtcaagtatatgttccatatgagcatcaagagacatttgcataaccatatgagccacaaagtgaaacacaatacatttgttacgttctgctacatacaatttttttatatttatagaaaaagagagatttatatcaccaaaaggggaaaagagtgttgtagagctaaaagctagctactaaagactctaaaaccctaaagcaataataagcatatatatcataggttataactctatattatttgttataactcataactaattaagccctcaattttaaaaagatcccactttgttagttctagacagtcttctagaactagaacatcccttcttgtcctgctagtgccataccaaccatctcgtggctttgctcatcaaataaccatttctcaaacaaagacagagacccttgtgatattagaccatgatcttggtccattgttatttccggtttgatcacttgatcatggaagaagcttgtctcctgagtcaagttttgagtttcgtccattgaattgaagctgaagaaagattgttcaaacccttctccaccttcttccgagactgcagcagtgagtggtccagtctctgaaaccggagatgaagatgataaagttaaagccttgggtgtgtctttcatgaaatcttgaagcaaccgggcgatgttctcagcacttgacgcatatacccctgatgggtatggattagtagtgttgcttgtagtggtggttgtggtagatgaagaagaagaggatggatcataacaacggtcaagcaaagctgatgagaagttacggatgttttgttgtgtgattactggtgtcggtaatgatgaagatgatgaaagagtggatgatggtttgtctaaagacaaggcctcacaaagagcttgttttgccatgttaatgtctgtctgaagtcttctttcccattgacctttgttagtgctttgatggttcttttgtgaactagtgtttgatgaagagacaccatcattatcttcttcaccagattcattaatctttttgagcttcttcttcaagtgagtgttccaatagttctttatatcattgtctgtcctttctggaaggtatgatgctatggctgcccatctatatacaaagaaaaacatatttagatcttatacccaagaaaggtaactttttggaaaaatatggatcatgtgcattaaaatatacctgttgcctaaaagggcttgaagatgaacaattgtcttctcttcatgctcagtaaaatttccacgcttaataccgggtcgaagataattagtccatctcaatctgcagctcttgctacatcttctcaaacctaaaacaccatattaacaaaacaattaactcaaggaaaaagggattaaatggtaattagagatatgtggacgaaagagtcggtgacataacttattagctatttattacacttttattaaatgttcataccaaccaagccagagaaagaaataaaaaagagaagaaatcacaacccctagtacactttcaagataaatacataaaaagggtttaagaggtggatcaaaagtttaattaatctattaattagttaatttgattaagaaacaaaacaaacctgtgtgtgttgggacagatctccagtttccaggaccatgttcttggatgtaagaaaccaagatgatgtcttcctctggtgtccatggccctttcttcactccaatcttttcacagcaaggtggtcttcccattctgttttcaccttttgaaagggttttgatgagatattagaacaaaagctaatcgttgcgggtttgttggaaaacctttggaaatcttagggttaagacaaagaaagtccaaatgggtttggttttgtctgaagaagtggaggagagatgttggttatatttatagaaagaagtaagtaagattgatgtgtgagagagaaacaagaagagttaattagtaagtaattaataaaataatggaatgagaagcaacaataatgaagaggctagctttcaaagagtcaacatggacagcaaaatgcatttactctctttctctccaaagtcagccttcttcttctatctctctctccttctttggattactctacacggtttcaaacacaaatatttttttggacgtttacgtttagtaattaaacaaatatcaatgatattttgttgtcttttatttaaaagtaacaaacataaacgcaagtactttacgtttttgtctttattatactatcaattcacacactcaaaattccaaatttgaatctaaataatgacacatcaatggatatcagtacattattagattatactgtagtaagtattagtttttttacacaagtgaaaggcaaaaatataaacacacaataataataatcggattcataataacttataacaggcttcaactcatgtacttgttgatatctatcatcaatcttaagtttgtgtgagaaaattctgatgaataaatatgttttagttatttttttgaaccatcgagttttaatcacttacacacgtattttacagcgaatatatatgcggagttttgacaaaagattcatataggtatacgataagcatgagttcatgtactgtatgaatatatatgtaagttttgacattcaaaaccgtgtggtgctgattattaatgcaggatgtgtgagagaaataaaggaggtggcaccgaaagaagacaaaatttaaaggagagaaaataaggctattatttcgatttttcttgtggttttttattttatcagataaataccttataatagaaaaatgtgcttttttagaagttcttttatttaagagaaatgattttctgaataatgctgaacccatttatgctgcgtctgcccgaaatattctcttccgatttatcaatatacagataagtgtttgctttttcttggcgtgaagatctaaactaaatataacacaagaaatatttaaatttaaatttttgggtgcctgatatatttatcactttctaatttttactttgctcttgaatgttgcattgactatcatctttaaccacgaaactgcatcgacaagatctttgtaaccagcacatgagagtccatatactaatatactgtataaaaataattattctgatacaagtataagaaattcatcgatttccaaattttagcaacttacaccacgcagccctaatttattgtcacctccattttcgtgaatacatccattgaattgtcgacccctcaaagtccataacttatggggtaatatggagcatgattatttattacttagtttaatacacatgtctcttttattgaatgcccactagcaaaatcgtaaattactggagcaaacctcaaaatcaaataactctatagaaattatttatagacaactgtaactgaatcctgaagactctcaatttaccgaccaattagatttactcttcattaatttgacttttgatggtcataggctcgtattaactctcatagtagagttttacgtaattagtgaacttcctctttaaatttaaaccaacttgagaaataagaatgattcgcagaaatggaagaaaaaaaaattgattcgcagaaatgaataattactagcacattttcgacttacactctagtctacagtaatacgatgatctttcgctgacacattacccaataaaccttttaattgcatcagtaatctcgttttttttactttacataacacgcgggttattaggattttaaaggtagtatttatcgaagcattaacacaaaaacaaaaacgactatatataatcttttaccaaactttttatttttatcaaacaaatactccaaactgtaaaactattttttttaatattaataattggaaaattcacagtaattaaaagtaacgtgtttctaattttgtggagataacattaacaactattaagaaatacattttgctacataaaatctcaattacctgacaacgttagctatatctatatttaccagttctgtgaaaatagtatttactacttcatatttttgataaatctaaacgtgtacaataaacatgaggaatgttgcgatttgcgaagcacgtcgtggctgtgtgcattgagcttctaaaataatttttttcttccgacgtgcattgagcttctaaaatgaattaaaaataatgtctgcacattaatactatatcataatggatataaattatgattttcaacgactagttaaaaacttcatgaaaaacaaaatcggttgaaactgtagtacataatacaccacgtccttgggtatacatcgcccataccttctatttactcatcatccgggtcacatattaactttacattgaccatagatacctacttatagtactatatttgaaacatatattaagtattttatagaactgtactaatttataaatgcacatgttttcatgttttcttctattaagccaactaattgaacatattatttcagtagttaaaaatggctttaatttactgccaccatattctaatttacacgcgagattgaggataacaaacctactttttcactgttttatttatttaagagtataaattaaagctaaagtcaaaactcaaaacatagttgcttttcgaggaaaaggctctaaaaagctttgtaagattttgaaactatcaatataacgaaaaacagtaccggactaccgggagaccaaaatgataaagttatgattatttatggtgacattattttatatcaacccaactttagtttatacttaatcggtcttagaaatatattattaactgcatcttcgagcactaaagtttctttgtttttttctacaatcaatttgaaagtttctacgatgcttcctatagtttccaaaagattaatatgggatgaaacaagtcaacgactatggtcgtcttttggatgtagacgaactttgggtcatatcttattttatacgctatctaattaaataattggtaggttaacttagggtttaaatataatatcaatagcaaaatttagggttcaatattttaatccccaaaaattaagggtttaatgtgagtgtagcgacacgtgccagcatccaacgagaaaaattaggatagttttctttaaaaaatgaaacaataacatagattattgtacccatcgtctaatgatgcagcgatgattgacgtacgtgtatattgttactgtgatgttgcccatgtacttcttaggaaacagtaaggttgcaattttcccgtcacattaaagttttagactgtccaacattaaaacattatcaaattatttgacatgaacatttcatataaaccaaaatatatttacgaaagcattcaccagttaaacagccaataaaagatcaacaactcttacataagcaaaagcaattaagaatgacagtatagtaacagtgtactacccactttcgatgagtaactacaatataatttaattttatgtttaatccagaaggtccgtaccttaaacggttgaaccaggagacacatttaggaaaagttggtccaagtgttgggttcgaataccgtatgcggaagggagtaggcactgcatttatcatgttttgatctctcgttagaaaacatgtatgaagatttggttcggaacttataaatactttttactcaatcaaactgtaagaacaaattgatgtttatatatcatttaacgtcattttgcgcatgcaagctagaaaatctgctctacctaatcttcatttagtacatgacgataattttttgaccaattcaaagtgtaggacacttgctattcctaagaaagtatgaaactttccaatccaacttgctgcatcctctgatttttaaaagtcacggatctcttgttttaagatagcataagtcaaacatttaaagcttgataattttggcaatttggactaaatctgctgaaacgaatatacatatagctaggttcgatatttttactaaggtattttttaggttttatgtatatttctataataaaggctttcaaattccagattaaagttaggtataacatattaactctccgacaagaggttagtacattgtgattggagacttcacagctattttcttccgggatatctgatgtttgcggtcaatttcatatataatatgcatagtgtttaattttactggacccaaatcttgatatagtggttttggccggccatgccatatcgttttggattttacttggtttctctatttgaaaaaaaattacataccaacatgtaaacagcaagtgttgtaaaacagagaggaaaagagctggatgtttcaaacaaatgaattgatagtcagtgtgaaaaacttataacttgacatagatattttgtccaatgaaccaaaccgttgagactattaacgaaaacgtctttatctgtcccgctataatctgcaagacttatctgaaatgtaaatagaatgttttcgtaaaaacgtatattagtttatgtacaataatatacatatcctaattttggttctagatctcatattacatagcttatatggtatccgatccccctgtaatttttagtaagatatttgattgtgactttgtgagtatgtatgagtatgaatctatacacatgggtttctaactattgggtttagagatgccactaagcctatgccaacacaaacatattcgtttaaaataaactcaacgaatcgttatctgatcttctaaatcttataattaataacctaaacattttgacttaacgtgtctaaactctctctttatagcataatgttgtccttttccgtagggtatttttgaaccatcactttcaaagtttcaatgtcggtttgtgaagattgaccacgtcaatagtaagttaacgttgttaatttaaataactaaaaaaaactgataacaaaattattggtacgtacgcattttaaggaagaatctatgcaacgatgcagattggttggttaaaattataaataaggttttaaactatatgaatacggtaagatataggatgtatcaacacttaaattcttcggtttatagtactatattggttaaatcaatcaatttatcttaaactcgcatgtattaatattttgttgttagcattagatgtttggttcggtaaaacatcggacgactaatacttaataataaacatgtaacttggtaaaaagtttcatgcaaattaactgtaagttaaaatcggaaaacttgtgaattgtgatgattgaatagtggcacaaattgtttgtacacaattgtaactttattttggaagagcttgaatctatggttggaattttggatttgcttagtgctaatctaatccttccatattactttcatgaattaattttgacaatttctccccttgaacaaaacaatacattaacaaatattgcagatgacactgcaaaagatttatagtaacactaaaattcgaattctcatatgtatcaaccgtctggtttaaaggattagtgtgtggtggacaaaaacatatcagaaattgccttcaaaatcgtgatgaattatttttagcaccatatacatcatcaaagctgctagtattcgaacacatgatatgatacaatcatacaaaaaaaaaagcaataacgaaaaaagataaagaatacattcttcgatcattttcttaggacttcgaaatcattcattcccactcatttacacaccgatgcaacgcttcaatggccacgtaatcaactgacatgggagaatgtacacgtgtacggtagagatcaaaccacctagccttctccggatatagaaagcgaggatctaggacaagacaagtcaaagcacacaagacgacagaagaaaatactcaaaaggaattaggtatatggcaggtcccaccttaaaagcaatattttatcgtattagagctttgtggtctccacttataactaaatctctgccacacgtcgtcatcttggtgctcgaacgatttgatttgcgaacgcttacgcttctcctgttctccactccttgtacaaagttcgtgaatgttaacacgtggtgaccggctattgaagatcacaacaataatctccaaggtacgaaatctttcaattcaaatttactcgatacataatgggcggtgtattatttaattatagtttcagatttagtttgatatactatatgcatttttcctgagaatatacaaattattggcgattgaatcatattataactattatggcgaggcattttgtatgggaccatatagcgtatcgacatatgtctacgtgatagaatttgaacgtggcatgatcttagaggggtttcaaagttgactattttttgcagttatgagctcgatgagtataagtcaattctcatttgaatttgttcacattattgagaaagtaaagcctggatttccaagttccgaaaacgaaacttttattcatttttattgcatttatggttttatttcaatttcattgacatacatatacaccctacgaatagcttgaatatgttgatattttgtagggagatggttttttgtataatgtggcgcaatagtgaattagtgatttgttgattttgagtatttaatttacgttaagtcgttcttcaaagttcaaacaactgaacttgttaagcaaaatctaatactggaaaataatatataaattagttacctatttttttcttagaaatatggaaatgattgttttgtatacatgatacacctatatagcaataaaaacaaacaaactaaatgttttgtcttattaatagttaggagaaattagtttgttgacttaatctcagtgaggatgctcggactcaaaaaagttgctaggtttggcaagatatgatcgatcaattaccgacacataaaattgggaccatatatatatagattttgtactttcataatttatgttctgtgacaatttcatgaaaatccctaacagcaaccttataagttaaagaatcaactagaaaatcattttcataacttgaataattcgacaattactattcatcgaaattagagaacgtttaagtaatcgtttgaaatatcggatggttgtggctaattatctacttagaggctaaatgtttactcaacttcgaatttagagatgtatcatgtatgtatagtggagtatattaatcaaaaacttatgtgtggtgttattaccttatttattaatgtttcgcctttcgtgtatatatcattgaatttaggtattttgagacttccttactcgcgttttttttttaagctaccgtattttatgtttatcaagtgaaagtgttgacaccacaatcaccaacgacaatttcaagaatgggcttgggatagtttataaattgagccttttaagttttaggcccaaaaattcttcaacgttattgggtctcactcgctcgattccgttgatagtaatgacaaacaacaacccaacagaaactgtttgtagaaatcaatccgttttattttgggcttgatgatgttgtctgttgaggcaagaccactagaaaggtatcaaaaacagagaataacatatgaaaacagagcacataattttataactttgcatcaagcaatccaaaacttaagagttatgactgataagtttcaagaacgggagagagagacatctgtctgaaagcccgaagaatctctaggatttgttcataaggaggacttagatctttgaccacgctggtttcgtttatagcattgatccacccgtagacaccaggaactatctctgggtcaataattttcagacccaaaacttcttcgtgtgccttgtaagggctaagcaaagtgcacatcacaatgtctacgaggctcatggtctcgttcgtcacagttggttcaccatcagtgtcagagaaaatctccttaagcccttctttctctataacgctcagcttctcctttacttctgtgagagctttcttttgctcttctccttcgcttttcaccacttttatcaccaaatcgtaaagctgcacaataaaaattcagtaaagttaaaaacttgaattaaaaagttagggtttatcagatttactcacatgtaattggatgtagttagcccaaaaccggactttagatcttctataagggtcttctggcaaaatatgtggaccgttactccacgtttcgtcgatgtattcaatgataaacaaggactcagagatgggtttaccgttgtggacaagaaccgggatcttcttgtgaaccgggttataccggagcagggtttggctcttgttctggagatcttcttgcacgaattggtaaggtatggatttaagccttagggctaactcaatccttttgctgtaaggactcgcgaatgatccatggagtatcactttgttctcaacttcttcatccattttttttattcttctttagacttgagagtattgcttgaaacaatggacttttatgcatacagaccacaagtggggataaaaagaaaattcgttaaatagtttggtcaaacaaccttgttcatcaatctcatagttgcttggagaagagtctttatgacgtgtgtaaatcatttgaattttgttattcaaactcgacaatcgtcacaaaaccccaataaactggtgccgtgtcattatccaccgagtttagtggcacgtaatgcattggatcacgaccaaaactaaataattgtaatctaaattaaaggcttattttgttccctttactagaataaaaaacattggattcactttcattagaacagaggactgagaaatagagaaatgtgagattgatgaaatcgaacggtcagaaaactaccaccaactttacttatttaggtttcagatcaagccacgtggctaaattacctattgactcctctcatagtcacggacacgtgttcacaagccctgcttacttcatatagtagtcttgcccaaaacacaaacagagaaagctaagaaaactcaaaaggcggtggtgagtactggtgagagtgtgagtgaaaaaacaaaaaaaacaattcaactgcaaaaatgagttccggaatcggaagtttagtgaaggtcatctttaagaacttcgatgtcatcgctgggtaatttaattagtattatttagcctgattatgattttttttctcgttttattttctccattaatttgatccttcttggtgtgcagacctgtgattagcttggtttatcctctgtaagtttcatacaagtatctctttattttcctgagaatatattatatatgtcaaatcttgagttctttttaatttggattttggtttacacagatatgcatcagtgagggcaatagagtcgaggagtcatggagacgacaagcaatggttgacgtattgggctctctattcacttatcaaactctttgagctcacttttttcagactcctcgaatggtaactttcacacaaaatctctaaacctttcttgattacgcaagctactacttatgaaaagagagtaaggtcacagtcacacacaatatgtttgtttctagggctcttaaaatttgtgataaaatcgatgacttggattttacctaccgaccttactatatgaaatttattaaaaagttggtttggggggtacatagatttacctttcttgtagtccaagtaaggtacttcaggtaacggatgagcttatgtttaacattcctagactgacttcaggagataaactgagctgtatgtaacggtggttcattgattcaattatatagactgaagtttcgagatttatggtatgatcaggatcccattatatccatacgcaaagctagccctaactagttggttggtcttaccgggcatgaacggtgctgcttatctctacgagcactatgtgcgttcattccttttaagcccacatactgttaacgtatggtacgtgccagccaagaaggatgacgacttgggagcaaccgctggcaaatttactccagtaaatgattccggtgcgcctcaggaaaagattgtgagctcggtatgacctcttaactctctattactctataagaccctatttgtgacctaatgttcgatctataaggcacatcaatctcttgaacgtttatattttcaggtggatacatcagcaaaatatgttggtcattcggcttttgatgacgcctatatctactaggctagtagctagtaaactacttccggctagttgtagctgagcatcctgatcttagtgtatcgaaatacttgttttctcctctttttctttgttttcgggttttatgaagtttgttgttactgctaaggaattttaatatcaaaataaatgttaattgagtgagttatataattatgtaataaaatctgagcacaaaaataatagtgaactaaaaggtaagagtctagactagctatgatcaatttagtatcgtatattgctttcttcctcgaccaatgatgagagaattcagaaacgaggttttgatagcgtagctcaccgctcagtcgctcacgggctcggagtagatatattttctttcaatattcgtcgacttactcgactataaacaagcagtatgaagaagagttgacactaaagaaatggtaaagccaaaaatcttatagctgtaaagagaataagaatgagtaggtgtactagccatatattcgttttcttaccacgttaccaaaagcattgtgtgtttgaaccggagctaattaatttgattctattcacatattgtatttacatacatcatgtgaagtctgtcatggaaataaatgtctcttttcatcgtcacgaaaatatgtttaatttgatgttgtcattcttaaatgattttctactttattgttaacaaaagaaattgatttcctaccttacacatatcttgttggtaaaatagacaactaattttaataccctcatctcaataaatgctatttacactaaataaagtctgatatgagaaatgttacagaatgcaataaacagaaagaaataaaaaaaaattgcaacaaaaaatcattctcaattggggaagaaaataaagtcgaaatgataagtttcataagaaatgtatattttaccatgtttactaaaaggcaagacccacgtgggaaggcgttacatattacacagtccaaatcagcatcgttattattgtgaactctcacattagctgttaccgaaactaaccaacaacaagtttttgcctctttgaggacatttaaatatagagaaattgtttctttctttgattttttaaaaaataaaagaaaaatcaaaacttagtctattaagcatcggtcattatcacaaatgtaatcctaagcatccgtatctaataagttaagagtaatttatccacacatagagttttttttttaaaaataattatttattttctttaagtgtaacgactaataaaataagttataattaaattaagaatcaaattctctctatcttttgcactttttcttctttgtctatctctctctctctctatctctaacctttgcttctccgtccttttctctgcttcagttttctcttcctaacaagcaaaacccgaaacagatcgaaccatttttttcctttagaaattaaacaacaaaaatcatttttttgtttgttttcggtttcacctaaccaaattgattctcttacctttttatatcacattgcatctgggtttccattagaaacaacaacaaacgaaaaaagaggcttctttcgtttcagagaggggttcaaaaatggcgacgaacattgggatgatggatagtgcttactttgttggaaggaatgagattctgagttggatcaatgaccgccttcatctcaatctctctcgtatcgaagaggtacttttataaaaaaattgctggattttgtaatctgcatgtttgtttccatggatagatttctccattgtgtgcattgtcatggaattgatttataaaggacgtgcctttcgctttaaaagggttttgttttgataatgtcggtggcttaagaggattgattttgaggaatgtgttgttgatctggtgcaattttgtttggtaatttggggggaattgggtttctggaatttgatttcttgtcatgatccaacagatttgtcggtgtggtcctctcactcgatttcttgaaatgatattgctgatctatacaacaagtgttttggggggaactggtttatctttggttctgtctgatagttaaggtgtttttgtgtgtgttaagatgcaacttcattgattctctgatggttcttgctctgtgtgtgtgtatttgatgattcaatgcttagctagcttttggaagcaaactcatgttagttgttgaaatgtgttattgttctggacctcccaagttaaaaagattcattttttcttagttgtttgattttcgactgatacacttgcaagtaagcattgaaactgttgtaattcgtcttgcttgtgagattgtttatctaagtggcttatggttgggttttgctaggctgcatcaggtgctgtgcaatgtcaaatgttggacatgacttttccaggagttgtgccaatgcacaaggtgattttattattcacattttatcggcatctcttgtttgcttttttcacagagcaatctaaatctcccactttttaggttaactttgaagcaaagaacgagtacgaaatgatacaaaactacaaggtcatgcaagaagtcttcaccaaattgaaaattacaaaggtacttctttctcttagatatcattacattttgcttgggataaagtttctgtgtgctaatgctttcaaatatgtatattactcacaatgctgttgtcttagccattggaagtcaacaggcttgtcaaaggccgaccactagacaatttggagtttcttcaatggttgaaacgtttttgcgattcaataaatggcggcattatgaacgagtatggacttttatacctattctctcaacttttaatccaagaacaagtaaaagtcttcttaccatcaatccaatggtttcatcattgtaggaattataatccagtagaacgaagatcaagaggtgggagagagaaaagcgtaaagggatctagtaagatctcaaagtcattgcaaacaaacaatatgcatcatcctcctgtggctacttccaacaaaccagctggtatgcctttgaatttgcttctcttatcctattgcttgcctatccaaattttctcaaggtcattgaaaattataactcctaggtcccaagcaagcaaaatcacatggaattggaggtgggagcaactcatcagccgaagtgcaagctctgtcaaaggaggtaatcaaacatctaatcatccctcttaaccattcggtttcattcttttcttcttgttaatgaagatagacttataatgaaattttcttttcacaataccaggtagaagatctcaaggtctcggttgatctcttggaaaaagaaagagatttttacttctctaagctccgggatatagagatactatgtcagactcctgaactcgatgatcttccggtaaatgtcatcatttttgttgttgatatgctgtctttgtttttcttagtttgaactcaaaccatatatgattttgttgaaaccacaatgtgtgcagatagtggtagcggttaagaagatattatacgcaaccgatgcaaatgaatctgtgctagaagaagctcaagagtgcctaaaccagtctctagggcttgagggttatgaagaagaaggaaaagaggaggaagaagaagaagaagaagaagaagaagaagcagcagctgctgcagagacccaaacttaaagttgtgacaaataaaagtagagggcaacaatgatccattgccttgtcttagaagatagaatcacttggagaggatgtttgcacaatattcaatttaccctaaccggttttttggttttacagtgaactgaaccgaatttattccttcctaaacttgaaagattatctgatggattttcattgtatcacaaaaatgattttattaaatgttccccaataagtaaaattaaaaattacaaaataaatagtaccattgtattattaaagggtaatgtataatcctaccctcagacctggccatacgatatactttataattaaggacttgttgaattttcactttaaagaaatacaaagtaatggtattcaagtttccaagtggatgatgctttcactcttatccataagtttgaaaccaaagtccggtattcctttgatcccatccttcttatggtccggcattgcttggatttcaaccttcctcagatgattcttctgtatatcataatagagaatgtaaaaaggggaacacaagtcacttggtaccaagacaacctcgccgttttgagttgtgtctactaacgtcaatggaatgtcgttatcaactaaatgcagctgacaaggctgcaaactcaaaactgtcctcgaccagtttccagcattttccaagacccataagtctaccaaaccgttttctttaagactagtatgataaaaaatagctggtttcccaccgtactctataaaatccagagagtcaacatatgcagacaacacaagaggcgcttggataatgttaaattcttcagacctaacgtcaaaggtgacaacgatatcctgaaacatactagtgaaagcaagataatatataactccaccgatgcacagtccagatctcgtaggagtatgaggttgatcaaactcaattcttttccaagaacctccaacttccagtacgaagacccaatgctccgagattatcgtttccaaatcttgtgaggatgatgacacaaaagtgcaaactactttgtattgatcaagaacaggatcgtgccccaagaagtagaggagactatgttcgtttccttggacaaaaatgttgaatttgatggcgggtaaggttacgctctgtctggtggtgggattatagagacacgcttttccgcaaacaatgtataaaatcaagccacgaagagtcaccatatgtagtcctcccatcccttgcatggtcgtcaaatcttggtcgaaactagaaggcgatgagaatgatagcagtacagactcgcgggggctgtggcagacctcccttgaatcacacttgtggtccaccaaactaatgtatagacgatgtggtcgcagtggagatgcaaccgtaagataacggttgctaaaaaatcgggaacggataagagaagaccactgctttgaaacgcacttgaacctcataagcgatttatgaggcaatctagtcagaatctcgatcagtagatccaaaggaatctccggtgccacaaaaaaatcttctcctctttgtcttcttcttcttctttttcttcctcttctcataatcgcctttgaagacctcttcttccattgaaaagatgaaatcagagctacagacaaacgcatggctactactacaaacttgtatatccaaattctagggttgtgacagttttataaagtagaggacgatgatcgtctctaatcaacagttttccttttgttgattaggaaaagaaagtttaccctaaccggttttcttcggttttaaaaatgaaccgaaacccaatatatacggtatgttcctaaatttgaaagattaccggattggtttttatttgtctcgcaatgttcttactaggcttatatcgttcataaaatgaagtatggctcaataacaaattatcattgattcatgtatgggcttctgaatgagataattctaaaaaacatgcatgcttatgatttatgattaaggtaaaaaaaaagaaaaaattgattaaagtcatttctagctaatatttggatatcgctagcggtaagctcatttgaatcaagtttctttcgggattatttctaaatattcaaaaataaacagagttacctattgaaaacccaatttatttaccatttcattgcgattaatttaggatttttttacaatatgttttttaatcaatttgattacttatgcgttttcttaaacaagacttaattgtgcttataatatgactttgaaacatatacgaatctcaatttgttgaaaattaagagttcatacttagaagacgatatgttgttagtaaataagtttgtataaagacatttgattgcaatgatacaagtcaaacacgatttcggtgagtttaactatactaatctaatttaacctattcattgtaatcacacacattcacattgtttgtcgattaatttatttagttatacacttatgtgattctaactaaaataatattgaccttaaaattcatttaagaaattgaaattggttacgtataaaacgtgttacgtgtgtcggtcgtgtcctctcaactaagaaagacgcgatacaacacattctcgatgtccacaagcaaagggtaacttcgtcatttccgcttctacctaaaagccccacttgatccaaaggatattttcgtcttttcacaccaaccaacccgcttaacgaactccaacacggaatagacccctcaaagaaaaaaaaaacagctagcggccgcaacttacaaaaacttaaccaaagtatttattatgtaataaaataagaaagatatttagctgttaaatgtttgtttacgtcttctccacggagaaaaagacaagaaactctgagtttttgatatttataaaaattgcaaaaccgacggtaacagaaacaaaaggcggttcttttttccatatgtgtaattatttccttaagtcatagctataaatatgaacttggacctcaagttcttttcctctctcaagtaacaaaatactaattcaaaagctttataaagtttcttttctcattcggttctaaagttcctatttttcaatggattacgtgagaacccaagtcgaagctgtttttgatgattctgagcaagatggatcaaccatctctgaatctggaagctgcgattcttcttctgatcgatcttttgctgacgagcttgggcttatggagttgcttgaaggagataaagctcatgatttgatctatcgtaattgtaaatctggtcttggtgatcaatgtcagattctctctgttcttagaaacggatttaggaacgttggatctcgtgcaaagctcaagacttttcaggtttttcaagaggcggtgcagatgaaacacggtggagacggtggagctaaggtgaaatacggttggtgctctgtttcgaaacatgagcttaaaacgatttttgagtatgggtttagcgagccgctgaggaatgatggatcttttggccgtggattgtatctctcgccggataattctcctcttgattggtaagtttctctaaatctctaaaagtttcaatttttcgaaattcattggtctcaaaatctcatttttggtgtttgtttgtttgattagtttgaaggattcagcttcagaatcagaagatgggatgagattcttgttgctttgtagagttctacttggaaaatcagagattgttcctcaaggctcgactagatcatgtccaagttcaccagagtttgattctggtgtggatgatttagtttctacgaagaagtatattgtgtggagtacacacatgaacactcatgttttgcctgagtttcttgtttgcatcaaagctccatttaacctaactcgtaagcaaaatcaaaatctctaatcttgagtttttcttgttcttgtttatggttttttgacatagttataactgtttttgcaggaagtccaaagagattgagatcaccatggatggcatttcctgtattgatcaaagcattgtccaagtttctacctccttctcaaatacttgtcattcagaaacattacaaagatcaacaagtaagtgtttttttttgtttgtttcctcttcaattatcttttgaggtgatttcatttcacattctaattgttgctttcctttggatttaacagaataggagaattacacggagcgaactaatccaacgagtcagaagcataaccggagacaagttactagttcacatcatcaaagcttgtggacataaagtacaacactaaatctccattgcagatcactttggcgtttttgtttcaaggacacaatcaccatggttgtatttgtctgtttaccaactccaaaatgatcaggactggtagagtccctttctattgttttcccatgatagtgatgaaaaaaaactgttcattagattatttaagatcgattagattagggtcttagcaacattattaatgaagagaacattaacaagttatcatcttgtttttcttttcactcttcttctttcaaaaacatttgtattattgtctggctttgagctgaagaaaatttctggtggactgagttttacaatagttctctctctgtcttaatccctctaccccttgactaagtcaacgtcgttgaaaacttcatgtttcaagctcttattccctcacacggaaactactcgtagagataaaactacaaaactcatatttatttgatgcaacagcacactaagatcttagtttattaattattagtggacacaccacttctaagtagatggaggaagttcccaaccttgtggaaccggaccataatcgtagatgacttctctgtggcatgaccaaaccagctttatagcctctggtgtccctatcccggcccctctcgggtcccccgcaggtccaaacctgtgtttatatgatagtttaacttttcctcaaagaaatagaaatagatactttaatttgggagtgtgatttttcctctcaccagtgattctgaggagctccagttgttcttcctcttagtccagcatatgtagtcccattcactgagttccctattacttcctgcacagatttgttacatcaatatcgaagggatagagaataagagattgattgatgataattgtgaaaagatttgcctgaagaaagatgggatcgtttgaaacaacagctgcagttagatgagcgtgcatcctctccaatgcttccaacactagaggaagttgatcctttttgtattccgttacaatctggatatcatatacagaaacaacactatacgtttcagtaaaagaaacacacaagatcatttagacaaagctaataaagtcgatatcaaggtaacctgaaatggtccaaagatttctttggtgacgagttcgtaggttttattatccttcaagatttcttcaatgggaacataaactgcagttggctccaaagctccgtagattgaaggaatcgaatgattcttcaattccttgccaccaaagagtagctttgagccaggaatctgaagcagattctccatgtgctccaacattgcctcagttgtaaacttgaaacaataatgaaaaaataagttttaatgatacaatctcatcagatgattaacaacagatggagaaacaatgaaactcactgtaaggacaggaccaatggttaagtcttccagtttgcgtctttccgctagttcttttaatttggaaacaagaggggtttttgaccagttctgctcagagagaaaatacattgaaaacaacaaagacagaagaaaatggaagtaaacaaaagattcaaaggtagtttcaccataacaattaggatcaaaccaacctcatgaacaaaaagcatagactgtgcagaacacttctgtccactgcacgcgtatgcatcttgatcacattgccatgcaacataatcaacctgacattagagaccgaaacaagggttacaatcacatttaaggagacttgtggaaatacaaatacggaagggtataataagaaacctcctgaacatctggtcctaagactttccaatcaaatccagcatcttccaatctgattcgacccttaaggtcaagtgccaacttttcagctactctagaactacccgtgaagagggtcatccgtgggttcgcctgaaagaagttacaaatcgacaagacactgaattagctcaactaaaaaccctgtggagacaatagacttgtgaattcctgaccaaatacctctaacaatatcttgttcattgtcttcccatcagaatttataaagtccacatcttcagcgggtaaaccacaatagtggagcaatcgcatcatttgctccataacaatgcttacctaatcaaataacattatattatcaaacagatggaaccaatacaattacgagaactatagtaatgtgaagagtaatttataccttgctgtccactttaagaagaggtttgttacccatgtataatgcccccatcaactgaagtagtggaatctcaagtggaaaattaaatggtgtaacaatcgttacctgcattacaaatctatgatttcaaaacaaagcacagacagagttctcaccaattacaaccatctaggaagaatgccttacaggaccataaggccaacggtaaccatgactttgctgcccaagatgattcccagggattgcaaaagaccgtgccaggaaccgcacctgataaaagaaagtgaagcgaaatcataaacatacatttaaagatgtaatttcggaaattcagccacaaacatgaaatgtctatataggcatttttgagaacatgccttcaagaattactaagttgttgaaactaatagccaggaaccaaaataaaaaatggtgaagagagtaatgtacctgatcaccacaaaagttttctaaaaacttccgtgtgacaaagacttctccagcagcttgctggtaactctttggagcaaccctttgaattaacctcgcgaagaaatcagcaacctaatagtgtatacacgcatacaacagtagctcagtatgcatgttattcagaaaacaaaaccttttgaattcaagactcgagattcaacaaaaaaagtatgtgttaccttaggtaaggcgagcatatgagctgcctttgtcgagatatctccatataaaaggtatctgtagaaaacaagaccattactatccttcatatatgaaacaaaatgggaaatgacaaaacaagaagaaatagcaccaaacctcaaccaaatcatacctctctggagatttgaaagggttatggagaccatgtttcgggcactgggataagctgtccacaaatggctacaacatagaacagaggaaaactgaaagttagaattgacacggataaacaacattgtgatacgatcaacggtttttgataggctcgtacctgagttcctgattcatccacttccgcaactttgataaacggttctccatttagaggatctagaagcgtgttatgatttgacgatcctatccactttccctgcactatagacataacaatgaaagtagaactcagagacttcacaacagcatttaaccaacaagctattactcatttccatagcgtcaacgcacaatcagtgagaagtaaagacataccaaagctctgtacttcagcaggatgagcaccagagagctcctcggcatctacggtagcaaaaggtatggaatgattcaatctgcaagatccataaacacaaaaattaaggcaaaggaacactcttttaaatggatcacattctcagacatcaaagagtaatcagaacacaaatacataaagtaccatttcaaactctaatcagctaacactctcttcattacatagagactgagcagatgcggctactcgatgatctaaatctcaaatttttaatacaccaacttgctaaagttttctcttttatttatttatatatatatacaaatggaaagtctattactttaggcaaaaacatgcaaccccaaaagacgaagagcaatgtttaacacaaaacaagaaataatttggtgagatcaggacgtttgaaaaacctggagagagtcaaagaagcaagcgaggtggatgatttgtcacagagagacttagctctcagtgctcggctcgcaaaaactctatacattgcgtaagatccacaagtaacggagaaagatgagaatcagacgattggatgagaggattcaagaagattggtgataaaatagcgaattctcgagtgatttgtgtttagcagcttattaaagaattaaatgtttttcccctgattgacgagaaatacattaatgatttaaagatatttacagataatttcttatttctaggttattatcttttttaccccatagtttctaatggcttcttataaaccctgatgtgatgagtcatgactcatgaggaagaagaagttgagcaaaaaataaaaataatagtaaatctcttttaaagacctcctctaatcaattcgactaatggaatagtaattagttaaatatcaagggaaactaataatgaaaattggtacaaaaaaaaaaagagatttatgattattatctactgttttactcttttgaaatttaaattggaaaatcaatagtattagtgatatttgacatcaaatccagggatcaaccaaggaattttgtaagatgaacacagatgtcaattacaaaatagataaataaatcttgatagataaataagtattaaaatggtgatagcttgctgagtcacgtccgcttgggccattggcccattgagtaatagacgtatacgtttgtcttttacacgaaccgacaaataaaaaataataatattaaaattgtattaaaattataaaagtcttttttcgtctttggaagaaaatatatatatgtttttttcttctggcaagttttgtattttattttcttaaaatagtatatgattttttcattttaaactttctttgtgttttcttcttctcttcctttatttggtgaagaaaaaggaaagaaaaatctcaactttgattctctctccctctatatatactttatttattctccactcataatagtttcatcatctctttcggtctatgaaaaacattggaaaaaccctaattcctagtgttgcgaatcacttttcattgcagctttgaacttcaggtaattttaggttaatcgagctttttcatttgatgcatgacatcggaagatcaaatctttcataggtgattgtataatctaatcctaaggctcgttgaaatcgataattgtactcttgatctacttaaattcagaatttaaattcagaatttatacacagctactatcgttgagtcgaacttaatttgctagttgaaataatccaagcttcaagctttcttgtctagaagtttggtgattcttgttctctgaccttttgggctatatggttgttgaagcttaagtctttgttaaactatgatgataggttatagaaatgtagatcttggtctctgcttctactttttttgggtctgaaaaaaaattgaaactttaatcagaaatttaaagcctagttcatgcaattgctcttactttgtgacttatgaaatgagtttgtaagagtaaagttgaaatctttcatatttggatgcagtctgtgaatttccaacagcaatgacaactccagcaaaaaagagactgatgtgggatttcaagagactgcagaaagatcctcctgtgggaataagtggagctccacaagataacaatatcatgcattggaatgctctcatctttgggtataactttttgttttgttttctcttcaaagcatggctttgtaaacttatttcttcattgtctttgtttgcagacctgaggacactccatgggatggaggtaattatctttcagtacttattggctattgctgcagaccgagatattgtcatgagttaaacttatagctaaaataatcagtctgttgtgttcatcaggtactttcaagttgactcttcacttcaccgaggattatccgaacaaacccccgattgttcggtttgtttcacggatgtttcatccaaacagtaagcccaagcattcagtgaacaacatagtaatagaccaattaggaaattcgactttgataattgaactttggtgcagtttatgctgatggaagcatttgcttggatatcttgcaaaaccagtggagccccatctacgacgttgctgcagttctcacatcaattcaggttttgacttctgaattcttcatttgtatcttttgcattgtggaggttatgcatgaactaaaccaagaccttttgttttacagtctttgctctgtgacccaaaccctgactcaccagcgaacgcagaggctgcaaggttgttcagtgagaataaaagagaatataacaggaaagtaatcgagatcgtggagcagagctatgtataaatatgattcattttgttgtattgactaatgagtaattggatgttgaatagtatttattatctgccttgagtttattttacatggatgtttaaatttcggaaatgagatttctgctataaatatatatatattttgataatagtgaataaccaaatttgaagagacaacagtagaagaaagacttcaaatgaagacatgaaagtaaaacttaaaacaattacagagcaagcaaataaaacatttgttgtctttcaaaccacactttggaaacaaacttgcaaaggtttttcaactatgtacttgaacaaatcattcaaaccaaaagaaaaagattgtttgagatatgttgaagaaacgcttctctgttcttcatttaaacctggatgtcttctcctgcaccaacaacaacctgcgacgagaaaaagcttgtgttagctacaagaacaatttcgatcctgtgaacttaaagaagtttttcactcaccgtgttttctttgttctccattttctctgtttgcttcagagatttaacttcacctacacatatgaacattaaaaacgatcagccacaaatgctacacaagctattcaaagacatttatatgattttccttttaccttctttagcagtagatttcttaattgacttctttgactcttcttgaactctcttagtcctgggtttagtgatcctctcagacttcttctgagacttatcatccttgtttacttgaactgtttttgaattagcagagttggttgctagtgatttctttgtcctcaccggcaggttgttcttaggaacagtctcctttctggcacgtttcttgtctgaaggtttaacaacagtcacgatctgaacaccatctgctgatggacggagcccttcttcggattcctgaacaacctctgaatcattctcttggttcacattgattacctccagagactttctagttcttccttgtgttacagtttccaacgcctgctcttccttagttgtttctgtgacagatgaatcttgcaaagcatcttcttccttagttgtttctgtgacagatgaatcttgcaaagcaccttcttccttagatgtttctgtgacagatgaatcttgcaaagcatctttttccttagttgtttctgtgacagatgaatcttgcaaagcatctttttccttagttgtttttgtgacggttgaatcttgcaaagcatcgtctttcgtgatctctgatgtgatgttcgaatttccaggagtggagaatgaactctggacatcattatcgttgttcagagacatagctgtttcttcagctacaacagaactagtctccgagacctgcacctgattggattcttcagagatattgtacagttccgaaagttccttcatagcatcagcaagcccatccatgttattgcgacgagcatacaatttcaactcttctttcatcttgtcaagtggctagattccaaaacaaacaaagccagtgagataataaaacaaacgaatcaagacttattccaaattaaagctttcattgtaaatgagcattttcacctcacaccctgcatgaagagcaagtttaaagaaaccgagagagatcgaatgtttcgccacggattcagctagcttgatatgagtcagccaataagtagaggaagacaagtcttcaactttctttcgagtcactgatgatctgagattactagagacaggtgttgttgtttcattgaagcttctaggaacaatgcgtgatctctttggcttgacttcagaaagagaagtgacgctgctgctcactgatttaacagaagaattgcttgtgggcttgtttggaatcgaaagtcttcttggtggtagcttggttcgatcaacactcttcttcccagacaaatcaagaactgttgtactctgactaacagcagatacaactcgtgccctgagattcaaattcacacacataaatataatccataagacaaattacattgcaacgtttatataaaccataactgatcatcttaaactagcaattcaagatatgaatcaggagaaaatgaccaaaattctgggaaaattttcatcttctctagaattcagaaaatgaacaaattctagcatcatcaatgtctcgttgaatccggatctaggatcattattgaatcaatagtaccttctgggcatagaagaagcagagaaatcaggaacaggaggcttcccttccttggatctaagagccgatctgagaggatacctcagcttcgagtttattgaattacctgttcagaaattttcgaatcagaaaaacattacgaaaactgaaatgggaagtgataatcagatagaaggaattgaagaagatttaccagaagcagcagagctcacgcttttctccattgatttctccattgatgaacttagaaacttttaacgcttttttgttttgtttagactgagagagaaaaaaaactgaagatctcaatttgaaaaactgtgagagcggagaaatctctgacttataataataacaaaacaatctgatttgtttctaagaactcgtggatgacccctacattatttgatatttctcttatagcctcattattttctattaaaccaattctgacccattttttactctacccaataagggtaaatttgatgcttcatttgaaattgaattgattaaaagtttaaacaaatttatttgagtttatatatatttgaaaatattcatatatattagtttgggaacagagataaaggttttagtatgtaaaaacattagcttgggattaaaaatgaagatttctaaagttaaagggtctactttttgaataatccgtaaaacctaaatttctgttgcagtttgccttgagagcgggaaattggttgaaagtctctttgggagaagatagagagagagagagttactctgagccgtccgattcgattgatttaggaatctgagggacctcatttttccaaacgctccgttgtctgtggggtcttctttttgttttgtttatttttcgaaatttcaaattcaaataacgccgttgactgattgattaaccgtttgttatataactgttaagattgaggggcttctttaatatctgacgacccattaatgttttctcgatactgggcttcatttgggttcggtccaatacttttagtactgtgcttttttaattagaagaaaatggatctctaaagtctaaacactcgatcatctaaaaaaacagagggatatgagtcacaacgcttaagctaggttttgccagtttacaagtttatcctctgtctatctatttttgaccataacaaacaaataagaattttaataaattaaacatttctaatcttgtttgtattgtttagtgtattagtgtatatagtaaatcaaaagtgagatttttaaaaaaaataatattctatcgacaacatgcaatatttgaatttgaataagatggtaacacaatgacaatactaatataaaccataagcctatgttatagtcaatggaattttggtcaagctgctcaaaatatgttcttctttatttacgattattgctgccaaatcatatacctaaataagttttcaacaagctatccacataatgcttccttaaaataactttcataaatattaaagattttaagcttacatgaatggtaaaagaaatttcaaaataatataagaaactatcctacctattctcattgtctttgttcacatgtaaccaaatacaaagcgttggtaaaataaaaacatactcctcttagtgcatttgaaaggaaaaaaaaaacacatctgagtggatgtcatgttcttgttcttttttttttttttatctaatcgatagtgtcgctctattccgactttatctcactagaaacaatataattatttgtttcacattataaagaacaatattattaagaatgtatatttaaatatattctcgttttctgagtatgtcgccggtaattaattatcatatggtgtgtgcattactcagtctacttttcttttgtcaaatttctaattacgattaacttaacaaagcttgaactatagctcataatttttgcgtaataaattccttgcaaaatagtatatcctaggttggtaaaattaaatgtcaaagatacctttttggagtatttattccctatttgtaagttcttgatttgatactgtgttaaatgagaaactatttatggctcatggtgattattattaggtgtccattaatgatgatcatcaattcatcacctttacaatattaattcttctcaaaaaagtaaaccatgaaaaagtcaagaatgtcagagtcgttactatcagcgttaccaattccgttttgttgtcccttgatttagctaataaacaaaaatcaaatagatagttttccggtttaatctaacttggttcggttgatttttccggttaatctattggttcggtttaatcatccaaaaccttttggactgtatcaaagactgaatattacgagctttgatttttttagctcggagccgcttcttctttcttcatcttcttcctcctctcaataacccaagttttttcgccgatgggtggaaacaagcagagatggttctctttccaccaacgatcctcatccgccaccactactactttaccacaacacaaacacgacgagactccaccggagtttctttgtcccatcaccggattcctcatgtcggatcccgtcgtcgtctcttccggtcaaaccttcgagcgtctctctgttcaagtctgtcgtaacttagggtatataccggatctcctagacggtacccgacccgatctttccaccgtcatccccaatctcgcaatgaaatccaccattttcagttggtgtgatcggcaaaaagttgaccatcctcgtcctcctgatgccgcttacgtcgaaggcgtggttcgtgcccgaatggataaagatcctaatccaagtccgggtcaaagtccgggtccgggtgataaggatccggagcctgagattctccctcctgtagaagagaattcaccttcggattacgatgctgtgatggaagcgattcgagctcgatcaaagaattcaatgtcgccgacgacgtctcttgaatcggtgacgattggtcagagttcatatcacccggttcgagccgttagtatgttctcttcttcaactacttcttcttcctctggagttttcgctggtgctgatagtccatttcgaaacgctatgtctttctcttccactgatcactcttcttctccgatgtcaccggaagaagaagagatcttcaataaattgagaggtaccgacattttcgaccacgagcaaggtttgattcttcttaggaagatgacgagatctagtgaagatcttcgggtttcgctttgtacagatcggattctctcttttctccgatcgctgcttgtttcacggtacaatcttgttcagactaacgccgctgcttcggtggttaatctctcgttggaaaaacagaacaaagttaagatcgtacggtcaggatttgttcctctgttgatcgatgttttgaaatcgggaacgacggaggcgcaggaacatgttgccggagctttgtttagtttggcgttggaagatgagaacaaaatggtgatcggagttcttggtgcggtggagccgcttcttcacgcgcttcggtcgtcggagagtgaaagagcgcggcaagatgcagctcttgcgctttaccatttgtccctgattccgagcaatagaactaggctggttagagctggtgcggtgccgactctgctttcgatggtaagatcgggtgattcgactagccggattttgctggtactatgtaacctggccgcttgtccagacggaaaaggtgcgatgttagatggaaacgcggtggcgattttggtagggaagcttagagaagtcggaggtggtgattcagaggcggcgcgtgagaattgtgtggcggttctgttgacgttgtgtcaagggaatttgaggtttagggggttggcgagtgaggcgggagcggaggaagtgttgatggaagtggaagagaatgggaatgaacgggtgaaggagaaggcgtcgaagattctgctggcgatgagaggaggaggcggaggagagagtgagtttggggaaaatgcggaggcgcgtgagtggaaccgtatgcttgaagcgactgggctaagtcggactcagtttcaaggagggcaaaatgggggttttgcttattcctcccagttctagctttttttaaaaaattgtttttttgggcatctctttgttgtttacctttttttggtaaaatgttatcttatttttcctttttttttgttttggtttgatataaatgggtgtaaattactaattttgtgtgaattataatatgtgattatggtttttttttccaatcaaatgacaaaagtgaattgtccatttgtttgtaaaaacatgtctaatgttttttgtaattttctatcacataatgttttttgcaattttctctctttacctttttaggaaattatcttatctaatttttgtaaaataattaattttgagtggaatatgatatgtgataaaaaaaaatttcacttgatgagtaaagcgaaatgtcaatcggttgtaaagagatgtattttcagcttgatgtgatttattagttgaattgacttattgcaaattagagagatgcgtggatgaaaacgagcgtgtgatggagagaattaagaagtcagacagttcgtgtgaagatgtcagaggacaaaactctgaattattctactacaaaaacattccgtgtgatactatgagatccaataactaaattttaagtaaccaatcctgttttattgtcaaattaaatgcaggcaagaggcaggcaaaatactaaaaaagaagattttgtatgttttttctagatattgtaaatatttgaattgatcatagattcataggtctcacataactgagcacttcttcatattcttgcccagcccaagtattggtctcatgggctataaatttttgatgattttgggaatataaatttctagaattctttcatctttataagtagtagtattgttcatatgattgtggattttcgattaataaacagccaaaattcaatttgtacaattaatgaatagccaaatatcagcttgaaacttctttaagacaaaactgcttaagcgaagattggttatatatagtttataacatcgtacgtagatcaacgatcacgtattcacatatatttcccaagtgcaacactgtatactgattcagagaatctctttgaagtttgtttttgaataatgatttacgtgtttgtgaaaactcaactattttaaaatgtttagtggagagagggttagtgtgtacgatttaaatataaaagaacttgagacaaactcattttcttttacccattcttcaaatcacgcgtttatgtgtatgatttgtgttggtactggaaaacgagtatgtcagcatctttgtttaagatgtgtataattaattggtgtagaagaagcgtttgtgtatatgtcacataattattaaatcgcattttgcagacgctttcaatatgatttatcagtagataaagcttaaaaaccgagttctatgtgtggttaaaacaaaaatagtagtcaaaactgaaaaacatatcatatctgttagttggcacagaataattatcacatcaaacatcgaaatgttttttttcgtttgtcgacccaattggaagaacaatatcataagacaagaccgtatggctggggcataagttattgttatccacaaggttcttttgtgaccaagctacttgattcatatccatgtgacaagaagaacaagggtgaattatggatgattgctgtttccgcatgcttgatgatttcgtcaaacagccctaataataggtaagagttaaaaaatttttgtttttatttaaaattcgaatgaataaaaaccaaaattctttaaggataaaatgaaaatagctttaagaaaataaaaaacccttatttttatttttatttttaaaaaccctcttctatgtatttaattgtttaagtacgttttctgctaactcaagataaataaatattattcttaattgtataattttgtttcatgatgttgtggattcaatcagttggttttatttataaacaagagaactagtagtgaagtgatgatttctttaagacaagattgaacatctatggcttgttagatgaaactagttgatctttagtcccttatccgctattatccaacaccctatacccataatgctcagaccaagcaatgcttctcagttctcagtattcggaagctatgttctaaactttgaaatttgataaatgtacttgaaaaaagatttaggtacggtctaaacttgtctctgttttagtagttagaagaagaagcacacacaacatataaattaggggttcctcgtcactaacgcggtttcggtgggtcccacaacacccaacactgagaaagaaacaccattcttctccgtgttctgtctctatctgctaattaccacaaagaagaacttgcaaatcccttctcttttgttcaagtcgtacgacagagcctttgaaagaaagaactggtggggaagcgttaagctacagataactccaagatacgggtctttgtttgttttgaagatcagattcattttacgataattccgttactcgttattgtgtatatatatctctttcccggaaatttcggttcttgttgtacaaaaactccaaaaaaacgcataaaaaatattctgtaaatggttgaaattctctgggaatttcaacgggtcttgtggtatcatgtcacagaagagagagtttgaagaagggaaaggtcgaattgagggcggctcatccgaagacaagcgtagaagattcaaaaggtataaattttgtttcagcttctagggtttacgatgttgttgtagcttgaatcagtcttcgatagttcgattcattcaattgggtttatgtattagctaataaggatgaattcgagtctaaaagttgtgatctatatgttggaacaagtataaatagtgaagtgatcgtttcgttaggataaaattgagcttctatgattaggttttgacacgattttctatagcttgcggagttctttagatgatcactgtcttgtcgtggaattaataaaaaggtttagttttgtttataatcaaagagtgatacttcttgggaagataaaattctattgacacacaaaagtactcatactagatagtatgacaccacgtagtcaccatggttggattccttaataagaagctttatttgtttttcccagtcacttactgttgacaaatcaacaatgtttatgaagttcagattttctaaattgatttttagtgttaatgagaattcctacatatgactttggatcaaaatttagtgtggttcaggaggtaatgagattacaaaccgtcaaacattttctcgaacctgttctcgagcccttaattcgtaaagtggtacgtatctcgttgatataatatagtacccttctctcctagtattgtgtgtttattttagcagtaatttatgagtatcccttggaacaggtcaaagaagaagttgaattagctcttggaaagcatctagcaggcatcaagtggtaaaactatttttcaagatcaacattagatttttcaggctgttctgtaataaataatttcttcccatgttcatctttgttcaggatttgtgagaaagagactcatcctttggaatcaaggaatctacagttaaagttcttgaacaatctatcgcttcccgtgtttacttcagctcggatagaaggagatgaaggccaagctataagagttggattaatagacccttcaactggccaaattttctcttctggtcctgcatcatccgccaaactcgaagtttttgtcgttgagggtgattttaacagtgttagtgattggactgatgaggatatcaggaataacattgtaagagagagagaaggaaagaaacctctactcaatgggaatgtatttgcggttcttaatgatggcattggtgttatggatgaaatctcatttacagataactctagctggactaggagcaggaagttcagactcggggtacgaatagtggatcagtttgattatgtcaaaattagagaggcaataacagagtcctttgtcgtaagagatcatcgaggagagtgtaagtattgcttgttagtttattctctcacattgagtatcattgaaccaatttactttcctgttctcatattttctgtaaattaaaagaagttgtttctttcttatgactctttctctcttatttgtagtgtacaaaaagcatcatcctccttctcttttcgatgaagtatggagattggaaaagatagggaaagatggagcatttcacagacgactgaatttgtcaaatataaacactgtcaaggatttcttaacacatttccatttaaactcttcaaaactccgacaagtaagattcgtcttccttactctgtgcctatgtgactaaggcttctgtggtgggcgtgaatcttttgtgtcaccagtaataatggtttgtgattgattctcacctggtgagaaatacacagttttaacttgtctacatgtaatgatgattgatgttccttgcaggttcttggtacgggtatgtcttcaaagatgtgggaaattactttggaccatgctcgatcatgtgttctagatagtagcgtccatgtgtaccaagctcctggatttcagaagaaaacagctgttgtcttcaacgtcgtagctcaagtgcttggactgctcgtggattttcagtatattcctgctgaaaagttatcagagattgaaaaggcactgatcctctctgtctacatatttgacttggtttctcttctacatactctcaggtttacataaattttctgatttcaggctcaagcggaggtgatggtaattgatgcattgagtcacctaaatgaagtaatctcgtatgatgatgaggtttccatgatgaggaacgttctcaatgccccggcttctcaaggcagtgttgccgggattgattattcgggtctgagtttgaccagtttggacggatacggttttgtgtcaagtcttcacaacacagcagaatgtagtggcaagcacagtgatgatgttgacatggaagttactccacatggtttatatgaagactacgacaatctctggaactgctctcacattctaggcttagaagaaccgcaatctgagttgcagagtgcgcttgacgatttcatgtcacagaagaatgcttcggtcggtggtaaggctcacagcaaaagatggacaaagcttttcagtgtctcgagatggctctctgttttcaagtatgtcaagttaggaaaaatataaaatgagtttagtacacaaaagaacaaaacgactcgctgcgccgcgccctggacagattcgtgtatatatatactcggggaaagcttgggtttctgatgatccagaggcgttcaaaagtgttttctttcttcttcttcttctggttgtctccatctttgtgttaaagatgtgaatatatgttttaggacagcttcatttttgttgaaagcttaaaaaacagggtcttttataatctctgtgattagtaccaaattgcagatttgcagaactacgtttttcttggtttgtcaggtaatgtgaaactgaataaaatgaatattatttgaatcaactgagattttacattatcttctagagttttgtgtttgagattcaaagaacactagactgagtatgaagattttgggtgagtaaaaacaatcagggtgataatttatcatacaatagttttggggtcaaaatggaataattctagagtatagagcccatgttgaaaagctcgaaaattctttccaattccagaagaaaaggttttgctgtttccctgtgagcgatcttcgatactcgtctgggcatggcgtttttgctcaacaacgcttcaatttcatctcatttacgctcgtcttcttcacaggtttggatcaaatcttgttaatcgattattgttggaattttgtttgatttttgtgacaattttttcccttacgaaatttttgaagaagacgggtgatgctttatcaatatcgcgtcgtggattccacattgagccaggaactcgagagaaagctgtaagttaatctctgtttctgttcgagtcctggatcattttggactcagtttttgtggaattttctgcatctattgtgatttgaagatactaattagggttcatgaaagaattggcttttatatagattccctgagactctcatgtgtgtccctagtaatgttcgttgtctgaatctatttgaaagagtaatttttatgagagttttgagttgttgttgatgcttatgctgttgttatatggcattttcttaaagctcttgatgagtttgtgtttgcttaaattgaaatcctgtgtagctcttggctgaagattctgctttgaagagattcaagtctcataagaaaagtgtgcacaaactgaagaggattggtgatgtgctcactgttgttgttgttgcaggtaaaaacactttagttcataacttttggtcgaagctaatcagattcttgttttgttagtggtctagaaacataatctggtatggttcaggaatcataatgaatctgagtaagagattgactaggctaggcacacttagatattttcaccttgcttcttgcaattaagaaagctgtagattgaatctcataggtttcatgtagagctgagcttattatgtcaaatcaaactaacaacgttcttctctgttgttcttggtaatatgaattatggattcacgacatactcgaaatctaaattgtgacttatctcgtgtcttgcttgtttttttgtcttaggatgttgctatgaaatctatgtcaaagctgtgatgaaaaaagaagctctggctgcagggaaaagctcatgagtgttcttgtctttgtatgcctttttgttttatcctttatacagtgtctctttctaataatctcacaataatgtttgtttactcaatgaaaatggcatctaataaagtagactaaaagaaaaagacattgtccagggaaaccaaactctggttttttctgacgttgtgtggaatctctgctttttcttctttttaaatattccttagcttttcacttatttgtactttgcttaaagatacactctccatttatagataactgcaacgattaatgtcttatccatggattaggtgactgtatttatgtgaaattgtgaatgatcaatcacacttaatggtttacactggacatgaaattgtttcgaaaggattagtagagcgagtgggccggttcggtgtagcctacctctatcttgggcctctctctaggcccaatttgggttcaaaccggttgagacgaggtctcaaaccgaaatctaactttacacccttaattttcaacctaattgtgactcaacaagaacatatccaccactgaccacttgttttccacaaatcatgcaaatttgattaatacctactgagtactgataaaaacaagtacaaagagctttcatgctcccttctgataacattggttcaccaaagatgtaatataaaaaatgttggaatattagttgaaccaccttggagaacgtataacaaagaagcccaacaaatcaagttacttttgcttgatttgcacacattcatgtttgaaagctacaattcatatgttctatattatctacatttatactcatagttgatatgttgtcgaaattctatcaatttatgatattgataggtttgcaatttcgtaaaagaaactctcacatctattttgactaacccacacgtttttaaaaataataaaactatgagtaattacacatcctaaagagcatttactcatcagtcaaaattagttgatcaatattgagtatgattcgtgaagtcatgcatgatacaacgtcgataatttttttggtaaaatgtaaaagaatacgtaatcaattttttctttggaatttttaatactttggaaattacaaatttttttgttgaaaataagatttcaggaagacgaggagtaatattcttcttagaccaacatcatgacatgttccctggcgtgattattttcgcgacacctgaagaaacggcatcgtttaggtcaaagtcatcatcatcattctctattttgcaatctcataaagacggttataaaaatcacagagacacacccacagacgataaaagctctaacggaccgaccaccgccaagtttttaattttacactaatgctactgccacctcttattccgccagatccaccaccgtctccgccgcatcactgattcctcaaccgtcaccggagataaatccttaagcaaatagaaaatggcgacgaagaactcaaagcaaaacatgtccgtgttgttaactaagctcggagatcgagatactttcacaatggcggctcgtgagcttgatttaatggctagacagattgatccttcttcctcctccgggaatctccagtcgtttatttccgttatactctccgtcgacaccggagataaaccggcggttcgtaagcattgtattcacttgctcgccgttttatcagtttctcttcctctcaattctctatctcctttcctctctaagatcctcactcgcatcacgagacgtctccgtgatcccgactcttcgattcgatcaacttgcgtcgcggctgtgtcggcgatctcttcacgcacgacgaagcctccgttttactcggcgtttatgaagccgttagcagatacacttttcactgagcaggaggttaatgcgcagatcggagcggcgctttgtctcgcggcggcgattgattcagcgtctgatccggatccggttcggttagggcagacacttttgcctaggctagagaagctcgtgaagtgtaacgcgtttaaggcgaaatcggcgggagttgttgtgatcggaagtgtgattggtgctggtggtttgtctggaaccagtgtgagctccggtggattgaaaggacttgtggattgcttattgagcttcttggttagtgaagattgggcggcgaggaaagcagctgctgaagctttggggaggttagctacaatggagagaaatgagctaggtgagttcaaggctaagtgcttgaagatctttgaaagcaggaaatatgataaggtttggtttaaattgatcaccttgaattttttattggaatgtaaggtttggcttaaagatgatcatagatttgaactttgatatggtttaggtgaaagctgtgagagaggtgatgaatcagatgatggaggcttggaaacaggttccagatttatcagaagaggtttctccacccagatctaatgcttcttctaaaggtatcttccttcaccatttgatctttagccaaatcaggaagctttttcttgtttggtacaatgttagtggttgcttacttgtcctgttttttttttattctaggtgatgcaagtgatggacgatatccttcagggtctagagttggttcaacacctgctaaatcaagaactcatctggttaacagatcgactccaccggggagttcactagccaccacggctaggaagcaggctaatagaaaaagcattgatcagaagaaaaccagtctaacagcatcacttacaaaaccaaacgtgaggagaagattggaatggaaagctggaggagctagtattcccactggtgtgtctcttgaagacgaacaacattgtgatcatgacgagaatgcgaaggaaacgagtcattctagtcacaatacggtgcagaagttaggaggtgtttccagttctcttaatggcaatatcccaccatccggtgctacaatggtaacagggcatcacgtcttgtctgaaaacccaaatagtaataactgcaaagggcttgaagatatatctttgatccgtaatcagcttgttcagattgaacaacagcaagccaatctaatggatcttcttcaggtttgttctaaaacatgatgataatctttctcacattacaagctttcagattgctctcatttccgcagtccctgaaacttactctttgtgattttcattagagatttgtcggaagctcgcaacacggaatgcgtggtctggaaacacgagttcacggattagaacttgctctggacgaaatatcttatgacttggcggtttcaaatgggagaatgagtaacggttcaagcagaaacaactgttgtctccttccttctggaagtttcatcaaatctaaattctggaagaaacacgattccaagtattcagcatcgagaatgtccacttataggaacagaaatgcagaaaccaccgagatacaaaactcgaggcatcggtttaatggctctcctggatttatagtcaacccattagctgaaattcgaccagataatgatctgcaggtaaacaacttgtgttatgtcgattcgagtcaatgtttttttgttgaagaactgatataagtgaataacattattaagagtatgattgtttgattttgtgttgccaggtctgcctcacaattgagggacgacgagaaacaaaaccttcaaaagcttctgagactttaaaaaccactgtgtgaatgtgggtgattcttactgattagtatttttatttttttccttcaaagtaaattctactaattagattgagatcaaagatatctacaatgtctccaatgagttctttgctgaaatttcttatgtgttgctttgttattttcatggtgagtttgcgttatgaggtaaatgagttttaattttacaaatgatgaattggtaatatctgtaaccaagttttaatttttttgcgtgttcaaatacaaaacgatatgaaaagattaataattcttaagaaaattgatttagtagtttcacggattgatagttgaagtaagtcggtgcaactgttattctttctctacttttaaaaatggcttttaatatctcttcattgatttaattattgcttacactgtttgcattatactgattattgtgtcgcatgtgacttcatgggcaattaaatagtttagtaggtctcaaaagctataaaaaaacaaaaaaaaaaaactttacatattactaactattgatttattgtaaaaaaatgcatatttgaggatgggcaactaaataataataattactaaatttatgtcagaatatatttccacgggttctatgaagtatacaacaacttctcaaaactgaaataaatcattttgttcttgagattgctctttctttaatttctgccagaaagtagaactcatgaaatcaaaactagaaagaggtattagatgctttttgttgtatatgatccctcccactcaaaatcataccaatccttgaaggatcaaggattccttctgtgtatctcacccggtttaaattaaaatagaagattttggttcatcccgctggaaataaaccggccaaacaatggaacaacggttcacaccagaagatataaagaaaagatttaaaaaaaaaaatctttatcaacagctaaaacggttaaaaaaatatgcagaaaagcatcaaatctctcagtttctcaaaccatcaaaaagtggtctatgcaaaaattgaccttctttgatgtcttctcactcttcttttcttctttttctttctttctttgtttttcatcatctttatgatacaggagcagtaaccagattcaactcaagaggcttcaaagctgcctgaacaagctcttgaacagtacggttacgtcgacaaacatctgagagctcctcaacctgtcctatcagagaattcacatctgctccataagcaatatcggacaatgcttgtaagaacttggtagattcggtctctgtcaaggctgttcgaggtatcaggcttacactttccttagcccaactcactgcttgtaacctgtatgttcttgtcagagctagcagcgaatatgttacctgaccaatacccaaaacaaaagaaaacggttttcaaaggccataaacatcactcaaaaaatgcagcaaaaagatagatttcctaaatttaccgtatctagccgagaactgggaagtgccccagctaatgaggctatcaatattctggtgattgtagctccccgaggaataatgatattgtccctgatccgtacgaactgttcttcattcacagacttctcgaggtcaaaaatgtcggttagaaaggtcaatatcgagtggcaggcttctctggaaaagaattgttcaaaatatattgttaacatcatttcaaaactctcaaggaaaaacagcttatgatgaacaactttagagaaagagagggtaaacctgtgctgcactgtgattccaatcattgcgcagtttacaagagctggaaatataggagacggaatgaataaatgtggacagtagcgaagacatctagacgccaacaaaaagcagtcatcggctatatctggtctcgcagtgacttcctgtaagaatataaacagaatcagacaccacatcggatattaaaactaagaacttgaagatagtattttactatgtgaaattcgtcaaccttgatacttgtcataagacatgttgtatgtgcaaagagggtttcaatcaggttcttcaagtagacagcacacgatggatcagaaccaaaaatctgcaaatcccacaaaaattagagtctctaaagcttttctataagcattccactgaatggaaagaacacaaattacctttataacttcactggataagtatagaaagcatggctgatgatgctgctgataatggaattgaatcttttccagcatttctccaattgtatcaattatgtatcttccagaagtacgtacctacaatcattgccttcttttagtgaattatcctctatcaaaattgtcatccgacatatagttttagattttctcttatgttcatagacatggaatgtctagcaaacaaaacaatggtgttcaggaatgtccaggaaggaagtaggtaaagaaaaaggaaatgaatctcacagcatatttgcatgccctgcatagagattccatagtcctcatgtcccaaggacgactgcagtaaaaaccatttcaaagtaagaggccacataaaagcaatttgaagagaacatgttaatcatcatgcgcctagattcacttacgcatcaaaaataactcggaaaattgcccaatgcttattaatctcagcagccaccgcttcagggtggttcacatacctaatgtggtagcatttgttagtaacactaaacaaaacacatggagatgtatcgcatcattgagatattaatacacaaacctgaagaggaaggcaaatcggtcaatatgaacagttaattcacgtgcatgcttcttctccaaatcttctttcgccgcttcctgattcacagattcacagttcccatcattataagtcttgacagtatatcaaacaaccatgcaaatagtcaagatggcaaacctctagaggagaggcggctgaaaagcataatttttcaagagcgcccttggcctgatctaaaggcagttcggtaacaaccatactgcacaatcaaattttagagatgtcaataacacacaaatgagatctaatccatcattcagttgaatccataccctaaagcttcaacgagatttagtgaatcctcagcagagactttataaccaccaccgccattgatcgccatacaatagatattaaacaaatcttcaaaatacccacaaagattttttcggcaatctacaatgaaacattatttaaacaggcatcagatatttacaaaagcaaatttgtaacattttgaatccagtaagagaaaacgccaaaactaatatatgcatatcaggtcaacagaaaaacaccttcctgtatctttcattttggggagaagaggaaagaggaaattgattaacaacaagcaatcaacaattacagaacattagttgttagatagctacaagcttttatttagtatcagtatggtttcacaccatatatcatgaaaagtaatttgaaaatcgcattgacgtaaaaacaaaactggaaaacagaattcagtccaaggaaaagcattcaacaaaattccaaatacttgccagtattgcaatgcaccctatatgctagcaattcagtagagtcgaagtcagatccgttagcgtaggttccagtcagacctttcgactagctgccatctttgaagtaggtcagtatgcacaattcgattgatttttacagaggtgagaacttcatacttcctaagagaaaactaacaaccaaaatttaatttagtttgcaagtgaaagagttataactattaaactgatttcctgaatttttgtagtccatgaaactatttagccatgaaaaatcaagatgagaaaccttctcaacagccctaaaagaccgttttttttatataaaaggggagctggtttaaatcaaaatccaatgctaaagcctaaaaccaaaatatctttgccatggtttctcatccaggaaacaacaaagaaataagatagccagatttgtagtgcgtttttgacattattgtattgcaaaccaattgatgaccaaagtttgtatactagtccttgtatgtttgaaaatgattttgcagagaagaatgtatacttgtcataatgtcaatgttatgctcagaaaataaaaagaagggatcaaatttggaagagagaatacaataccgtcacaagtatgtctaaaagccaaagctgcagctgctgcgcaatcttcagatgtgcccattccactcataagaattctaatgattgatggtaatattgaaacactggctggtgcagcattaagccattttgaatatgccccaacaagtaagcatgctgaaatcaaatagggaagcagatatcttgcattaaagaaaaagcttctttcgcataacttggaaggtttctgttgcgcatacactagtggtttccaccaagtagctattcaccttctacatataaaacttagaaagaaaagctattcacctgtctgaagtagttgcgcttgctgaggaagattttgaagcaacgccatcacctgaaagcagaatttaagagaatgaaaattccacgcatgagagatagaacggaatctaaagccattcaaactttaaacactcaagactttataagacacggacctacaagcctttcatcacacaaaaacaatatggaaacccataattcataggcagtgagaaaaaaaaaataaaaaaatttggcagcagtagcttggaggaactatgtataatacaaacctggggcatcacttcagcttcaacaaccgaaacataatttgatattgcccatatacagaacaaaatagcttctgctggacgccaatcttgaaaattgtttcctgtctgggcattggcctaagtacatatttcacaaatgtcaaagatgctgaaatccaaaaggtaaataaaatgtaactgtttggtgctgataatcctaattgtgttctaccctgatcgtatttaactttttcagtatataaaaatgctgattcaatatctcccaatgcttattttgtatttaatgatagaacagatatatgcatggagatccaaagcacaaacctcaagaagcttcatatagagaatcttaagagtagtatcccctcccaggattaacgctgcatctattaatacatctgcaacagctgaaaatgtcacaaacttcatcagtgaaattagatagacagagcaacattccagagaagtaaacaagaaaatgaggtaattggtcccatcaaagatgattgagagcacaataagaagtacatatcaacaaaagtatgaagaataggtaaatcaaaaagtgacgttacgagatacagcaccataccaaagctaagtgactaaaacaaccaaaaacctcagaagaacaatactttatctgcgtcaagaaacaagtgtaaaggattgaaacatagggagaacaacagtgctaagcaaacaaattacgaaaatctaaggtcgcgctgatctatttgggaagctctgaggggtacacttattccttagcacacttaactcaaaagatcttgatctaatgtaatattgagaacaagtaatacaccgctttgattaccatatctagtctgcttgaattccttaaggtcctcatatgagaggccttgataatcttcaggatactgaactctgaagccaacctgtgaagggaaaccagtgtataggtgacataaactgcagagcatacaataacccatatgattttctgtttccaccaaaagatgatcgaccaaataaactttagaaatcaagaattttttcaaagagcaatattaatttaagcataagtcacccgagcatgagaattcaattttgtctctctggattagagcaaaccaatagaaacggcctgggttcaacaacgagcttcaaatattcttgaaagagtaaaacattagagtggtatctgatgactcactcaccaaagatacaaggctctgataagctggctgaaagatatgcagtcttcggtttctctcaacttcaatggatgcttcactacccaatgaactataagattccctgaagattaaaaatcacactctcagaatatgaccctaggaacacccaaaaacatagaaaaggctgaagttacctctttgtcaacataagttgaagactgtgccaaaagttgaaggtcatcgaggctatatcaaattctgggtgtgcagtaacttccagcagggcatgcacaataaccattggttcatctgaacctagaggccagaaatagtaccttcaaacatattagattaccaactaaagcattttgcgcaccagaggccaaaagcaatcaagacacatgaaccagaacacttaaaataacaagacagagtagcagaaatgaggccgtataccagtagctattagttcaacatatgaatcgcctacgtcagcgaataatcgaccaatagctttgacatcttcttcatcctgaaagagaaataattctaagaatcaaaagaaagaaatacaaacatatgccaaaaattacaacacattatgagggatatctttagccacatatcaagtcatataaacagaatataacccttttagcactacagtttaattaaattaaacaaggataggccattagtttcctactatttgatgcatctgataaccttttcccttaatagagtccacgagcaacagaatcatagccgttcaagccagagaccagtgaaacagaaaatttgtgaaataatgaagcttaatatcaagcagattcagccatcaacttgtatcaataccaaaggtaaacagtacctttgaagaatctcttagatgggcctgaagacttaaaatctgaggcacaataacttgaatcaagggtgtttgtgcagaaataccaccagaacttggtgatgctgtgtgatgtatcaattcagagataactgcgaagttgaaaatgaagtttctctattaaaactctaataatgaattctaaattgaaggaaacattggcttgtaggttgaaaactaatagaaggctattttctatttgataaagaacaaaaaaattcctgctcattataatgaaggtgaaaaaaccatcttaaggcaatgcagtatacacccaacacacatcaaacactaatttccaaaattcaacaagaaaagcttaataaccaatttctagaagctcaatttgcaaattctcgaacttcgcatattccaactaagagataacaggtatgctagaaatttcgcagctcccatagtgttccaataccagaagatatcacaaaataactcatccataaatagtctctattcagtaaagatatttcaatttacggggaaaaatatatcaatgtgaagtatcccaagactctaaaggcctatgtatatattagcttttccaactagtataccattaacagatgcctctgatagtggatcacagttcaaacttgagagagctgcatgcaccaatggatgacaggcaagcactgttccaggaatcctgaaaaagaccaccccaaagttcaccagtatacagttcagtcagtatcatcgttgctaagttgaattggtgaaaataaagaaggatagcaagtagaaaccaacagcaacaaatcagataaacttagctttgtgtctaagatgattctatataggacaaaatctatgacccatatattaaaacaatttacaacctgacgaactcgcaatgaatatttgtaatctagacgagcttttgttctaaataaaactggagatagaaaagcaaaagaaaagagcatacccatgcctaagacggagccaagaagcaaatgcctcgagaacctgaaaaatcaaaattacagaacacaattgacaataagtgacttcttgcaacaccaaaaacactagctggtccaacacacaggaacatgggacatttttcagaagctaacaataatgcaagaagacatattaaattttggcaggtgagtgaaaacctaagatgtaatcaagctt

SEQ ID NO: 948 - DNA, 55151 bp, Arabidopsis thaliana
ttacctaaaactagcaaatatgttttgacaaggcaaacatagactctgactggtaaagaaagtaaaaactagtggaaagtaaaaaaacagacatgcatcagaaaacataaaaagaagaaggttattttgatgtgttatacagagggatcatggaaagtgaataacaaactatgtactgaactatgtcacgactctatattaaagataagctctgacctgttccttaagttcggatattttcaaacatgctgataagatactaagtgcagcttccatttgagaagtaagctctttttcgaattgacgtcgtcgatccggacgagcagctattttgtagttaaatgtttcctggtcatagcaagaaggacaatataagatcaagacatcatataaccatctagattaaagctaaacattcctaaagtgaatcaagttaatgaaagggaaaggtcaaacgatgtggtagagatttgtgaaaaaattagaatcttcatttagttacaaataaactaccaacattttttgcaaacaataccatacaaaatatcaaggtcttgcccagccaatactttagggattgaaataacactcacagagtaacgtcgaatgctacctaaacatagatatggaaaaagtaaaaaaggaacagaatattctccaaataggtctacccaatttgaggtcagtaataccagcataaataataagtaagaagatccaagtcagaccaaaataaggcctttcatatctatatagccggatacatgaagtcaaattaattactgagtgagatgaacacttaaacaaaggaataaaaaatactctacctcgggcaaaactgtcaagagttccaagaaaccaggcacatattcaggatgcatatgcatctcatccctaagccagctaattataccaccatctccccagtctgccgcaggaacatgcaccgccaaggcagcaacagcaatgctaatctacaatataaaatacttaaataagataactcgacacaaagtacatgactttatacgcacaacagaaaattccacatatgcacttacctgggtcctaacttttggagggcccttgtggaacttttttaacaatgtctgcatttgagaaaataatgaaagtcaaaattttccgggaagtaattgtccaataccaagaataataggccagaaagatgaaatcatagtaaaacctagatcccagaatactctagttcaactgagttttcctattatgttattgctcaaaggaacagacatactaatgaataactcatgaaaccctacaactttggaagaaatagttaatagaacaaagaattaccgttaatgattgccgtagcttctgaaaagccccaggtggtagttcttcaaaatctcgttgaaccttcgagtgagacagactagatgtcaccagaatgctccaagattgtgtgataaatgaataaggatttacagaaacattcaggtgcatttaccttgcttcgaagggtctgagaacagaatatcaaagtttccaaattgctagaagaatcatgaagtaaattatccgcaacctagaaaacatacaacagcacagagtaagaaatattgtagaacttctccatcaaaaaaaatcctcttctccgcaacaacaatcatgggtctaaaagaaaagagctcatataaaacctagctaatcgtttctctaacaaggtaaatctattcacacaccttacacatacttctcaaaccagctacaggaaaaagtgcacaattgaacttagatgtactgaaaattcgagatttctgctatgcataagcctatatgaccttaacaagcgaatcgctaatacaaattgactaaaggatgaaaatttatgcacttatatagtctaaagtaactcagaaatgaacttagacgtactgaaattttgagatttctgctatgcataagcctatatgaccttaaagagcaaatcactaatacaaattgactaaaggatgaaactttatgcacctatatggtctacagtagctgaaaatcgaacattaaactctagcacaagtgctacaaaacaaggaagaacaaatcgaacctaaacaaatcgagattaaataattgaaatcgaaaagaaaaaactcgcctgccaagcatcgagagttccttggaagttctgaagccagcgatcagcgtgcacacgcactgtatcatccgggtgatgatacagtgcgtttagggcttctttgaccgcgttctgatgctccatagctatgaatctttacgcgttattcgctcgtacggtcaccaaatcacgaccagagagaaagacccagattgagaaatagaagaatttgcccaactgaaattcgggattttgtcaaatcgatttcgcccaacaaaaacaataaaaataaaaactttttttttccctctttgtcaaaaaggtttttttttggcgcccctcaacttgagtgaggaagagagatagagatcgaattttgatctgaaagaggatgaagaagagagaatctcagccgttagatacaattactttgacttaaagtcaaatccttcttcttttattttgaagacagaagttgtttactttttttcagttgttgcaataaattgaagacaacaaaaaaaacgtatcattgattcatcataacataaagattatacaaaggacaagatttaagaccaacatatgttactgaatcaattgttacaagttatataataggacaatacaacaatgttttataaagtgttaatctctctggtcactctcatattctatcttatgatataacagcaaaatgatacacacgcataggataaaaaataaagggttgcattcatttttactgcctacaaaacacatccatcaatcagagaaagactcttttttatgtggttcggttaaagttcccatcaacctgcatatggagccactccggttgagatactcgggtttcattagcttcttgttgctcgtatattgttcgatgaacgtcaatcggtaaagtcccgagctgatacaacacaccaagagcttttagatttagtagctttgattaagaaagataagatttttctatgttcttttagatttgggacttacatcaccggaaggaaaaactcctattgtcggaccagtacttgcacccgagttaacaacttctagcttcattgatagaaactgcagaccaaactccatgcttaggcatgtataattgtaacatataacagagaggtgttaacgacttttacctcaacttgccgctgcaatgactgaatataattgataatctcatcgagcacaagggcttttccgattatctgatcaacagaaatatcttgttgaatgttttttaggctataataacatcattcacaagcagggaccaaaagaacatgtaccttattacatcctggaattatatcttgaagagctgtcatcttctcactgatcttttctcttctagcctgtcaaagacaacattgtgattctaataaaaggaacagtttttgaggataaaatttatggtgattttagcagaagaattactcgctctgctaaactatgccggtcagtagcttgtcctcttcttgctctcacatgaatataatcctttggtggctcaggtttgttcttctgttccgttgctttgcttccaccaccacccgaacttgtttcgccttcaggtctcatcgaaccatctccatttccactttcagatccacacagttttcttttcttatcccctgattctttctattaaaaaagtaaacagatggaaagctttaagatcctaaatcaaactctcaatctaagatcactaagtaagcattgaccattccaacatctatcaaactaatggtcttcaagctgaatccaacttaagtcaaaaagtcaatggagataagtcatctaatctataaactaatccttgatccctaaaccaaagacttaaactttgactcattgatttttagatcaccaccaagctaaaggatctagattcaaacattcaaaagacccaacaaataaaaatcaggacttttcaaaaattgaagtgcaaaatctcaccaattcattaccactgctgctggaagaaaccatctttgaagaatcatcctcagagttcaaatctctagtctttctacttccccagccagcagttagatcggtgactgtagattcctcagccgcggagacgtctttattgccggaatgttcagagcgagtaaagactcgaccggagttaacagctaaacggagaccagagcgaacggcgtcgtttacagggaaaggccaaatctcggagagagtgtaagaagaaggattagctgcagagaaggaggaatcgttcactagtggagggtccatttccgatgatcgtaaaaagggttgacccagatttaggacccggatccgagaagtgaggaacttgatagaaaaaaagaaggaaaaggtttgagctttgcgaggtcttgtcttgtttatagggttgtgtgtgaggtggacaaatagagagagagatcggagaaggtaagacagatgtgggtagtgataatgcgccactagtatgcaatggaagatgatttatcaccaatactttcagaaaatctcattaattacacagcttacatcaaatattttgccgtttctgttataaaaaaaatattacaatggtaaaattttcgtttcgtttagaaacaaaattgaatagaaaagatatattatggcgcaataacctaaataatttctatcaaaaataaaaaataaaaatctcacaattatgtcttttagttatcctttgattaaattattttttactgtgaacaactttggtaattttactgtgaacaacttaaatacaccaaaggacaatgcatctctcttagaaaaaaatacatactagcaaaaccaaatcatgttactttggtaatttcattctgacgtgtttaaggaaaaaacgtatatgtttggattaaaaatttgatcttcgtaccatatgtccatcctagtaagtactcgatcgcctatgtttacaataatattcaccaattagtgtttttttatttaacatagatctcccacttcatagtcatatgttttatgaaagttagttgtgtaaagtgaagggaaccacacaccggtacgtaggatacgatcgaggatgtgacaatgggccatatatttaaattttaaatgcttaatcacaaaagccaaaattctagctaaatatataaaacgctaatatgaaggatagatgacatgtgttttagtctttttgtttgcatgtcaacgttcttcacgttaaatttttaaaaattcagaagctatagttttattatgttcaatgtagttttagcctttttggtagatgacatgttcaaggtagttgcggaaaaatacaaggagccaagagtgtcatttttcgtttcgatgatttcaaccttcatttgttgtgtttattataaaagtttgtatttttgaatgatgaatacagagatatcaaacgtttttaagaatacagtatataacaaacaaaaaagctctaaaactattcactgagttaaaacttttaaaagtcaattctatagcattgaatgctctaaatgtgtagcaagaaaattgtttaaagaccaacaaattagaaattgatgtttttctgcaaaacttttttaattattaattttattatcgaattaagtggaatatgtttatattttgatgaaataatgaaaaggtggaaaagacaagtgtagaaagagaagacacctggatgcaaaggtgtcacacatgaagcccaattcctctctttccatttttcccataaagcttttttgctctactcatcaagatacctctaataaaaaaacaagaaacactatttttttgttatcaatttcttctgttcatttcagtttggtcatgaaattaagaaaattaatagagagaaaagtcaaaaataaaaacatgagcataggagtactatgtgacttcattggtgatggaatgacacagttggccgatttagcaccgactaagtagacattaatcaataatagtttaaatttcaaaataagaatcatatctactaaacaatcaaatacatatgattccatctactattattgtttttttttaatttataaatcatatagtactaattaactaataatttcacattctgtctcgtgtaatcaagacaaccttttcgatttgtttttttggtcgatttgcttaaccttaaaaatcttattacttcaattataagattaaaattcgacaaaaacataacgtttttcctttttattctactggtggtggaaataatcatctagaataataaaattactttaatttgaaaagataaatccaacgaatctataactttaatcgaaaactaaataaaataaggaaaaagagaagatttaaaagcgaagaaaagattcgaaaaagagagagagagagatggaccaaaacggcggtttattcagacgtcagcagcactaactaagaaagaggagagagctttaactcttccccttgctgcttccttctccaaattctcctgacgcgtttctgttcatcttacgattttacacgtctctctaaagatttaaattttcgactttacgtttctttcgggttttgaattttctcactaaagatttgtcttttccatagaaagttcttgaattttctctcttcgtgttcaaagggtttttcagaatttatagtaacccaccaatctactgattgtctccgttcatcgtaatctctcaagatttgatttttatttgttttttgaaattttgaattttgagattctgttcctctttgatcatcatcactagggttttctgtttccagttaaaaaaaagtttggatttttcttcgtataatttaggaatgaggaagcccaagttgtcaaaactcgagaggttagagaaattcgacattttcgtttctctaagcaagcagagatcggttcagatactaatggcggttgggttactctacatgcttcttatcacattcgaaatccctttcgtcttcaaaaccgggcttagttctttatctcaggatccgttaacccgacccgagaagcacaatagtcagagagagttacaagagagacgagctccgactcgacctttaaagagtctgctttaccaggaatcacaatcggaatcaccggctcagggtttaagaagaaggactcggatcctttctagtttgagattcgacccggaaacgtttaacccgagtagcaaagatgggtctgtggagcttcataaatctgctaaggtagcttgggaagttggtcgaaagatatgggaagagcttgagtctgggaaaacgttgaaagctttggagaaggagaagaagaagaagattgaggaacatgggacaaactcgtgttctctctctgtttccttaaccgggtctgatcttttgaaacgtgggaatatcatggagcttccatgtggtttaactcttgggtcacatattacagtggttgggaagccacgagctgctcattcggagaaggaccctaagatatcgatgttaaaggaaggagatgaagctgtgaaggtttcacagtttaagttggagcttcagggtttgaaagcagtggaaggagaagagccacctcggatactccacttgaatccaaggcttaagggtgattggagtggtaagcctgtgattgagcagaacacttgctatagaatgcaatggggctcagcacaaagatgtgaaggatggagatctagggatgatgaagagactggttagtgtagatatgttcaaaagcatttatctttcatctgttgtttttcttggtgtttttgttggggatactaattagtaagaatggttgtagttgatggtcaggttaagtgcgagaaatgggctcgggatgatagcattacatctaaagaagaagagtctagcaaggcggcttcatggtggcttagtcgattaataggtcggagcaagaaagtaactgttgaatggccatttccattcacagttgacaagcttttcgtgcttactcttagtgctggattggaaggctaccatgttagtgtcgatgggaagcatgtcacttcctttccataccgaactgtaagtgatgttttgccctggcttaaacatgttgtggtttgattagtgattggtgtgaactgatggttgtctatgtgcgtggtttcttggcaatatatgaagggatttacgcttgaggatgctactggtctaaccattaacggggacatagatgttcactctgttttcgctggctctctcccaacctcgcatcctagtttttctcctcagaggcatcttgagctctcgagcaattggcaagccccatcacttcctgatgagcaagttgatatgttcattggtatcctttctgctggtaaccattttgctgagaggatggctgtgaggaggtcgtggatgcaacataaactcgttaaatcttccaaagtagtggctcggttctttgttgcactggtaagtttagactaatttacaagtgatctgatcttggtcttctaggttaaaatgtaagagcttctcatatcgaattgcaagctaaactcagatgtttatttgggcagcactcaaggaaagaagtaaatgtggagctaaagaaggaagctgaattctttggggacatagttatagtcccttacatggacagttatgaccttgtcgtcctcaaaaccgttgcaatttgcgagtacggggtgagtcccgctgattcaaagattcaacacttgatgttgtgttttcaattattcaatataaggtaaagagtttctctattctctgttttgcaggctcatcaacttgcagctaaattcatcatgaagtgtgatgacgatacatttgtacaagtggatgcggttcttagtgaagcaaagaaaacacccacagatagaagtctatacattggcaacatcaattattatcacaaaccacttcgccagggtaaatggtctgttacatatgaggtaaaaagctatgatctttttgcctaaagaatcatttgtatctgttcttttctcatatgaattcaaaagttaatgttacattatctgctttgccaggaatggccagaggaagactatccaccttatgctaatggccccggatacatattatcaaacgatatatctcgctttatcgtgaaagagtttgagaaacacaaattaagggtatgagaatttcccattacctactcaatttaaaaccgaccatgcatatctatataacccttttcctttctttctcattcttgatactacagatgttcaaaatggaagatgtaagcgtgggaatgtgggtagaacaattcaacaatggtacaaaaccggtggactacattcacagcctcaggttttgtcagtttggttgcatagagaattacttgacggcgcattatcagtcgccgagacagatgatttgcttgtgggataagctggtgttgacaggcaaacctcagtgctgcaacatgagatgacacataccaaatccttttctttggtttataaaaggaaatagaagtccgaagagttctttttttttgggtagtagtttatagcatatagtttcggttgtattatatcatctttgatctttagtaacgaatctaaaatggatgttttcttttggtcgaattctctattaatattcattctttcctttaaacttattatgtgcccatgaaagcctttgctaaaccgtagttttgtccaacgacgagttttggtcttcctaagccgtagcttcaataagaattaatatttcttgttaaaatgaatcataagaataatgtgtaaaaatgtttaacaataattaaaacactcatatcttttaaaattaataaaatttttagaaccggtttaatattgcggcacctttttcaccatatatataagcccaattttaagaaggtctataaatgatcagactatagatgtatggcatttttgtgggtagtgtgaattccactaccagcgaattggtagagatataataacacatacattgtgttctcgacttgacccaaaattgccaagactaatttaaaacttttcacttacaaccttttttaatgcatttttttttataaattagaagtccatatagaagaaaataatcaaacatgtctcataacagttaaataaggagtaaaatattccaaaatactttgtgagaagtcatttttattttaattatgctattttcatagttatctactacaattatttttgtttgattttttatcataatatttgtctgaaatatttgtttttggcaaaaaataacctcatcttacatagtttcctattcttggcaacaaaatacacatatataaaatgatatatatatatatatatatgtaagtatgtttgggtgtgtttatttttgcataattggattcaataactgtaaaagaaatttggaaccggtatcatcaaaatggagaaaatggtgttgaggaaagtggttcttcttgccattttgttgtctctttcatgtgagtccatcattttaatttaaatacataatcttttattatgttctttagttttcaaaacataattgatgctcaaacttgattctggtttagttgaattgcgtggtagaaatactagttgactgtttttcttttgtttttataatctacattttgagttgattctacaagaatctcttttggattttagtcgtttaatctatcgacactaatttaaattagtgcatcaaattggttatttttcaactattcttatatgtacatgctaggtttatgggtagctaaagcattggaaggagaatcaaaagttagtggacaagtgagagatgaaacaccgcatacatggtattgcaagtacgatgataattgtcgtgaaaattgtccaggttgtactatcactaaatgtaactacggagtttgcatttgttcaaactgttaccatcaacaatcagatctaggtgttgaatcgcatatgtaactttaataacaacagtaataatgattaaataactacataaactatttttacatcttatttgattttgggttgtttgatgcaaagattattactccctatgttcctaaaagattgatgatctagaattctcaaaaatattaaaaataataatcagtatctaattatttgtcgattattttttatgttaatttttttaataaatttgaaccaatagtgtaatatgaaacaattaatcattgtaccttgaagtttattatatattaaaaaaaaatcaatcttcgtggaacaaattaaagatttataacatcaatcttttaggaacataggaattccaaaaaaaaaaggaagtatatatcttaagttaattttaggcattccaccaatcaatttgcttatcgtctttttatgggtcgctaaattttgtcaataaatttcttcttttatggtttatgtgagtgggatccaaaattctccatcttctagctcttgagagagtatcactatgtatttattttaatgctcttcaacaaaatatcaatatgcactaattccactaaagaagattgcatactaaaataagaacattcaaataggctgatattgtattttcatatactttaagaaaatgaagccagagattacaatgttattaactgagttttagttcatgtatattattaacttattaaaaataaaactcatatatatgtgtaatcttctttaatggaattctatctacactgtataataatataatacttataaagtgaaataatttaattgattggatgaatgctttactttatttatcttctatcctaacatatcctttaacaatacatttcttaatcttatatgtatatatatatatatatatatttgtatgttttttggaaaaatatcacctcaaatcttacttaataatttgtatgtatatccttccaaaaaaataaaataatttgtgtgcatatgcgtgtatatatatatacatatactcccagcatttagatatgtgtgaatttgtataattagaatcaatattagcaaaatggagaaaactgtatcgagaaaagtagttgttcttgccattttgttgtctctttcatgtaagtatgtctacggtctatcttttataaatcatgttttcataattttcatttatttcttacatgaaaattgatgccgagttttgatttttagtttgatttgaattcgtgtcctagacatactagttatatagtatatattagaacatcacactttttatcaaaaaatcattggttttaaaatcttaggactaatctagctaattctaaaataactcgatttttttataactcgactaatctagatctcgttgcagtcgtactagtctcaggactaatctagctaaaataactcgattaaatcctttgattaccgtacgctaaattaaattagtgcatcatataggtttgtgtatagcaaaagcatcaaagggagaagaaaaaactagtggagaactaagagatgtaacaccgcaacgaggagggccttgcagctacgacaatttatgccacaaccattgtcctggttgtaaaattactcaatgtgtcaatggagaatgtgtttgcttaatctgttacacaccaccattataattaagtgttaaatcgcatatgtaactctaagaagcataataataataaattgataactattcaaacttcgttatgtgtaatatagacaaaacaaaatcgtcgtttgtctatgttcgagccttgtatgctccacatttatgttttaccgaaagaaaaagcgtcatgaagggagaaagagaagagtgtgatcatatacgctctcacaagtcacaatgttctaaacgtagttgctgccttgaaataacagccggtgatattaatattcctctcgatctaacggtggagatactgaagaaactcccggccaagtctcttgtgaggttccaatgcgtctccaagcaatggtcaataattatcggcagccgtaaagatttcatttaggtactcgacaatcttcatttcttctccattaattagttatctatattctctgcatgtgttatattcaccctccaaagaaaactacacgaagataaaagaggtcatgtcatagaaacagagctttcttgtagaagaagataacagctgatatagacactggagattttctgacatgcacacctagtgtcgaactcgaacataagtcttcataggctaatttgaagatgtgttgaattggtcggctaactgaaatatctaccagcaaaacgattgttcctgggagattgatcacattgctgcgacataacaatacaaaagaactcaaacttaatggtttattacatatgagttcgtctaatataagcaatcacaaaatagtttttgaataacatccataagaactgttacaaaacagagtctgaaacaatcatcattctaatctaacaacgttaaaaacatcatcaacaacgacaataacaaaaacacagagaaacagagctttcttgcagaagaaggtaaaggctgaggaggagcagaaccagcagggttctgttttccggcagaagcggtggtgttttccttggagcaagctaagttacagcgactaggacgaacaattcgatacacaccagagctcgtgagtaaatgtatgtccttgttattgtcttgtccaaatgagtaaatgtaaccaagagcaggtcctgagctagctcctcctggagctgcggtacacttcatcggtgaatccttgctgcaactaaacggtattagagagtccgtgaagtttccactatcttctggtgattcgatcgctgcccacattgcgtttgcataaagatctgcatacaagtacctgagacaaaaaaatatttgaggatttagtgttttagccttttagggtttggaattagggttcatggtttagtttttttacttacgttccataagagcaaggatcagtgttggatcgataaaagtaacctccaatgatggaagcagatccttcatgtttgttcacttcagagtggttgtaaccgagaatggggaatgtcaggtttgaatccgaggaaacattttctccaaaaggcgataacggtgagaaaacatatggtccttcgtaagttctccagccatagtttccacccattgttatgatatcaacttcttcatatgtatcctgttacatttttaacacagcaatcatttcatgagaaactctgcatcatcacagaactagatgcttgagacgtaagaaaaaaaatacacaaacctttccgacatctgcgcacaagaagtaatctggtctttcggaatcgaagctgcagcgccatggatttcgtagccctaaagcccaaatctcaggctgctcattttcatttccttggaaaggattgttttttggtatagagtagtttccccataaaccaagcttagagatttcagatacgcctgcagagtttaaaaacaagagttaaaacaccaaatccaaactcccaaatacaggcttttggttatcgatttcgtcacttaacttggcataacatcaacatcaagcctcaagattttgccaagcaacgacttcttgttctgtgcaaagttgtgagtatctgaaactcctcctccgtcaccagtcatgagatacaaatacccgtcaggtccaaagagaatctgaccaccgtgagatgaagaatacggaagtcccatagtgaaaatcctcctcacttcagatgctttaccaatctttgcctacacaattataaaagcaacaatcttgttaaaatcttgacccccaagaaactcacattttggttgaaatcaaatcttgaatcttttttagttttaaacttaccgttgaagggctcgaggaagtaccgtttgcggtatactcggacacaacggtctgataacgacaaggcgtcgtgccatcatctttaggaagcttcgaaggatcacagttaacatcagaattgcaagcacaacgaccagagcatccaggagatttgactttatcgcagttaaaagacgcgaaaaaccgcccgttctctgcgaacttaggatgaaacgccattcccatcataccaaactgcgtatcgaaactaacttgatcggtaatatcaacaaaaggagttgattcatcgatttccatcggtttacctgagtcttgatccggtattgtacctaaccaaatcttaccaggttggttagagaaaaaggcccggttcgaaccatcaggatgagcgaccatgttaaggtaagaaccagttcctatcttctcaagacatattcctttaggtgtcttaacatcatcctcatcatcatcactagtgtctctgttaaccggttcaccattgaagcatttggttttgttgttgttggtttgagatggtccaccaaaggctgtacagaattcggtttgggatttccaaagatcggttaatgtcgatgaatttgatgaagttgaaggcgaagtagcaccaccaagtagagtgggactaaaaggagaagaaacaatggaaatgttctgacatgaatcccaaagttttgaacataagtcttgtgatgttgagttgcagagaattggaactagagaactatcatcatcaccaaacaattgtcctgagaattcatcacatttctgagggaaacaaaaaaaagactcagagattcagaatcaattagcttcaaacagagcaaatgcataagtgaaagattgattcttattcttaagacttacagaacagagaatggatttgagaagagaagaacaattagagtcagagatgttcatggagttgaagcgattctgtaattgaagatcatctttagaattgcagcaagatctttctttgtaggaatcgcagaactggagtgtctcgttgttgttgactggagtctctgacaaaaagacgaaaaattcatcaaaacgacatgaacacaaaagccattaaactcaaaacgacatgtacgcaagaacacttcaactaaaaacgacatgaacatagagaacacttacttgaatctgagcaaagaaggtgagaagttgtttcagagagtagaagaagcagaagaagggaacagatagtgatggcttgattcgtctttgccattattggaactatgcaacaacacaattctctctctctctctcacacaggagactcaaagctatatagtatatgtgtctaaatagtatatatgtgtatatgtggtagtaacatagttgtgtctaaatacgacataagtcgttgaaaattttgtcaaaatattagagaaaacttgagagagaaatgaataaattctttggatagggtgagacggttacgctaatttgtctatctcaaatattaaattcgattgggtgttatggatttgtcaaccctgttctcgaagcttgattttctcaaaagtttccaatgttatgatttttttactatgaaagaagaaatgtggcatcagtttttatttctaacttacttttgttgaaacttgataagatactaatagcaataaattttgccaaccaacatatatgatgatgatgatgatgatgatgaactaacaatatcggtcttgctctattacgcttatcattatgtgctatattttacacatttagcttatagccttaatttttatccaagtttactaaattggttttcacctcatgacattaatattgtgtgttgacttgtgccaacttctgtctactagttctcaactcattaattattttttagttttctcttgagaactcagccacaaaacgtaatgttttcgtatatgtagaggatagattttataaagatatagtaaagagaacaaggctaagacattttgagcatttagatagccaacataggactatactatacatcttttattcgtatttaagtattctaagatctatttcttttgggtttgggataaaggacagaattaattaataatagtgttctccttacgcatgttaaccatattaatactttagcagtacctaacatgaacaatgggtcaatctcgtcgtcaatgttaacatttttacatcttttaccttatattattatattttgttaggttgctccgcatttaccttttctcacacgcttcacaaagttttcttcatttttgcacctttggctaaatcagaaaaatttaaacattaaccagattgaaagttatgacagccgatgaaaccactgattaaacaattgtctaccgactgaaaagtcttacaagtatatacaaacctactaaaaagcttaaaaagtggattatgatcaaatatgaaacacgaccgaatagattgaacaacccactacgactattatttatactatagaatccatcgttaacttagagccaaccataaagctatagtctgaaatatcaaagcgggccatgtcggagcagattgaatcatggtccacaaacttttaattctaatttgcagtatatataatagacctgacgatatcgaattttccgaaatttctcaaactttttgtaaatagtaaaacatcaaatttagtaaattaagaatacattttgaatataacatattacaaatgaacgacatattagatactatagtattgtgtctctttaaaaagatgatatttagaataaaatgcttaaaatactattcttaattttgacgtaaaaagttaatacatagaaattgatgggtttaattcaaattagaaagcatgttaaagatatagttggcgggtaagtttaaagtatcctcaagcaaagaaaatatgcaaattaacggcaacttggatctcccttctcgacatttttctcttaattgcattcccgatttctcacttactttatgaaaatttagttatttcaacgccatggacttttattcaataatgatcccatttggacttttgaaatagtctacttcttatcatgtagtaattttgattatggtccatacattctagaaggtaaatagagttttacttggctttttagatattttaagacaattaatcagtaaactccaaacgttaaatatatactgtcatgtaaattctaatgtgaaatatgttataaaaatctatcatgtatatcaatcaaccattaaatgatgaaattacgtactggactacaaatcattcatcaaccacgttattagataggaccaacaaagataagagagcaaatatttcccgtccatgaaaatgatatatggaacaaacaaagtgtataattatcacaagataaagtttgtatattatatatttttataagggtttgactctaaataaacacttgcaaggttttcaaattgatcttttgttaaagtttgttgagaaaaaatcgtcaccacttgatttattagatattgatagttgcttccatgtggatttgcacacatagttgattcctctcgttcggcggccaaagtaaaacaagtcttatatgcatattaaatagtgtaatgcgttctcaatgcatagatgtatgactaaaaaaataaaatgaaaacacacatttatggtgttaggtgttgagatattccatgttaatttttaatctaaaatctatggttatattcacacactatttatatatcactatttgaacactgataagattttgcttttttccttttttgactaaaggatacaaatttagtttaataaatacacgaactggaccatttccgtattacccacttcggaatttttgtctctcatctgaaaagtctttgttgacctagacaaaaactcacatcatcatgacatcatcacgattagacatacgtacgagtatgtttcaaatacaaagctaaggtattgtctgaaaattttaatttataatacaaaacaaaatctatgagtattatctctagttctttggataattggtttcttccaaacaaaaggatctcgtaaatcttattgccgcagtggcaaggaagttggtacactaacttgaatgacaaaataagaaaagatcgaaatttcaagcacatcgcgttaatttccaagaataccctccaaaaaggggaaattgaaaccaattattggccttatgttctccaaaattattggtaagaaatgctatgccatgctattgcatttctactttagcttatggtttcaaacaatgtattgctctaaactgcaaaatgatcgagttatttttttccctttgaaattggtaatgaaaacaaaacagtaagcgaattctgttcaaaagaaccaatcattacttctccaataatatctctgatacaagaacaccaaaataaactttgtttgaagactacaactctaaagtttatccatcaagtgcgccaagagctttcatgtcctctaagaaagctgtgtacgaatcatcaatgctctgtggctttgaagctgcagatgtcttggctggctctaccttcaccgttgcagcagaagccatagctcttggtgtaaaactcaagctcgaggctatcgaagtctttggctttggtttcgtcacagttgctgattctcttctgactcgaaccgacgcagggacctgcagatcaacaacaacgccataaaaatcggttgattcgatgtttgggattcatatgcgatatatcaaaaaggtgttgcgaattcatgtaactcaccatggatgtaagctcaggtgtgtgttgagcgagtggtctcctgacaacagtaggagcagcggattttacaaaagatggtttgtttggtacatatggtctgatcattgcttgaccgtcttgaaaactagacggtggtggtcctggtggaagtggcggtctcatcataggaggcggtccaggcggtgggccatacggtggtcttgggattagatgaccaacaaacattccaggatgaggaggatgcatatcgagtggaggcggtggaggtggaaaacgcaacattcctggaggaggatgaacatcaggttgaaaattagtcagtgaagcagcagctcctgcaaatgttgattgatgttgctgatgtaaaggtgctggtggtggtggtgcaaccatctttgagaggttagcgttttgaaaactactggcgttagattctgcaggacgactctcagattcattgcttggaatgccaggtggtgggagaagagggacggaagttatattagcattctgcaaaatagatatggaaaaatctgtaatcaagtttcaatctttcttcatttgatacacgaaaacacataaattgccaccattttaagatagctatcagtaacagaatgaggttttaccatgcgattgtcgaaggtaaaatctgatgattccgggaatctaccatcgccttgacttccacttagaccaggaggaggtggttgggaagattgaggaagttgaggaggtgggggaagaggaggacgaacaaaatcctgctcttttggtggtggccccggaggtggtggtggaaatggtgaatgtggcaaagtaaggcctgtagttggtggcaaaggaggtagaggtggaagtggcaaagaagcagataaagcattatccccatccggtagaggaggaagtggaggaggattaactaagacggaatcttctgactcggtaatagaagacaatgcagcactactagatgaagcaccatctgaggagatagcaagtcctgaaaaacgttagaaaaaaaaatctttttacgatcaataaaaggaagtagggaaaagactgttttgatttgtaagaagcagcattaacaaaagatatacctatggatgaattatacattggtggctttcccgggggtggtgcaccagttgggttcaaagtagggtgataataaacagagtcctgtcataatatgcagaaaagtgagggaggttttcgaaatcaagcagggggaatagaaagaaaactaactaagtacctctggttttaagtcctcttcgccagttaatcttcgctgagggggtagatgactacatagaaaacaagaacaggttatacttatatctaatagcaagccgatgacatcttaacaaacaatatatatagcaaacgaaaagtaacgcgatgaacgattaatcacctgaacataacagaggttgttgcctctccttgctccttctttttctcatcatattcctgtaaaaacaaaagagacaaaggaataagaagacaggagatgccaaatcataagctggggggagtcctgtgggacaaaggaataaaacctaactcaaccagagcaatacctttctcttcttcaccaccattttaagagtatcttcaagctgtctctttttatgttttcttgctttgtccaaagcaccttccgcctctacaccaaaaaaatgtcaactctgtattagtttgcatagggactgagcaaatctgtatatctgttgggggtttagagatatgcttgaaacttgaaagccaaaaataactacgaaaagaagaagacatattcgatttgaaggtataagttgttactagaagtagagtaaaacttacttgacatatcaagcttcctgatctgatccttgatctgttcaggatccttcttcaaaattccaacctctcgtaccttttgcctctctttcttgttctgttaaagaaccaaagttaatgtaaatggtaagaacattgcccacaaattatatttgctcacagataatgagacaccaattgaacaagatggtaaaaatctcatcttcactttcttagctactgcaaagctattgacctaaacgagtctgaacatgcaaatcaaactcacaaatcaatttctctaatgcctaaacaaccaaagaaaaagtctaattaaggaaaaattagcctttatatgaagatttgtccacttgaaccctaacaaagagtaatatatgaatcaaagctaaatcaaaacagagcagttttaacctgaatctaaactcatacagctacaacaacaattaatcccaattcgatttcaccaacaaaaaagaaagggaagattgagaatggagaaaacaaaagcccttacacgcttaatttctctcttgcgaatctgcttgcgataagcatcagtagggttcatcactttgcctcccttcgtcgtcttcatattttccgtttaccgttcttcaatctccctcccaccgatttaggatttgctcacagatattttacaaggaataaacaaagatcttgtggagatttatcttttctctcgcacaatataatttgaattttgtttcctcaatacaagattggattttctctcctccctgactctcgctcgatctatgtctatctacgaagcaaatttttgtccttcattgtcaattgaatcttgggccgttcgtggattttcttatgtatactgaaaaagcccattagtaattttatacatattattttcgtaaccaatgataaaaatgttataaacaaaattattactattgagagcatgggtgaaaaattgcattttcacgttcaaaagtacgccgataaataaaatgacatcgggtaaaaatattttttcaacatgacaacaaacttaatacatgcctaaaagcattacaataagtaactaggcttgagcaattcacacaagataggttatgacccataggatgtgtttcgttactggtcatcacctctacgtgacaaccgagcagaaccagctttagccaaacccgaatagtagtctccgacgtttgcaacaaatagaggatctctctcttcaatctttagagagtcgtaacgttttgaaccatgatcgttcccttcatcagattgctccaagtcttctgttaaatcttccattgttttcttgagattagccttactcatctgtgcagcttctcctgttgaaatccctaccattgttatctttggtaagaatggacttcgcagcatttctctttctctagattccatatccctgaaaccgaaaatttgtgcattttaagatttttacactctttcaacaaccttttgttttcaattggtacctttgatctgatgaacccttgtgatgtgtgtgttcttttcttgatacagagtgactgatccaatctccaaaaggaaaccagagatgttgctgtctcttttcagcttcacttggactatcatcttctactctaagtagtgatgcggaagtatctgcttctactgaatcaccaagacatcttgttgctgaccctgacgctctttggatagaaaatgcactcctaagagaagcgagagagaaaatattagctatctaatgaggcatttaataagtgctttaatgttggtctgtgtacatcacatcaatatgattttgcttgcacggatctgtagcaaaattcgaaaatctaaatcctcctatataactcaactagaagaaattgaaaccctttttagtttgaatatatacagaactgaataaatgtccaaacttcaaattctgcttcagcaaacttcccagtttttgtgtcaaagtgacataataacgtttcactatgtaaataaaactctgttggagaccaaattactagcttattcattaaacgagttggaaaacctagctttgaagaaatagttaagaaacaaaaagatagatgcacgagcaatgcataccttctttcaaaagaatcgaccaaataaggtaactttggctggatacccgtggcttttcgaaaccatctactacctaaaagtactctgtcaacggcatataggagctgaatctctgcagcctttgccacaacactcaaaggaattccggaagtgccaatctcctccatggcttcttgaacctgcagtttgattaacacaagaagaaaaaccgtaaagtttttagaaactctataaccaccaccaataaacaaagcaaaaacattatcaatatctttttctgctaccctggttaaaatttattatctctacgtggaggcacccagcaagatgataggaatagcaactgacaaactctaccccggtagctcttgttgttgactataacaattacatgctcatgtttgttttgtcataacaagaatcaatatgtgtacctctggcggctctagcatgctatctcccatctcttccataacctctgaagctaaactatcgtcaacaacatcccgtcgtcgttgcacatgccgggtttggattaaagtatggaaatgttgatctacagactcttccagaatgttatcaagtacagctttatcaaagaagtatggggtatacctggtaaaggtaaataaaattaggtactaaaaagttataacaatcccaggatttttcatacaaatggtaaatgctcgaagaatttttttgcacaactatcaaattaaaatacaggcaagtcagcaagaaaattgaaaagccatgtgttctgatagtataacttggagggagttgattacacgaagctaaaatattttcatgtcctaacaaattcacactgctttacatcagttaaactcaccacttaattccatctgcagttgcaacagcaatgtccaggttttgagcaccgaaaacagggacaccctccaccttttgtgttttaccattctgtggcattgacttgagaagtttgttggcagccttcacctgcgaatcagaaatcatttcagttagaagtaagttaatcaaaggagcaaacaaatccaagtcacagtgtcacactgacctgtctctcatttggaacaaactgaaataagtgaggtttctcctgaggaaaatgaaacaattaaaactcagcctctcgtacaattcaaatgtagtatataacaagatactagttccaatcaaggcataccttgaaatgctcatatgccaaatcaagtcgacaagccccaaccactccacttggaatatttagttttttaacatatgaaactgagaaaacaaacaacacgtcaggacccaaaaattggcaatctggtttgcagtttcaggatctccattgcaattcattttagattatttcagccttattcaaaaccagaaggctcttatacaagcaagtagtatctagactaagttactggaaactgctaaaatagcttacaaagagaagtgtcaatgcacctgcatcaccaagatccatgaaaaaacggaacacagggccattcctctcgctcttagtgatagtcgaaaacattttctttagccactcaggtgttctgtatataaacaaggaacaagctaagctaatggaaactgaatcgaacatgaatattcgagagtgagaagtaaaggaagaagagtgataataaacctcttggagatgaaaggaatatcgaagtgagtagaaacagccattagaccagtcccagtaaggtcacacatactaaacacctgaccgacgaaagcaggtccaccgcgtttcccatcggagctgagagatgatatcctaaccgttgaattaaggccggaggaggacgcggatgatgtgctcttgaccgtcgattcgaaaggggacgagacatcgtctgataccgagaatctaagtgggaggcatacacgagacggcgccgttttgggagggaagagaggaatgattgaggaagagattgaggttaccgcgctatggagaaattcggcggcgacgtggcggcgatgttgcttatccggcgaacccattaaactgactgttctgttcggtgcgcaaaagccagaagatgactttgtgaatttagacacaacaaaaatgaaaacattattcggtaagaaaaaaaaaagtcaagttaaataggttttttttttttggttaatccaatagaaatcaaagtttaatcttctgttatattaaacacttgatgttaattacgttagatttgactacaatcgctttgtctatagatttcaatttgtggaaacaacaaattagctaagattatattgttcaatctggaacttctttgttgaattactacactgatgattacagctttgacggaaaaaagataagtaatggcattcaagtttccaagtgcaatatgctttcactcttatccataagcttgaattcaaaacgtacgttggtatcaagcttactaaaccagtgttccggtattcctctaatccaaacctttttcatatcattcttttggaggtcataaaaagaatgtaataaggggaaataatcgtttcgggtgccaagataacctcgccgttttgagttgtaccttccacattaaactcaatgtcattatcgactaaatgcatctgacaaggctgcaaaaccagagatttccttgaccattttccagcatcttccaagacccacaagtccaccaaacccgtttgtttcatcatggtataatcaaaaacagctggttttccaccatactctataaatcccacagactcagaaaatgcagacaccttaagaggtccttggatcatactgaactcttcagaccgaacgtcaaaactgacaacgatatcacgacgcttccaagtggaagccaaataatatataactccattgacgcacaatcctagtctcgtagggagatgaggttgatcgaattcaattcttttccacgaacctcctggttctagtacgaagacccaatgctctgaggttatcctcttaagcctttttgagaatagtgcaacagtgcaaactactttgtattgatcaagaacaggatcgtatccgaaaaagtagaggagactattccagtgggatttttgagcaaggatgttggatttgacagcaggtaaggttacactttgtctggtggtgggattatagatagacgccgttctgcaaacaacgtatagaatcaagccgcgaagaaccaccatgttgcgtcctcccatccctgcaattgtcaaattttgttccaaagactcagcactgctactagacgacagcagtacagactcacatgggtagtggcaaaccatcagtgaattacacaagaggtggtctaccaaactcatgtatagacgaggtggtcgccgtggagttttgaccgtaagataacagttgctaaaaaatcgggaacggataagagaagaccataactttgagacgcacttgaatctcataagagatttagcaggcaatttagtcagaatctcgatcagtagatcgagagggatctccggcgcgaccaaagcgtcttctattcttcttcttctttttcttcctcttctcaacatcacctttgaagacctcgtcttgcatcgaaaggatgaaaacatagctgcagacatacgcatagctacttacttatgtcttaattcgaccaaaatattttgttttctaaaaaggatctgagtaagagaacagaggaagacgatcaaggtagctcacgagtcgcgactatagggtttgaaaattggcgtatttcttcctttccaatctaagtagcccatgggctgattactactttactaaacctttgggctaaaaataattgagcctccattgggacatggacgaatttctgtttccaataagtttatcatgggcttttattttcaataacaagatgcattttatcaaagttgaataacaaatcaataatatgtcggtcacttttctcatcatgaaattttaatccttagaatgtctttttattttgtttttcagaagaagaaaaaaaaaggatgtctttttatagtttttttgattgactataattaattttcccaaatcgaaactaattgactaattgagcactagaagtttagtcaaatgtgaaccattggatatagaagggttgcaaaagctttcctctttctcctagcaagtagagtatttaccgacacttctcgaatttcagcagcggtttttgatgtcacgttgtgcaagaggttgttacattctttccaaagcataaagatcatagccatttggaagacagttcagaatctatagatataagaagggttttgatcatatatatgtaagataaagattaagtccactcaccatctattactccatattccctaacaggcaagatgggacacattttgactataaaggatagaacactaaaagcgatatatagatgtaatgtttaattacttcaaaaatcacaatgataaacgataaaagctaaaagaaaaatattcgttaacgttgccgagggaaaaagccaaaagaaaaataaaaaggagacttcactttgatataagatggatcatctcctagtcaaatttccattatccaaagaagaagttcaaaaagactgaatcaaactaataatacacaaagttgaaacgaaaaaaagtttataaagtcgaaagaagaaaaatgagagaaaaagttcatgagagtggtggaagcacactcgttctactacggacgggtaccgtacggaacatggtacctttattcatatttaaaaaaaaaaacgcatagaaaaagaaaaaaaagaaatagtacaaataagaacaaaaggtctgcgtcacgtgggttgtgttttggcgtgtgttgtaaaatgtgaactgtttatgtggttttcatggacacgtgtcaagtttccaagggagcatcatctcttcaagcatatggccaccactttgtgatgcacatggctgtttctttcttatgttgagagtgtctctgtgacctactcgcttttatttcccatgtattgtatttaattccaacggtcattcacgcctacaaggctattactttaacttacataagtttatactctctaatgacgactcactttcctaacttggatacattttcatgtgttttgagttaggaaaagatcattaacatctctagtttgtctgcaattagattttttgtcaagttaattaaataattaattccctattgtagtaaaagatatagatgatgaggtgtcatgaatcttgcttgacgcatgaagaaaaaatgttgaaaaaggcagtaagaaaaagatgcctaaacaagactgagaatttaatagattaaatatataaaggaaattaataaataaatgaaggatataattgtggtgcgagagagagaggtcggagtgtgttagcttcccatactgccactaacctttagcggttttctcatcttctctactcttctttctcttttctgagaaacccaaaagacaaaaacgaagaagaagattaggaaatcatcttgagaaacaggtttctacatctctgtgtttcaacattttctctgttttttttaagttgttgagctttctggtggtgttttaatggagaattttttctgataatttgtatggtttttaattgtactaggaggtagcaggagaatatgggggacaaggaagaagtccttgaggctgttttgaaagaaactgtggatctggtaacagatctactctaaagttttaatttttatttgtttctctgatgttggagagaaagaatctgaagaaatttgttttcttgggttttttcaggagaatgtacctattgaagaagtttttgagagtctgagatgtagcagagaaggtctcactacagaagctgctgatgaaaggctggctctttttgggcataacaagctcgaagagaagaaggttttgttcctttctctatgttgtattcatgtgtttttctggaattttgggttttggtctatagctccaaacgattataatttttatgtcctgaagcaaagttcctttttttttttttgttgcaggaaagcaaattcctgaaatttcttggtttcatgtggaaccctctttcttgggttatggaagctgctgctatcatggctattgctcttgctaatggaggagtgagcatactctcttacatattttcattgttttaaagttacctcttttattaataatcttcatttggtctgtgttcttgatgatgctttgtttaccaggggaagccacctgattggcaagactttgttggtattattactctgcttgtgattaactccactatcagtttcatagaggagaacaatgccgggaatgctgctgctgcactcatggcacgtcttgccccaaaagcaaaggtttgatatacctgcttattgctacttgttttcaacaatgtcatagattgttttctggtatatcagttagttgatttggttcttagctgagagacggataccatttgcttaatgtatatttgcatctcccttgtcaaaacgtttgtaaaggttcttcgagatggaagatggggtgagcaggatgctgcaattcttgttccgggtgatataatcagcataaagctcggggatattgttccagctgatgctcgccttctcgagggtgatccccttaaaatcgatcaggtttgacatacgcttaatcttgtggcggacatagcttcaatcatagctacttttggatgtttggatataatactactaagttttctttactttcgagattaatttgtactgaagctgttatgaaccctttgttctgtagtcttctcttaccggtgaatctctcccagtaaccaaaggtccaggggatggtgtgtattctggctccacttgcaaacagggagagcttgaagcagttgtgattgcaacgggagtccataccttctttggaaaggccgcacatcttgtcgatacgaccaaccacgttggccattttcaacaggcatgatacacgttatcaaaattctcattgttgggatcttgtatggtgcattgttgttcccttttcaagtttgttcaaactatattaatacttatatctgttttgtatatgttcaggtgttaactgccattgggaacttttgcatctgctctatcgcagtggggatgataattgagattgtcgttatgtatcccattcaacaccgtgcatatcgtcctggaattgataaccttcttgtgcttctcattggcggtatcccaattgccatgcctacagttctctctgtgaccatggccattggctcgcataggttatctcagcaggttagccagaaccacataagatgtatttttatagagtttctgttttatattttatcattttatgtttgtcttttaagttcttaaggattttttttaattattcattaaggtttgatgttaaacttgcttgatgttgaatgattagctgggacttgataactttgtcttgaaatatctctatgctttaatggctatatgattatattctaatatatatcgcagggagcaataaccaagaggatgacagcgattgaggaaatggctggcatggatgtgctttgcagcgacaagaccggaactttaacattgaataaacttactgttgacaaaaatcttatcgaggtaatgtgggcttgttcaaataaacacatcttcctaggatcccggtagctgatttctgaatgagagcaagttttttgtatataggttttcacgaaaggagtggatgcggatacagtagttctaatggcagctcaagcctctagactggaaaaccaagatgccattgatgctgctatagttgggatgcttgctgaccctaaagaggtacttttatgaatactggttgccccacagagacgttttatttaatttactacagaagtacactgttagtctaaagcttcctcaataatactttttgtaggcacgggctggtgttcgagaggttcactttcttccattcaatcccactgacaagaggacggctcttacatatattgacagtgatggtaaaatgcatagggtcagcaaaggtgcacctgagcaagtaagctgtctgttcccgtttatgttctattcaaaatattttggtgtagagcatagtcttattagcttctattgtcgatgtctcagatcctaaatcttgcacacaatagagcagagattgagcggagagtacatgctgtaatagacaagttcgctgaacggggtttgcgatctcttgccgtggcataccaggtaactggagaccagctcctcaagtttctcgtgatatattagtgtaagttgatacaagattcaaggttgtatgagtttggccttctacaggaagttccggaagggacgaaagaaagtgctggaggcccttggcaatttatgggtctcatgcctctttttgacccacctaggcatgacagtgccgagacaattagaagggctttaaatcttggggtgaatgttaaaatgatcacaggtgagttttttgttctactcagaacttgaatgtctacatatcttttttctttgccttttatataaatttgttagtctatgatgctttaatctttttttttcttcattttcctgatattgaaatcgtatccttattctaattgacacatcttaatcttgacagtcttttgattcttcatcaatgatgttgttttgcctctcttcttgtccgaattcatttttcttttctaaatgtttgtggctttctacaggggatcagttggctataggaaaagagactggccgccgtttaggaatgggaaccaacatgtacccctcatctgctttgcttggacagcacaaggatgagtctattggtgccttacccatcgatgatcttatagaaaaggccgacggctttgctggcgtttttcctggtaaaatttgtttgcttctgtttctctgaaaactttatccagcgtagttccaactcagaattttaaccaaattattcatgaaaacggtttgcagagcataaatatgagatagttaagcgactacaagcgaggaagcatatctgtggaatgacaggtgatggagtaaatgatgcgcctgctcttaaaaaggctgatattggcattgcagttgctgatgcaactgatgcagcacgtagtgcttcagatatcgttcttactgaacctggtcttagtgttatcatcagcgctgtcttaaccagccgtgctatcttccagagaatgaaaaattatacagtgagtgttgcatttactctcaacctccatcacacttttaactttctctgcattttcatagaagaatcatgcaatgtatcatgcagacaatatcattggttcttttgtcttgtaaaaaaataacttgagctggcttattgtttttctggacagatctatgcggtttccatcactatccgtattgttgtaagttgtcattcgatttgttgtatttttcctactcgtttcgttacacaagttctcaatacaacttgattatcatgtgtaataatccttatgatttccttttctacaatccatgttaattcagcttggcttcatgctgctagctcttatatggaagtttgactttccacccttcatggttcttatcattgccattctgaatgatggttagttcattatttttgcattcgtcactctatagttcagtttctactactgtcaaaactgtaccaaaataagagttcagcatatctatacttctaaccctatggattaactcttatggcattgactttgtaggcacaattatgacaatatcaaaagacagagtgaaaccttcccctcttccagatagctggaaactctcagagatttttgcaactggcgttgtgtttgggagctacatggcgatgatgacagttatatttttctgggctgcatataaaaccgacttcttcccggtatgatttctctctgctcctcagtataacaacaatacccttgctttgtttttctctctctggattgtgtgctccattaacacgtctgaagttgttttccaacgctagtctactaaaacatcgtaaaccagtttcaaattcctgtgttctgtatcttagtgaccagcttttattatttgaattcagcgaacatttggagtttcaaccctggagaaaacagcacatgatgatttccggaagcttgcctcggcaatatacctgcaagtcagcatcataagtcaggcgcttatctttgtgacccgatcacggagttggtcttatgtagaacgtcctgggatgttgcttgtggtagcctttatccttgcacaattggtaagtgtgccacttcactatctgtggtcagcactcaagtcagagtcataaaccgctgttccatttcattgattttttttcttccaatacaggtggctactctaattgcagtctatgcgaattggagctttgctgcaatagaagggatcgggtggggatgggccggggtcatctggctttacaatatcgtattctatattcctcttgatatcatcaagttcttgattcgttatgcccttagcggaagagcctgggatcttgttatcgaacaaagggtatgtatcaaaaagtaacatctttcttttcatttctaatctttccattagccagatatctacttcttcttggattgtgacccaaatggatacctttagtagtaagtctctgtttataatcacttctgcatatgtttcataggttgcattcacgaggcagaaggatttcgggaaagaacaaagggagctacaatgggcacatgcacagagaaccctgcacggtctgcaagcaccagatgctaagatgttcccggagcgaacccatttcaacgagctttcccaaatggccgaagaagctaagagaagagccgagatcgccaggtaaaaatcatcaatgctttttcttcctttgaagtcagagaaggaacacattttaggatatattgtggacaaagctttctgttattggctcaatctttcttaaactttgataggttgcgggagcttcacacacttaagggtcatgttgaatctgttgtcagactaaaaggtctcgacattgaaaccattcaacaagcttacaccgtctgagagaagcatagagagagcccaagaaccgtctcaaactcattcaaaaaggtcaatattcctgtgtgaaacatcgatacaaattatgcatgtaagtatcagtttcttagtagagtctttttggttgggttttatttgttcttccgagttttaagatatgttctgttattatgatgaagtatgacagaaaatagaaacagagtcctcacaatgaaagacaaattttattctgaaatacatctgatgttataaatctctcttttgtccacaatgatagaaagaaagagatgtgatcttaacacagtaaccagaagaagaaaaaaaaaaggcaaaaaaaagccagaacaagtatatgattacttcatctctatatggcttattccaagaaaatccaaagaaaatgtaaaaggggattgagagaagctgaccaaaaactaagtctaacagcttccagaagatgacaaatccatgattatcaggcaacgttcttgtcttgctgtttgatgatattttcattggtttcatatgttgtcacttcgtcatcacttcctttgtacctataccatcttgacatcaccaagaaataagcaaaattaactgccaggattccagcgatcatgaaatagaagagatccaatcttcctttgttcaaatcctcagctaaccagttaccccctgacgagttctgtgttgtcctgtgaactgttgcaatcaagaagctaccaaggtaactcgaaactcctcctccaacgtaaaagatggatccagcgaaactcctcatgttctcgggaaactgcttgtagtaaaactccatttgtccaatggctgcaaatgcctctgctacacccgccagtgagagctgcggaatcagccacatagctgacatcgacgagatttctccctttcttggcgccataccgagtgttggtttagtcagagcgaatgttctccttcgttcctcgacaaatcccgcgactactaaactcgcggtagcgaagaaaatgccagttccaattctctgcaagagcgttatcccggtgtctagaccagtaattcttctcatggttggcacaagtacacggtcgtagactacgatgaaaactgtcattcccgtcatcaagaaaaccacgtaggtggctgcgggaatcacaaaacctcctgagcctaagcgacggtcgctctgaagggcttggaagacgggataagtcatttgttgagttatggttaagtagtaaattgatgatgcaaaccatataggaagcactctcacgatgcacttcacttcttcaacttgttgcattgtacagagcttccaaggatcagcaggcttaccatctggctgcaacttgtcttcaggagtcaagatagcggctttatcaagaaatctgccaaataggaaagtttttttcagtaacataaaacatataaagaaagtgaaaatactattcatggggtgtgttttttttacctgaattggtctgtgtatttgagcttggagtttgcgtattttggtgggtagtaattgtaaaggttaagccaaggctgtttcgcgggctttaatccgcgtttcttgatcgcaaccgctataacttgagctataccggccaatggactacccgaggctttgatcttcacatacaacttatcgcccgcaaagaaaatcaagcaggccaaaaacattagaacggcagggatggttagaccgatcgtccaactgacattagactgaacgtagacgactagagtcagcgacaggatctgcgcgaaagtgaaggtaaagaaataccaattaaagaaactgtcaatccctcttttccctgattcgcttttcgggttaaactgatcagccccaaaagctaagttacacggtctaataccgcccgctcccactacaaggaacccgagacccatcagtagaaacgctatctggcctccacttggcccgttacatatgctatccgccgctgttccacatgcagctggatgcagttgtggcactgctgcagtcaatagtatcacaaatgatccctacaaaaccgaatttactgatcagatttgtttgactttaaaccgaatgttgtagagaaagaaaatattaaaaaagaggaaggatcgttacaagaaaacatgcgatgaccgcgacacttagagtcttgtatcgaccgaagtaagtgtcacagagaaaagcagcaacgaaagttccgaaattaattgtgccactaaaggcgttaatgatggttgcagctgtaatactcttcaggttgaagactgcagttaaataaaccagaaggtttgatagtgttccaatgatcccaagcttctcaaatgtctcatttcctgataacaacaacatgtacaagatcataatcagacaccataccaagaatcaagaactagatgaaatttgtgtttctactttcttattgatcgttgaccaaatatgttctaaaatcttagacaaaattcgacatctcactcttttttgtcttaaattaccgttgactaagtcaaactttcagacaacacagagaatctaacaaaactctccttgctcagagaaacaagtcttcgagcaagacttatgtttttcttatagatttattttttaaacagtttttctggatattcccaaacttcatgaaaccaacagaaaaaacagcttcttggacacaaaaaagaaaagcaaatgatcaaattagtgttaccaataataaagggcatgactttccagcctctataaacgactttcttctgattctgaacatcttcttcaacagagtcaaccgccgtaacagagccaccgtatacggcggaggaaggattctggtggttatccgtcgactcaagttcaagaggctttctctccattttgtttgtctatatttttggctataattattactacaaacaaaaaaagaagttgtcgtatactttgtagtatctttattttcttgtgtgttttgtttagtttcagagacaaatgatgactattttcttcatcttagagctctctctatttatagtggtaagaaagaaagcaagaggatggtggagatgtcggaatcttgacaaagtggtaattggtgaatttggccgtgaaagagagctctgttactgatttaaatattcattaatttcttctttttttcttcttccaaaattaaacttataaaatccatttagcaaaatcagtgaaaaatgtagattccattaataagtggtgtggccccatcataacactccctcttaataacggcactttcttttacgctctccatccattttcttattttctaatcttattcttcttctttccactatttttgatctcataatcttatattttaattaactagtgtaaaactgacgttgacttaaatgctgtatgatttcgagatcgattttataaagttttttccaagcattttaattaaatattcaaatatccttataatacattatcattttcgaaagttacactgactactatgaatgtatttgaaaatactatctatcttacgacatgcgcatatatatacagaatttatacgaaatctcaatatatatgaactaaaaaattaagtacgtttttaggaggttaattaacctggtaaaggtacctagaccaccaaccaccatataattaattacttcaaactctgtataagaaaacattcgattcttttcatttaaagcgtatatatatatatatatatatatatatatatatatatatatatatagtgaaaaacacatacccacaagaatatgagatgtaagttttaatttcgatcaatttcgcaaatttgcaaccactcgatcagtctaccatagttggttaagctagtgtgagacctcttagatgttaactagtaaattaattaattacattgatttgacggaataagttataagttagttagaaatcagccaaatctagtgtgctggctgcaatttcgtgttaagaaatatgtcaaccaacgttttcgtgttagtttcatttgaatcgtttatgttaaaaattcaattaccaactaaggtgcaaacaactttccctcttatctaccattttgctatcatatgtacttagattcattcttttattaatccaccatttttcgtgtgttaaaagccaattgtcggttttcttcattgaaaacggccagattttgtgttattgattttttttttccaattgatttccgttgaagtttcaaagaacttttaattttctgttttttaacacacgtacaaactataaaaacgccacatctacaattttcaccaagttgacgaatttcaattcgctgtcagttggtggatagaattttgtggacttcatttgcattttgtgaactattattattaatatataataaagaaaacaaaaaacaattcttgctaatgacaaaatacaaagtaatatttttggctgaaagaagttaattaacgtagatattactttaatatttttccaaaaataacctagttatcacggaaaaatagacaatgctcaactctgttgatataaaagcttttaaaaataaatgttgttcaaatttgtccttattcatttataaatttgtttcctagacaattagtaatttatgagatgttttagtgaacataattggacatgacaccaataaggatgtgtacctattttcaaattcatcaacttgaggtcttcagctttcaattcaactttaatccctttcattttaccacttaggtccacaattaaaatcggcctcaagcatatgttgtcgtacttatttgcttgtagttgtcaaagatatgcgatcaacaatttatgaaagaaattattgcctctagttcaagattcatagtactgacaatctatgaggtcaaacaaaaaaaaaaaaaaacttagtaatcatatggtgattgtaagtttgggaaactagtgtagcatttcgcctcagatatttttataatagaaatctcaagtatagcttaacggagctatggggtataccggtgtagaaaacctattcaaaaccatcttagaacaaaatcaatacacaatagctttatttaaaattactagacataatggtagttcgagagaagtacgggcgtaggtccaagttgataaaacaaaataaaaataatgatattaaaatagtaatgatccgattttttaattggttacttgtttgtgctgaattattgaaaaaggatacttggtaactttcaacatattgtcaatatatataactatactcaaagtttaaatccttttataagcagagaaaaaataatttcgcttaacatttaattgtgttttaaactatttatgtgatggtgagtgaagttaggcatatcttttgtgatcattctgtaagcgaccaggtctcttatccaaataaatctagtggcacatgtattgtacttgcggaaagtattaatcattctattaaatttttgaattttattaaagtgaaaaccaaaactattataaaattatgtttctaggtcgaaatacattttctctcaaggcccatatttacagtacattttatttttgttctgtttatcataatgccaactagatgtagaaacgatttacaaaatgcccgactttacggcttgacggtaatgcattttttcaagttctaacctaactaacccaaccaagtgagaatactttctttcactttcgcaacttttcactatattattacgaattcagctacaactactaaaatgttaaatattgagatgaagtttagcctatatatgaagacttatgttctaaagtaatattataaatccctcactgagctttacaagaatgaaaaaaaaaaagatgaggccaacataaaattgttttcagctcgaaaaactgatcgactcaaacaaaatgatccgttttactactattatttttagtcaattagtttttcttttcttgctgaaaataatttaatatagcttaatctttccatttttattcggaaaaaagaagctaaatgacggattttatataagaagcaataaatcaatactagattttactttgtaacttcgttacgttgttacgtatataagtatattatataccatttcaaccgtaaacatagtcaactaggtcgttagtgatctaattaatactatcattttatattagcttgatacacgacgtaacacttcatcttttgggactatactatacggataagtcaaaaaaattatttccttatttttttattatagcaatttttatttttattttttagtataaccatttgtacaataaataaacaaacatttctgttttttcattaacaaccaaaaacgtcaattattgtctcttgttaaaaaaaaaacaagtggttacactaatccggttggatttacacagttaagagaatctaacaaaattgagttcgtcgctcaatttaatttgttcaattgggttgctaacacaaaacaaaagctttgaatatgattttttttttttttgaatatgattttttatatttctgtttaacaaatctgattaaaattaaaatgggtatttcgaattgaaaaagagcaagaaaaagaaatattgataaccacaaattcgaacacatacgtataaatgtcagaaatatacgtgtaggcaaaaactacgcatgcgttaaatatgaaaatgacaaccgcaagcgttgaaaactttacgcacttctttttcccccaaaacttcactcactcacttaaaggctcataatagtagtagtaattaatacgatgattttttttttttttgtcaacttgttgatttgttttgatattttggttttaatactagaagtctttactcacgaagccaaactattgtcatattaatgtcgttttgcgaaatgattttgtggacgatttctaggaaaataattgaattgaatgatttaaaatttggtgacttttgcattgtacgcaacaataatttatattcttgttaaattattgaccctatcacccaagcctccaacttatttgtagataaaactcatggaaaatatgattatatctcttaaactcatggaatagtaattcatttcagttctattttaaattcatggttcgaaaagtgggaactttaaattactcatcttggaccaatatattacaatgaatatatataatcaatttttatttaggttcataggttcataatatgtacggcattttattagatttatgtacagaaaagaatttggttgatatacacaacgacaacaatgggttcggctctgacgcggttacaataaaatgaacactgaacagataccaaaatcgtaaaagtaaatccacaagagtcaaccttcatgctcattacctacacataaactgcccacacctttttcatataggaccatattaactttcacgtggtcaatgatgaaaaagtgtaaattattagttcttatatattatatttagtgttttactaaatgattatccatttgaatgagttcttttttttcttttctttttttgtcaaaaccatttgaatgagttcatgaaaagaaaaagaagagttcattttgtagatgaagaaaatcacgatgaaaatgagtacaccccatgcgacaacttgatttttaggttaatcattgtatgtatatatatatatatataagttttaatctttgctataaaataaaaataaaataaaatagaagtttagtcttgctactatttaatttgattattgtcctacaagaatacaaagaaaatagagatgaatttttgtaaacaaaaattcattcaaggtatcccattctttgttgatatggttagatttttaatcaaactatatgtttcataaatacgtaattttatctcttaaagtcttagaccggttttgaataatatactttacctatatataaagttccaataattttgttttttttttgagcaaagagttccaataaactctaaccctgtattttaaaatgaacaattctcttcatattcgggaatttatattgttaagtttaatttctctggccgacaagaaaaacacaaatcttagttgcacaaatcttaatcactataaacaatcatacgaacataaatattcttcactaacactcaattatctctagaaagtgtgcttttacagagacttagtgggacgacatatataccgttttcttgattactttaaagactaatcaaatttaaatccgttgactctagtccaccattttttagtttgatatagcggtcaatttttccttttatttaaaatttatgtaataataaactaagaaagaggctgtggtatattatttctaaactattcttgcattaacacagaaaaacaattctattaaagaaaaatacaatcaccccacagggtcacgccgaaacccttagagtaaagaggctatgatatgattaagctttcttgcataatgcaattattgttgaaatttcattccaacagaagtggagatcgccctttaagctattcctttttaatcattattagtctttttaatttgtttgaaattttaatcattaatcttgctgtttcttcctctctatatggctcttttacatagtccttactccttaatatataatttttttgtaaaaacaataatcatgagagaagtgttacactttgtcaacccaattgtatatttttcatatcatactttccttaacggaaattttctgatgtaaaggagctgaaaagcataaacgaaaatgtatcaaaaacattaaaaaaaataaagagagacatagaagatacaaagatcaaaatagattagggattggatcttcgatgttttgtctatcccaaactgcatatacatctagatatagtaattcaataaggcatctagacctaccccatcgaggaacatagatcaaaataatgatcgtggggataaaaaggcaataaaatgttgccagctttttgtaataatgcacagcaaagatcctatcagtaatgttttaggtatgatctctgatgttagcttttgatatttttggtcggttgattggggaagtgcagcacattcgaccggtatgacttgtccgatgaggttcttgcccacaatttggtactgtccccaaaacctcaattatatctgcttctttttatgagtttcatacattaaccaaaagcggtaagcggtcattgccggttgactttttatttctatcatcacttttaagtttcatatgctgtggtttggtatattgtttttttttttcgaccgaagaaatactagctagtagttttacttacctaactaataaactaacacattgtcgatgaaaaattaataattaatatcacattgtcttagaatataatagcttattagtttgatttatgaaaatgtgaaataagtggattatgctttagtcaatttcgccatctatattgatttcacctgccatttaaaacatcactaattccctatactcttaccaccactaattcaccaagtttttttctgtggatttgtatttcaagtcaataaatagaattcattaatgttaaagaaaacgcactacacattctaatgtaagaaaactttaaaagcaataagaatacatacagaattttttatataattgtatataaaaatcacgtgaatcatgttgtaaatgcgcgtaggtttatatatgtggatgcattttaaggccattcaatttgttaaagagtaatttatggcaacgagtatttaattatggaagcgaattatcataattgggtttctttaaaacggaaagtgggaggaagagcatcgaaatgcgtcacgttttagcaatacaaatgaaatgggagagaagaagtgcgtgtcgttttcaccaatccattaaaagtgattccaagtcaaaatattccaaaagcgattgcgattgcgatcatcgatccaacgcctaacgcgttgccgttaccttttcccctatttaaaattatttggtggtgtttacacaatttcatatgtataacatgttataagtatttatattactgttgtatatatgcgtcactagtcagacaataatgttttgtatttatataacaagttgaaaatttaattcaaaaataaaaaaataaaattaggtagtccgatagtaaaattgttacagccgtgtttacttatgatataacaagatgatgactgctttttgaattttggctgaataaatacaaaataaatgaaaagaatgaaaaaaaaaagtaattttgtttgaaaagaaaaagtttatttatggcaaaaagtgatcgaaccttcgacatgtgcttctctgcaaaactgcaactttatataataaaggtgttacttctacagtttgcttctaaaatcctccaatcaggccatcgctcccggaatttttctttatttccgatttttatttttatgttttgtgaggccatttatttagaattacacttcaagtagaaatgagaacaaaatacataaatggtaatgcaaccgaaagtgtgtataccaaaagtacatataccctcgagacagtaagctattaaaaattctcactattaatataaagtttgccaaaaacgataataggtccaatgaaatttccgaactaatgtgtaaagtgatactcctcatatacaatttggaagagaataacgattaaacgccaaagaatggctctcaacaaacacaactctgttttcgtgtgaaaaaggtataaggttacgattgagtttgatttgaggttctataaaaaactagggcaagatcttgagtaacaacactttctgtagcacgttttttttttataatgataatgttccgagcgtagaatttcaacttacatagttttttttcttcatattttcgttgttttttcttctactttttgacaaagtgtataggttttgatcgttaactaataaatggaatcgagaaaacgttgaatagaatgatagaattaaataaagaaaataaactttctccaaggagatcttttggaattgtaattttcattaatcttgcaagaattacatataaatgagtggatatttgtcatctaacgccgaactacagtaccaacttagacatatatgtcatatgaccaaacaaaaatccaaaaaataattaattatttttagttaggtccattatgatccggtctaatcggatcaaagaagactcccaaaatctaaggttgtatctcctagagaatttcttgataacgaagttggcgtatagagataatgctgagagaaattagattggtccatatcttgattgatgctcttgtatatggaagtgcctataaagtctaaagacatatacgaccaaaaccacaaatgatgagtgagtagaactaagagttgtatcatcaaagaaaaagtattctaaaaacggaattctcttttcgtattacttcgtataattggtccctgaaaagacagaaaacttgaaattctatgctttttatttgattaggtttgtttcggttggatatagacgtatagtatacatatcaaaagtaccaaaatatatttgaagttgcataaagttgtgttcgatcggaccaagttttgattcacatactggtatatgtgtttatatggctttaatcgagttagtgatcttttaggtgtggtttgatttgattcaaggcaattagatttaagtgaaagtgtacatcaatttgcgtgtttctaatcctattaatattttttttggtcgaacttctattaatactaaattttaatattgcttgcgagcagccccggctcacaagggtgggcaatgagtacaattgcctaaggctatttttttttgttttgaaatttcttcatacataaaaacccaaatatttttaaaattgttaatagtctaaaagttatacctcaaaagcctcaattttgtttttaaaaatatcatcgttttataattaaaaaaaaaacacaaatctttggaaaaattagtaagaatttttaagaaaattaataggcaaaaaaaaaaaaattgccctaaggctcagattttctttgagccgggactgcttgcgaggaagtagatcccaagacatgtcaacttacttaattctttatgttggacacttggaccttcagttgaattaacaagagcgttgtttttttttttataaactgtttgattttaaaatctttgtaaaaaaattcaaaacgtatattggctttggttgtattatttaaccgtctagactgcagaaatatgattgcttcaaaatgatcaacgtgttattcactcttcagtatcggggaaaatttgagaggggataaatatggataaagtggagatatacagtcctaatccgacttttacagcaacgtcgaagatatatttttagacttttaattagaaaatattcgagttagcaaaaataatatcaaacgccagaacataccaataatacaaaatccaccctttcgatagattcgtttgtgcgaattgttcagtcttttttctataatttattttcttcattgaccatattttccgttcacacacctattgctattgatatggaactattactttatttcgacaacatgttatatatatgtatatcttatatgtgcttctaacgaatgatataattgaaagtaggtaagatacatcataaaaatgattatcttaggcgagaaattaaaatataaataaatagtgtgggataaaacaaagttgacaagattcttagttttataaatggtgtggaaatggcgagaacggttctgttgaatcgttaaaaaaaacatagaagtggtatacacatatataggcaaagtgagtgatactacatagaaaaatattacgtaaatattaaaggatgaattcttatggtaaaataaaaatatataattaaaataaatatctttaagcagtagtaatactctttgacaaaaaaaaaaaaaaacagtagtaatactgaaatagttggtattgtttaatgttatcccaatcggcccatcttaattataattagtaagtgaccttgtttagtaaaaacaaaaagaaaccaaacgaacatgttcttgattctgaagtgatggatgatatctgtttcccttcagtcttttacggaatcacttcatctttcacttttaatggttttagtatcttgaattctttttgacagccgaaaagctcgtttaatttgtttaaacttttcaattattagaattaatataacttagcacgctaatctttttcattttcctataaatgttctgattcttactctatattggccttctgaaaaatcaagtaccacagggaattttttaattttatcacttttcacttatatttagttgttttctttaaagattaagccacatgtcgagttttaatagtaatgatattgcatttatagtgcctactccattaaaaactggtccaactctatacttggttgccttcgttagtccagtttgaagcagaacaaattcttaaacgactataattatatataatccattaaacgattatgcaaaagtaaactttgttaatcacaatgaaagcaatataggcattttagaaatgcgtataactttcacgtgtaagcacttccagaggtccaaaataactcgcacagacatcaaggaaagcatataatatgttgattttgaactcgttttctaggattgtttctttattctgtagctttgaatttgttccaactgaaattgtggtcattgttttgtcaaaaaaaaatgtggtctttttacatatatcagaaaaatgatgtttttacaaatctcgtacttgtgtgacaaaaaaaggtatatatatatatatatatatatatctacatatatatttttgcagtcattttgtgaaataaatcttggagttgtatattatttacaatggctgacattggcttttaattattgattttcttttggcaataaattgattaataaacaaaaaatattccaaatatattccaatcccatatatcacgcagatttctccaaaatttgaactaaatttcggaaattatttaaaataaaaaatatttgacaaaccaaaatacaattgcaatcccttaaaatgagcaaaactcacctaaatacattccttatcagtttactaaatcttatttctccaacatttgaattagatttcgacaactatttaaaacaaaaatttgtttgacaaactaaaatataattgcaatcccgtaaaatatttttttaaattagcggtgtaccgcagatttttttaacgggacgggtttggtagaacgggtttggaaggatgttacttaataacaattgtaaactataaaatataaatattttataaataaatataatttagataaatataatttacagacttttatatatactaattaaaaaaaaaaaaattatctacgcggtgtaccgcgggttataatctagtatgtcttatgcttgttagaagaaagtcggatgttttgttcttaaattttgaatacatgccactaccatgtgtttctaaaacaaaaacgaaaccatctttaccatctctagttttattaaatcgggttagttggttaaaattcgttattaaattaatttataacttattaaatagagataaactgttatcataaagcaaggggaaaaaaaaactaaatcgagcaaatacttgaaaatatgtgacgcacaaaacatagtatatattataatgttaataggtttgctattctggcatcaattatggttttacgtaaagttcagacgttttatttttttatttaaggattcttacatatgtttatgtttgttttttttttttttttttttttttttgagcaactacttatatatgtttgctgtttttgtccgaaggccaattagttttcctttaacacttgaagaatatatatttttctctgacataaaaattctaaaatagttcaacttgtacaagtaacggaatactaaattgcatgtcgttgttgttatcaataactttagattaacgcaaagtgtaggaacaaagaaccaaaaatagtaaataagtgtacatgtttgaaaacggataacaacgaatactaaaagatcatataacaaacgacgacggaagtagtagtggtagtagcagcggcagcaaggtccagtcaaaatcacttggcatttggctaacaaagtcatcgtaacgtactataaacaataatatcaacttctcttatgcgtaatgcatttccatttatttagattcctatattatctgcagaataaaatataacagaaaagaaaagatgacaggactacgaataagcatggtaaattctgaacccattgtttctcagtggggaatttttgagtaataataattgatatcaaatctgaactatagtacaaattttgttttttccctaaaggatatggaaatatggatttcgaaaattttggtacgaataataaagccaatcatcggactggaaaccatttttgtcggaatttttcaaaattcattcggctgatttaatgtaacaaatactcatatataaagcaaactgaaactaagaaaacaaaaaacctcaaattgaagaagaatcttagtatataataaaatagggtttggttatggtcaatttgagtccaatattcttttcagaaaaaccaagtgagaatctaaccgaattatttcccgactttattcggtacctcgaactcgtaaaccgaataaaccgattcggctacaggctctgtttcgctttcttgttggtcaattataattgaactagagtcaatcaatatcaatgtttgtggtcaaataattgaaaatgggcttttgtatcaacaactgttggcccaatttaaaaatggaaacccaaacatctttaccaaaatatccaatccataaacttggatcgttaagtagattttacatactttattgttatgatttattcacatgttgtcacggcccagtgttccctatagtttgattggattgtgtctaagctattgatttcctttaccaatttcattagccggtccatctattggaggaaaccttaagctacaatttattttctttaccaattccacatatacagtttaggataaaagcgaaattgtcttttttcaaacacgttctcttccttttgttaacaagcaaaataacatgtgctcttccaattttcattttcagcaacccttcatgaatgggcccaaagcctgccacaaacatgtgcacaatattacaaactctaaaaacaaaaacaaaataaaacattcttttttcccaatttgtattttaatatcaatttgaatcaaactcatagttttaaaactcaattttgtaatcgaaaacaatttttttttttttttttaaggaaacttacacagtagagaaagaaacggaccattttaaaattttgaatttcgtaaacaaacaaaatagtagcccttattagataattgggaaaaaaaaacaagaaacaaacacagagaggagtgagcaataataaaagctcactcactcacacttttattcatttctctgaaaacccttaaatctccggatttcgattcccgaggctcgaaaaaaccctaaatctcttctccgttcactcatccaaccgaagatgcgtgagattcttcacatccagggtggtcaatgcggtaaccagatcggcgccaagttctgggaagtggtttgcgccgagcacggcatcgatccaaccggaaggtacaccggagactcagatctgcaacttgagcgcatcaacgtttactacaatgaagcgagttgcggtagattcgttcctcgtgcagtgctcatggatttggagcctgggactatggatagtctcagatctggaccgtacggtcagacctttcgacctgataacttcgtctttggccaatccggtgctggtaacaactgggccaagggacactacacggaaggagctgaactaatcgattccgttctcgatgttgttcgtaaggaagctgagaactgtgactgtctccaaggttattcttcttcttcttatagatctgtttgattttagtgttgataatgctttactagtgttttgaactgtgagatttccttgtgtagggttccaggtttgtcactcgttgggaggaggaactggatctggtatgggaacattgttgatctctaagatccgtgaagagtacccagatcgcatgatgcttaccttctcggtgttcccttcaccaaaggtttctgatactgtggttgagccttacaacgctactctgtctgtccatcagcttgttgagaatgctgatgagtgcatggttcttgataatgaggccttgtacgatatttgcttcaggactctcaaactcactacccccagctgtaagatttcatttcccaattatgctctccaccaatgttaagatgagttaaactatgcttgaaatgcttggtctacatggtgtttatgttaataattggtatcaagttcagatctgcaagcatctatgtaaagcttatagtattgttactgtttccattggtttgctctttgactatgtcactgttttatatcagaattctgatttgcaagtctctgtgcagaacttatacttttgttactgtttccagtcgttttgtacatatctttagcctcttgttttgtgtgatattgcttctgtttacctattttgatctcatcaccgaagtaggtccttaaactactcttattggaacaatactttctggttaagttgcaagtagaaatctgatacttgatgatcatcagtttgttgagtttactgtctgctttgattcttttctcatcgtactgtttggatatgtctaaagcttacacatacttggattttcttctgtgtgcagttggtgatttgaaccacttgatttctgctactatgtctggtgtgacttgctgtctgaggttccctggtcaactcaactctgacctccgaaagcttgctgtgaatctcatcccattcccccgtcttcacttcttcatggtgggttttgctcctctcacctcaagaggttctcagcagtaccgttccctcacagtccctgagctcacccagcaaatgtgggactccaagaacatgatgtgtgctgcagacccaaggcacggacgctacctcacagcctctgccatgttccgtggcaagatgagcacaaaggaagttgacgagcagatgctgaatgtgcagaacaagaactcgtcctactttgtggagtggatccccaacaacgtgaaatcgacagtctgtgacatcccacctactggtctgaagatggcatcaactttcattggaaactcaacatcaatccaagagatgttcaggcgagtgagtgagcagttcacagctatgttcaggagaaaggctttcttgcattggtacacaggtgagggaatggacgagatggaattcacagaagcggagagcaacatgaacgatcttgtgtcagagtaccagcaataccaagatgcaactgcggatgaagaaggtgactacgaggatgaggaagaaggtgaatatcaacaggaggaagagtactgagaataatttagttataactgctttaaaaacaaaaacaatttagtcgtttgctacttttcttttttttaaaaggaacacctcaactaccagttgtagtttttttctctgcttgtatttgacatatctggttgatgtttctgtacttttgttcttaatcttgttattgcctgtgatgtttctattaatattttccagttgtactgtcttcaatctttggtcttctatcctcatctttctgctacctgactacctcagtacctacttaaggactttaggtttgatctgtttggaaaatagattaaggttcgggatttgtgacctcagggcaagtgcagctccatattagaccccaaaacaaatttatcactgttctgaaatacaaattccccaacatgcctagctttgaggattgattgtttctaagctatttattttctttaccaattcacataaatactttaggataaagtggaaattgtcaatattcaaacacgttctcttccctttgttaacaagcaaaatatgaaaataacatgtgctcttccattatttcattttttgcaacccttatgaatgggcccaaagcctgccacaaacatgtgcacaatattagaaaagaaactctaaaaacaaaaacaaaatgaacattcttttttttgcaatttgtattataatatcaaaataatattttaaaactcaatttaatattggaaaataaaataaaatttggaaactaaacagttaccatagagaaagaaacggaccatttttaaattttgaatttcgagaaaaacaaaatcggcgcctcttattagagataattgggggaaaaaaacaaaaaacaaacacagagagagcaataataaaaactcactcactctcacttttttcatttcttcaacaaaaaaaacctaaagctctcttttctctccagatttcgattcccgaggctcgagagaaaaccgtaaatctcttctccgttcactcaatcaaccaaagatgcgtgagattcttcacatccagggtggtcaatgcggtaaccagatcggagccaagttctgggaagtggtttgcgccgagcacggcatcgatccaaccggaaggtacaccggagactcagatctgcaacttgagcgcatcaacgtttactacaatgaagcgagttgcggtagattcgttcctcgtgcagtgctcatggatttggagcctgggactatggatagtctcagatctggaccgtacggtcagacctttcgacctgataacttcgtctttggtcaatccggtgcgggtaacaactgggccaagggacactacactgaaggagctgaactaatcgattccgttctcgatgttgttcgtaaggaagctgagaactgtgactgcctccaaggttattcttctccttcttcttctagatctgtttgtattagggttgattgagctttactggagttttaaactgcgagatttgcttctgtagggttccaggtttgtcactcattgggaggaggaactggatctggtatgggaacattgttgatctctaagatccgtgaagagtacccagatcgcatgatgcttaccttctcggtgttcccttcaccaaaggtttctgatactgtggtggagccttacaacgctactttatctgttcatcagcttgttgagaatgctgatgagtgcatggttcttgataacgaggccttgtacgatatttgcttcaggactctcaaactcactacccccagctgtaagatttcgttacccaattgtgctcttttacaaatgttagattagtcgctctatgcttaaaatgctatgtctagatggtgattatgttaataattggtatcaaattca

SEQ ID NO: 949 - DNA, 78145 bp, Arabidopsis thaliana
gatctgcaagttttctctatatataacttactgttttgtcactgtttctagtggtttgttcatgtctatatcctcttgtcttgtgtgctattggtttatcaatgttgagctcatcactataaatccttaagctgctctttaatcttattggaacaaaactttccggtgaagctgcaagtactttctagtttaatcttatatgttgcttgctgttacatatgggatatgaattcattgatgactatcgatttgtgaaagtatactgtcttctttataatatacttgtttctgcaagatatgttgctatgctcatcatgttgtttgttgtatgtgtctatatggcttacatacttggttcattctctgtgtgcagttggtgatttgaaccatttgatatctgccactatgtctggtgtgacttgctgtctgaggttccctggtcaactcaactctgacctccgtaagcttgctgtgaatctcatcccattccctcgtcttcacttcttcatggttggttttgctcctctcacctcaagaggttcacagcagtaccgctccctcacagtccctgagctcacccagcaaatgtgggactccaagaacatgatgtgtgctgcagacccaaggcacggacgctacctcacagcctctgccatgttccgtggcaagatgagcacaaaggaagttgacgagcagatgctgaatgttcagaacaagaactcgtcctactttgtggagtggatccccaacaacgtgaaatcaacagtctgtgatatcccacctactggtctgaagatggcttccactttcattggaaactcaacatcgatccaagagatgttcaggcgagtgagtgagcagttcacagctatgttcaggaggaaggctttcttgcattggtacacaggtgagggaatggacgagatggagttcacagaagcagagagcaacatgaacgatcttgtgtcagagtaccagcaataccaagatgcaacggctgatgaagaaggtgactacgaggatgaggaagaaggtgaataccaacaggaagaagagtactgagagtaatttagttataaaaaccgcttgaaaaaatcaatttagtcgtttgctactttttttcttaaaaaaaaaaatgagaacctcaactaccagttgcaggtttatttctatgcttgtatttgacttatctggatgatgtttatgtactttgtttttaaatttggttcggtctttagtttgaatcttcgtttaagctattattgactgtattgttcctaatctcgttaaagactttgggcttatgattgactaacctttgggcttatgattgactaacctttgggctttggatttcttcatttatttttaagagctcggcccattttcgtggtgactaaattacactcttcgagataaaacagataagaaatttacttttgatgtaataaatattgttgctacgaagtattttacttttggaaataaatagggacgacattagtgttaatactcttgtaaattttgtcagattacacattattttacagatctctcagacaaagtaaatacaaaaacgacacagtttcgtaactttcactcgcgtctcaagtacaatctctaaattactcgctttctgtgaaagacacgtgtattttgtgacttaaataacagcgagtagattttagaaccatagtcgcgagtgtttttataggcacagatatatttgaattatgtctcctcgcaacgggtcgctctctctctctcctctgcaccagtctccaagggtacagattttgaaaaaccactcctttcacttagctcgaaaagaagagggaaaaacaaaataataaaaccaaaaaaatgataaattaaagaattctttttaggaaaaacaaaagtaaagatttttcatcatgagtcttcctcctcttactcatacggtcatacccaatcactactaacctctctccattctcgaattaggtcactctatttgggttgaaaaaatctcatattttcgtctttggaaccttaagaactttctcttttggaatcggtggaatcagtgaaatgggtatctcgaattgggttttctctgtaatttctgtagctaccctttttgtctcctgctcctttgctctcactcttgatggttagtcaaaacccactttactcataaatctttgcttttttggttggtgagaaatctgagattttgatgtttgtaggatttgctctattggaattgaagagtggatttaatgatacgaggaactcactagagaactggaaagattcagatgagtctccttgttcttggactggtgtctcctgtaatcctcaagaccaaagagttgtttctatgtaaaaatatgctcttcttcgttgataaagtctcaatctttcgattatttctttacctgattatgttcttcttatgtggattatgcagaaacttaccatatatgcaattaggagggataatatctcctagcattgggaagcttagtcgattgcagagactgtgagtagtagatttggctcttatgctaaattttggtctctttaagtagtttgtttaattcaagtttggtgggagttatgtagggcacttcatcagaatagcttacatgggaacattcctaatgaaatcaccaactgcactgagctaagagctatgtaagccagaattttgcaattgggaatatcaagcctttggttagtgttgagccataaatatatatctggttaaacatgctttcaggtacttgagggcgaattttctccaaggcgggattccaccggatttaggcaaccttacatttcttactatattgtaagattcaattttttttttttttttttacttcttttccaatatgatcattttcaagaatttctgatgtttgggatatcttcagggatctatcaagcaatacactcaagggtgctattccttcttcaattagtcgattgacgcggttacgctccttgtaagttacaaacagaatctcgtgtttagatgtagttgtgcaagatgtgtcagtttaatgtatttactctttgtttgattcaggaacttgtcaaccaactttttctctggtgaaataccggatattggagttctcagcagattcggggtcgaaacgtgagatttctcttctatataattataactagttgtttgaacatcatcaagaacttaagaaaaactttcttgcttatgttagactaggatgttattttctgatagttgttttctgtctttatggttagtttcactggtaatttggatctctgtggccggcaaattcgcaagccatgtagatcatcaatgggtttccctgttgttcttcctcatgcagaaagtgctgatgaatcaggcaagatcttattattaaagccaatcatcacgtcttgaggctccttgactaaactttctgattcttgatttctcttttgcaatccacacagattctccaaagcgatcatcacgcttgattaaaggaatcttgatcggcgcaatgtctacaatggctcttgcattcatcgtgatctttgttttcctatggatttggatgctctcaaagaaggaaagaaaagtaaagaagtacacagaagtcaagaaacaaaaggatccatccgaaacaagtataacatttgcataaaagagaaaaactagttttcttttcttcctgcttatcatttttctaaattccgtttcttcatttgtctttaaaaaaaggtaaaaagctgattactttccatggtgatcttccatactcttcaactgagctgattgagaagctagagtctcttgacgaggaagacattgtgggttcgggaggatttggcacggtttatcgaatggttatgaacgatcttggaacctttgcggttaaaaagatagataggagtcgacaaggatcagaccgagtttttgagcgagaagtagagattttaggtagtgtcaaacacatcaatctagtgaacctacgtggatactgccgtttaccatcttcaagacttctcatctatgattatctaaccttaggaagcttagacgatcttcttcacggtaaatacagttatacatagtttatcttcattttggtctgtgatgcgtcatattaatctattttttggtttctttatctatcaagaacgagctcaagaagacggtttgttgaactggaatgctcggttgaaaattgcgctaggttccgcgaggggtcttgcttatctacaccatgattgtagtcccaaaattgttcaccgtgacataaaatcgagcaatattctactcaatgataaactagaacctcgagtctcggactttggtcttgcaaagcttcttgttgacgaagatgctcatgttaccaccgtggtagctggcacctttggctatcttgctccaggttctcttctttgctaacttcttttttgaatcttggacaataatttttaaagtttctaactctttgatgaatcttggaaacagagtatctgcaaaatgggagagcgacggagaagtctgatgtgtacagctttggagttcttctccttgagctcgttaccggaaaaagaccaacagacccgatattcgttaaaagaggcttgaacgtcgtcggatgggtaagaagacacctcaaatcttgtctccgagaagaaacgttctgtttttacttcctaagatttgggttctaataaagtgttatttctctcagatgaacactgtgttgaaagagaatcgattagaggatgtaatagacaagagatgcaccgatgtcgacgaagagtctgttgaggcattgctcgagatagctgagagatgtacagatgctaacccggagaacaggccggctatgaaccaggtggctcagttgcttgagcaagaagtcatgtcaccttcttctggtatcgattactacgatgattctcattctgattactgttagggacttatgcacggctaaaagtaaccaggagatcattagcctgcgacggttttgttgttgttgctgctgcgttatgaatgttgtgatttaggagcgagggatttgtttgtatattagatatgaaggtggagtcaagattattgagcgtgcactgttcttgtgcactttatatttttgcaacaaaatgatcgatgttattgcgtatgcattgtactatgactctttcaaagggaagacacacatacgaattatcgatgttaatgtcgttaggcttctttcttacgttttgtagcgtacattgcttagctctactaaagctggtcctatgttttacaaacctgaaagtagaagactctcaatgcacaaacgttgctacaaaactttcatctttctgaataattagctatttttatttatgaaagtgttatttctctataaatcttataatttggaaactgatattaaaaaaaaaacatcttctttttatagttacaaacaagtttttttttttttttttttctgtcaaagacttgagagttgataaaaaaaagagttgataatttcttgatttttcttctggaacattttaatattatcttctgaataatcaaatgacctttcgtttaatggaagagacttcgaccatcatcaaaaccccatccacctcttaaaaggccaacgcttttctgccctatgtgctttgctagtttcctacacgtacgtatatatctataaaatcatttttcatatatatatggtttaatgcatccatagtttatacatattttatatttaaaccctaccctatacgatacactatatacatatatcgtatagtagtaattgattatataaaattttacatagatgtacaagagcattgatatcgatagaagttagaaccttttgaagatattcgtaactcttgaaaaattcgattcttagtgacatagtgagcaataactacagattatggagattaatttgaattttagtctattttccctcttataaaagaacaattaccaaggaaatcctaattctgaattaatcatttacaaagttgtagtatatatataaaaaaaaagttgtagtatatagtattaacaaactaacacaatttttttcaactttgatagtaacctttttcaaaccaatatatattagtgttttaaagtacgccattatcttgtataatatgcatggtgtattgatagtattttatatgtatgtaaaatgaaaactaaaaggcgactactagcataaaaaataaatgatgaaatttaacaaattttgtaattttaaaggcaatatactattgtaccgtgaaaaaatatataggtaaaattttcaaaatatttgtgttgaccaaataaatggcaagatcataatattttgcataattttctatattttaaagccgattttcattgctaaaatatattgtataagtatatgctaatacacatatttgcgtgtgtgtatataaataaaaacatgcatacatgtatcatttgtctgtctcctattggctaagaaaacagagagaatcggtatttttagcctttgctaagatattttgatcaaaaatcccacttttgagcggtcttatctttattctccacctcaaaggaccatttctcatggcttctgttccggtgagacctctacctcttcttcgccggaacatcacctcgacgacggcttcgaaatcatctccaatgctcgccaacgtttcgagccggcattctctcgggatctctacgtatgatgaatttttgaagcaaataaaaactccggcaactgtgaaccaccggcggcgagtaagtacggtggtggcgtcggcgggaaacttgacggcgccgtcgtgggattcgtggaagcctgataagacggcggcggctacggctcttttgctgagtgacgtcatatggcctgctgctggttagtcatttaaaaagaattactatttactaattactaatttagtgatttaagatcacaatttaattagtatttttttgtcaaatgctttgagatatataattcttttactaatgttttctcgatcgtcaaaaattgattgctcaatcagaagaactacaagaggcgattagggtaaaaaaaagaagagagaagaagtgcacaaaagaaaataaaattagaaaattaatggacaattataatattaattaatttctgactgactaaaagatgagtatagaaaaaatatggagagagtcagagagagaatgtgtcttttcttaaggccaaaaggtcattcatatgaacctttaccgttcgaatttgaccaattttattgtattttaccttgaactagctagcttagtatttgactataaatggtgtgatttacaaaaaaataatctaaaaaattagaatagaactctaaataatttgataaaagatattaattacctcaaaagtatgaaaattagtttatgacataaatatattcaaagattaagtaactgttagttaaaagttgaatatctgtatctaaaaaaaaaagagttaaataattgaatcgtggcatgttgtatttgaatatgtttgcaaattaccttaatgatgggaaatatgcatgcaagtcaaactcatttgttcgtgagagaatcttagtttgcgtttagtcaaaccctatgctgacagagagcttatattatttattattcaaggtttatagctgacttcatcctattattatgaaactatattcatctgtgtctcagctatagttagttaattaattacccatctacggtttcaacttgatctgaattttagcggaccatgttgtcatgtaatatatttggattcaattttgttataggtattgtatcttattcatatgtaactcttttgttagagcctttacaaaaaatgtgagtagtgataataccgtttgttttggtttcttaattgaattttgttttatgagtaggagcgtttgcggcaatggcattattgggaagaatggatcaaatgctatctccgaaaggcatttcaatgtcagttgcaccacttggcgcagtctccgccattcttttcatcaccccttctgctcctgctgctcgggtaaatctttagttaaccgtttttccatataatagcggtctaattatatttgcggttaaacgcaaacgcttcattgtcttttctgtgagacaaaaaatgcaaataccaaaagtgagttgttaggatttggatggtgtgtaacaaacatagaggaattgaataatcaaaagtagaaagtagtggttagaggagacattttcccactaagttctatatccataagctagttgaagattttcttctaattttgttcttgtgcttacacttttctatggaataaatctagaggtccactattttatcgttgattgatactttcatatatttggataattagtcacaacctatttcagccatcttctcatgtttagattggaaagagatgccatcacatcaagttaaaatagaaacttgaagtactagtaattggtaatttgtcatcgtatcagttatttaactgattaattgaggagtgtgttttgtgtttcttatattttcagaaatacaatatatttttggctcaaataggttgtgctgcgattggggtggtagctttctccgtcttcggcccaggctggctcgcccggagtgtcgccctcgccgcttccatcgcttttatggtcattactcgtgccaatcaccctcctggtaaatatttacttctttaaatttttaccgaaatcagaaattgttttcttgattcaaagtttttgaactctttttcataaaatgatataatttcacatgttcgatttttgacattgttattataaaaaggaaaaatgatgcaaatgaatattttttttttaaaaacatctgacttagtgatttttagcccatattattttaaggaaagatttgaatcaaaccaaaaagcccaaaaagaaaccatttattcacccatgatctgaaaaatgtaataaataatctggcccccgcgactttaggtataccttcataaataacctgaaacttttggttggagcagaaacgtcccctttatatatactcttcacaattttctcagtctctttaattaagaaagaaagtcaaatgcgattttattattattatttgcttctcgtcaattaatttacatattttgagagttgatattgattattatctataattcatctgataaaattacagcggcgagcttaccactaatgttcatagatggagcaaagttccatcacttgaatttctggtacgcattgttcccaggtgcagctgcttgtgtcatcctctgccttctcgtaagttttgtaattctcaaaaacaataaaatcaagataatgtttaatggcgaatattttggttataagatttaacgtgataattaagtactaatctgattcaaattgatttcttggcagcaatcgatcgtatgttacttgaaggaaaacatgaaattttgatgaatcaccaagcgacatgtacgatcgaattaatgatatatataatacatacatatcgatggaaatcttgtgaaaatatttgattcatatgtatacacttgatgaacgtatgtaaatgactaaataattattaagttcattcaatattatcgtggtcttctccgattccttattatcattttcctaattcttacataattaacagtttaacacctcatacaaaggattatacgagttaattattttcgctccataaatttccaaaattacgtaacattgtgtctttgtgatatgcctgtaacaaaaatatatgtatcaattgtgttttaaagatggactgtttggcaaattgtttggacggctgtcgtggtgagcttgaatttcctaataagggtatacgaaaacctaatttgttcaggaaaatagagataatacttattttattttgataaagaaacatactacttgacgaaaaaacgaaaacaaaagaaacatatactacttatttcattttcatttgtttttgtattcaacaaagtacgcaattgaattcacattcaccgtacgtatgagaaaacttagtctacgatatttttctgaatttatgtgaagaaaaaagctaaaaagaaaatcaaaatattttatcaacatcttactgctaacttatttatgactaatcaccttaataaaaacctggtaaattatgcataacccttttaacctgattcggttctactactgttaaaaaattcagattccggttgatagatgtaaatatgttttagtctttagcttcaaatctttaagacccaatgaaagaaaatggagttggtggaaaattgaaatgcgaaagctgactccatccatatatattcttaaatatttcagtgtcacctttctagtatttctttttatattaaatggatccaatttaacgtctagactctagatgatagaattcaataggttaaaacaaaggtggggcctttcgtaaaatggaggaagaactaggccaccacccaaattagatgattgtagaagatggttactagtattacattatcgtaccgattgataaattttgctgctgacaaattttatcatccacaaaaagcgttttataaagaatggagtgtggtttgatccaaaaaaaaaagaagagagaatggagtgtggttgttgcagtggtggtggtggcccaaaatgacacacccaatctcatgggggaatcatttaccaatgcataaaaaccttgtcttatatgcacatatcaataatgcatgaataacccggttttgattggtttgtctccgacaggttaaaccggttttgattgatttaaatttgttaccaagctctaatccgaaaaattgaaaacaacattccttttggttatatttcttatcgattcggttcgtaaacacacattactcatagaaagttgccaatgatgcggtgcataaatagttaggttaaaattactggcgcgtgacaatgaaacaagaatatcgttatcacaagagttaaatgtagtagacaacttgcatatgaaatattcatatcaattgttctttcagtatttataataataaagacagatttctattttgagtatgaaccaataagatttgagaaatgggttgggtcgttctcaccgcctcttttacaacacgatcattcactatcaaaccgattaaagcattaaccggttttacatttcgaattctccaattactaacaaaaaaattcaattttcgaagatatacgacgatattccacaagatattctcgctcgtgaaagaccaacaaaaggatacactgtgggtctaaaaactggtttagcaattgaatttacatataaaccagaataaccgccttaaattgtgtggaccgtggtatttatctggttagttgactcaatttcatgaaatattaatttcatcatagacgatccccataatttcgttactaatgtaatgtgggactatgcaagattaaaggtcagtttaaagaaacctctcgctattttcgtcttaaactaacgatgatacaaaaaaatgaagaaccaatgtgtgaagatattttttgacgaaataaaaaaagattatgtgttacaagatcatttggttttagtattttacacagttgctaaccaaaagcgcattttccaattccatggtgccacactgccacttagcaaacgcatgtccgttagactcttgattatggtttatttacgtggacaacattataaaatgaatgactttaatttcttgtttttaagaaatttgaacttctaattcaaacccaatcggttgatttatatataccatctactagattcatctccatttatactctggaatattctaacatagttgattgattatgagaatcttttatccagtttacgttatagaaatttagtaaaccaaaagtagcaaaaatttgggtaagttaaacttctaggatatgtagttatgcacggtgccttgttaacgaggaaagaaacagaggacatacaaaaaagagtcaacatcaaagacagtaacaatgttgtacttttagtctctagagttttcgcttgtttgtaataaccacacaccaaattttttccctcacgtccactctctctcccctctctataaatgtccacaaactatactgccattaatcatatacttcactttcattctccaaacagctgtttcttgatgatcatgtctctggagtttgaacaaatggtgagttttaactctttcgtccaatttttttaaatccagctaaaagttcagactagtataagctaagagttcgaaatgattattgataattttttgacaatttttgtgtgtgtaaatatatgtaggatgaagcaaacaggttaagcgcgtggaatggttacgtagactggcgaagtagacctgcgttgcgtggccgccatggcggtatgcttgctgcctcgttcgtcttgggtgagtcattcttacaaatcaagaatatagttgtatacaaattactcttttttttttctttttacatgatatgctttaccatatcaaatgacagtttcaacttaatataattgttaagaatctcacgccaaaaagttgatattcactcaaaatatgatttattaaaacttaactggagtatatattaattgatatgatgtatattgtacgtttttagttgtggaagtgttggagaaccttgcgtttttagcaaacgcgagcaacctagtgctgtatttgtcaacaaagatgggattttcgccgtccggagccgcaaatgccgtaaccgcttttatgggaacggcatttttcttggcccttctcggagggtttttggcagacgccttcttcactactttccatatctatttagtcagcgccgccatagaattcttggtaagcaatttagttaatgactatatatttttaaaaatcagtatataaggtgaggttaatttaaacctttttaagaagaagaaaaataccctgcctaaaaccaggtcattggaaatagacttcagacgcacgaggattttctcaaaaatttctcaaaaaatattgaatgttgatagaaaaaacacaaaaattccttccatttttagcattatatttgtttcaatatgtatataaataaatgaaaactctatcttttcctcttttttttttcttcttcaaactgtgtaacagactaacaggtgtattcacacaaaacagtcgtatttttttttaatatacatcaaatactgatataaaaatttacatagaagctctagtatgaatatctaaccttttaattaaaccgcactattttgttgaacacacagggcttgatggtactgacggtccaagcccacgagcactctaccgagccatggtctcgtgtatttctatttgtgggtctatatttagtagctcttggtgtcggaggaataaaaggctcgttgccaccgcacggagcggaacagttcgacgaagaaacatcgagtgggaggagacaaagatctttcttctttaactacttcatatttagcctctcgtgcggtgccttgatagccgtcacggtcgtggtctggctcgaagacaacaaaggctggtcttatggcttcggtgtctccacagccgcgatcctgatctcggtcccggttttcttggccggttctcgcgtttatcgcctcaaggttcctagtggaagtccaatcacgactctgttcaaagtgttaaccgctgctttatacgctaaatataagaaaagaagaacttcaagaattgttgtaacgtgtcacacaagaaatgattgtgatgacagcgtaaccaaacaaaactgtgacggagatgatggatttctcggatctttcctaggtgaagttgtgagagagcgtgaatcactaccacgtccactccgttgtacggaagagcaagtcaaagatgtgaagatagtcatcaagatcctacctattttcatgtctaccattatgcttaactgttgtctagctcagctctcgacgttttccgttcaacaagcttccacaatgaacacaaagctcgggtcctttactgtcccacccgcggcattaccagtttttccagtggtcttcatgatgatcttagctccgacctataaccacctcctcctccctctagcgagaaaatcaacaaaaaccgaaaccggcataacccaccttcaacgcatcggaacagggctagtcctttccatagtcgcaatggcggtggcagccttagtggaaacaaaacgcaagcacgtcgttgttagttgctgctcaaacaacaactcatcttcttattcttcttcgccgcttcctataacgtttctttgggtggctattcaatatgtgtttctcggatcagccgatctattcactctagccggtatgatggagtttttcttcaccgaagctccttctaccatgcgttcccttgcaacctcgctctcatgggcgtctcttgcgatgggatattactttagctctgttctcgtctcggctgttaatttcgtaacaggcttaaaccatcacaatccatggcttttgggggagaatctaaatcagtaccatctcgagagattctactggctcatgtgtgtgcttagtgggattaatttcttgcattatctcttttgggctagtcgttatgtgtaccggtcgaaccaagggtaaatcctaagcacatacattggtggtatcagactatcaattgtaatgagtgagcttattgtagggtaatttgttgtctgttaatgatccgattagaagaagtcaagggattagtttcttggagaataagttactatgatgctagattggtttttaattttacggctagggttataagttgaactagcacaaatcctatgctcttcaggaatatgtcatttaataaaattataaagacattattatttttatttttatttaatactccatgaaaattaattgtaacgttagaaattaatggttgtatttgctgcgtttatcaaataaataatagcaagtgcatctgtaaatcacaattcacaaccgcttttttacttttaaagttttaaccactgcccaaaacaaatcaatctcataagatgttatggtggcaagtagtccttttttcatgtaacgtacgtaaaagattgacaagttgtaatttgtaacttgtaatgaagcttggtttggataactactgactaaataaaaatcaaccgagtattcttttccgatgtatttgtggaataaaatcttcgacttttatcaatcaaaactgactcaacaactcatcccttacttttaaaattctccaaatttagaccctataatgtttatatttatcacagatataacagaaaacagtttttctttttcttttttttgtagaaacaaataattattcctgaatctaaaatagaacaataatgaaatttatcatatttcgtcaagagttcctggttttttttaaccaattaaaatttatattgagtatattgtgtaaataacaaataaacttaagggtaacaattcgaaatagtcgaaagctagggaggtctttcttgtatataaaaccgtctctgcccactgaaatatcaacttagctcataagcatatctaatcggagctcggagaaatttcggtaaaaccctaatcatcatcttctccttttgatcaatcttatcttcacatgaaaaatctctgttcaaagacatagctttgttctggaattccaaattttggggttgattttgtattttctgggtacgcgagattagatcgagatagaaaaaaaaagagcgatcttttctcattaattccggttcgacatggctagtttcagcttaaatttacaagctttgagttcagtatttgttcttatgctcatgatcttcagaattttctcaataaaaaatttgattttttgttgttgttgttgttgatgggattaggttgtgaagagaagaaagatggggaatttgttttgttgtgtgcaagtggatcaatcaacggtagcgataaaggaaacattcgggaaattcgaagatgttcttgagcctggttgccattttcttccatggtgtcttggtagtcaagttgctggttacctctctctaagggttcagcaattggacgttcgttgcgagacaaagactaaggttttagaatcatctattaacactctctttatcagaaattatgttttgattagttttaatcttagttttaatcttctttggttttgtgtttttgcaggacaatgtgtttgttaatgttgttgcatcgattcagtaccgtgctttagctaataaggcaaatgatgcgtactacaagctcagtaacacaaggggtcagattcaagcttatgtgtttgatggtaagtctcattgttaaataaacaaaaatatgttctaaataatgaattgatgtgtgcaaaatattgatcattcggagtttttgtttgttttccagttattagagcgagtgtcccgaagttgcttcttgatgatgtctttgagcagaagaatgatattgcgaaagctgttgaagaggagctcgagaaggtagaatctttttgtttgttttgttctctttctgcttgtgttaagttatgagtgttcaattgtatctctgttacttgtgtaggcaatgtcggcttacggttatgagattgtgcaaactctcattgttgatatcgagcctgatgaacatgtcaaacgggccatgaacgaaatcaacgctggtaactaacaaaacttcccatcagttatatgttcttgtacttgtaaatcatcgagtctgagtttcggcttcttgtttatagctgcaaggatgagattggctgcaaacgaaaaggcagaggcagagaaaatcctacagattaagagagctgaaggtgaagctgagtccaagtacctctctggtcttggtatcgcccgtcagaggcaggcgattgtcgatggattacgcgacagtgttttgggtttcgctgtgaatgtccctgggacaactgctaaagatgtgatggacatggtgctagttacacagtactttgacacaatgaaggagattggtgctagctccaagtcgtctgccgtgttcatacctcatggaccaggagcggttcgtgatgtggcttctcagattagagatggccttcttcaaggctcgtccgcaaacctgtgaagtgaattcactgattatgtcctcttttcttttgactatggtgtgattatcatcttcttctttcttttggattatgttcgaactcttttgttttggttttcttatttctatttgtatagacttattgggggtttataattcatatagaatattaaaacgtgtttagtactaattattattgtacacgaattatggtggtgataatcaaacttgtgaaccttaatttagaagattacaagcacagactgaaatatttcatgctctgttatgtcaaatgaatagtgaaatgacagattaataatagttttattggtgtcagtttaaagacaggctctctcaaatttctgagttacttaaagattagtagtttgttaagaatgttttgtttcacattcaactaattattacgtagggtgaggaaatttcgcaggaaacttccttcacctgcacgaaattagtgctatttcctttaaaagcaagaagacattgacaatgtcataaattttgcagggccttttatatatgtgatcaataattcatctcaagaagataaaactttcacatggtaactctaataatgcaataattaatgggcataagtaggatgctgatgtatgaacttggcacgatgcttatttctatacttaatgacacatgatcctagtagctagaagaagataattcagcttttttggttattagacattgcagagtgttatttattgtttccactttcatggtggaagagttaattactatattacccctcagttttcttcattattttcaacccaataccagtcttctcatctgcatgtatttttatcatctttcaaagcttctaatgtgtaatacgtcagggtccagtcttgagttattaaatcataaacatgaactttatagtcctttcaatgtggtatacatcagcattaccaatatgtattaagctgaaacgtattatattaaaacagttttttttgtacaatttacaaacacatagtatacaagcaaactctgattggtatcaaacaaaacaaaacaaagacctataccaagatacgctgaaaataacattcagcagcatttgttattgacaaatatattagttaacttattgtagtatataatttgtgtatttgaattagttagttggtggtggtgcatctactgcagcagtactaggcttagcttgttcagcatcatgaataagcttcacaatctcatctttctttaagaccatagcttgaatcttttcttcaatcttctgaagcttcatcttcaacttctctggatctttcttatcttcagggttcttctctttcttcgctttcttatctttcttcttgctcttcttctcttgatcttccccttcttctcctccaccatttttatcgtcctcgttcttatccttcttatctttatccttcttcttctccttcttctcagctttctcagccttgttgtgttcctcttctttgttatcatggttcttcactttctcttctgtttctcccattattctttatgagtttgattttgtttttcttagatagtgcttaaatctagaaaactttcttacatatttcttgtagaactcagaattacccttttattacaaaggatcttcagctaattttggacataaaatgatcacatccgtagaaattacttgtataacgagaattatggagtttcgtatgttgcttccatattttactatctttagaattttaattctgtggaatgatcaatcgtttaagctcatccatagagcccctaagtagttggtaattgttatacatatataagacgaaggttttcacaatggttagatcttaagattatcactataactgcagcgatcaattaaacctatgtagtaaaaggaccttttggttatacagatcagcttggcgaagaaaatagcatttaaattcaaaaatttataagatttgattatttcctccaaataatatcaatattatacatgcatacacaaataaaaattggaagaattcacttacttatcctttgtaacgattctaaaaacacattaaaacacaaaacaatggattatttttattttctaaagtttctcaattttattggtcgatgtgaatgaagagaagtgggaactgataattctcgtggatcaggcaaaataaattttgattacccggagaaaatcatacacttacttatcctttgtaacgattcgtacatgtctcttgtcaaaaacagctttgaaagactcacgctctgctctaagctgatcctggaaaattcctcttacctttgcttttccaattgcatcagctagtgcacgactctcttctgccgatagaggatttgatttcacgttgtatcctgatcctggacctataattaaggatggcatgttcatattccttgcagcaccaattgaaaaccccgcgtctccaccctatccacagaaataaaaaagcatgtatgatcagataatttcagaagataaacatgttttcaaagttaagagacataatgaacaatcaaagatgtgtatgcttgtttataccttatcgccccaccaaacagatttgcctttccgctggcgttcttggcttgatttgggaagagatttggagtttcgtctcatgctctgagagttctctgtttcatcttcctctacatttgaccatttacttctgcttagttctttcacttcttctgtacgggagccagattctgcatcccatttactctcacttttgtaagagcctgaggtgatttcaacagaaagaaagactcagttaagcgttttcggattgtcttagtaaaaaaaaagaagaaattataaagaaagcattcaaatttaccctctgtcgcacccttttcttctgactgggtactgttatcggattttctttctggcagtccgaaatcatcttccatgtccatatccacctagagcaattttatgagaaattacgaggttggatcaaataaggaaggtcaaaattgaaacaatggtcaaaacaaggaattttttaacccttgtttactccaggacagaggtacaaaaagatatttttctattacctcctggatttcattctccttcaggtcatcccaccgcgtaaaagactatcacagaaaaagaagatcatatataagatgttgtaagaaatgcaacaaaacgagcttagtgatgtttaaaatcccaaaatacgctgcatgaagctcatcttaagatcggtttcctttaggtcaatgccaaatcgtacatgaaggcattaatttggcgtctttatcaaaaagcgaggtcaatgttggaaagaaaaagaatgacataagaaccttgatatcaagctgcatgtacaatgaaggagcttcttcccattgttctgccatctgctgtacttgatctactgtgatgccatgtacgtttcttgcagcacagccctgtaattttgcacacgcttagaaacaccaagtgaatgttattctatttaatatgataatggtcgtagtgtgctcctatttatctaggctaaaaatgaaaactacaaatgagatacaaaatcaaacttatcgaagagtaaatagtatgcagagaactcacagttgggtccttgtatgttgcttccaatatgtaagcttcatatccagatctctgcaaaaagaaacagtaagtcaaggaaactttcaagaacgattaagataaaacattttcaatacaggacaacagacatgtttcagttgaactggttttaaatgttacaagaggtaacaattcaaggttcatcaattacaacaagcatccaatcatacacagaaaagagaatgaagcaactgttcactgagcaaaagaagattgaatcaaaatcaaattcaacaaaagaggaaaaggtgaattctcgaattcaaagttttttttttatatcgtattagttttaagctggtcaagaagccatctaaaaattttcaactttcattttcacggaatcatagataaacaagaacattattaagcacggtggcaacaacaaaaggggatgaggagtagtgcatgcactgcccaaagcagacactatcactaattgtttataaataataggaaaggacatattccagagtatattggtcagtgaaagcaaggttacaaattatttaaaagaatggcaacctcagacgatgtttagaaagcaacatgaagcaagcagaaaaatcaaaagcaactttaacttgcaggtaaaataccactataaatagtacatacagtcatcaacaagactaatgactcatcttataaaagagcgaattagcaatataaaggagataagacttataagaacttgcaagttgccccacgtcaatgtcctctttgatgatatatacacaaccaagaaggttttaaaggggggaaagagaatagacatatctttgaaagatcatattcactaatatacaggagtgaagcaagacaataactaatgtacaggggtagctttggaaaaatagttttcaagataaaattatgaagatgctgaggaaaagaagactcgtaatctcaaatctagggaaatgcaaggtcattatgaacttggacggagcattatgctaattcttgtggaggttgagataactaactaaaacattgtcagaactgtcaacttactaagacttcactaccgtttagtgcagatgaaattatctagacacttgaaaaaccaaggttgactaagcactaaagacgctagtcgctagttgacttcacaaatcattatgagtcttccatagaatccgaaaacaacatccaaactccacaaggtaatacagaaggaagtgaggatatacctttgctgttgcccaaaactgagtaaaatcagctacccgcagattgcggtcatccactaagatgagtgacatataccagcaagaaacggtcaattccagaaaacaaactgcatccgtggttagagaaaatgaaagtagtgcttgaacactgcaccacctagttcctagctaaactagttgaatagaatctctaaacaaagatcttacatgttgcaatatatactactccctataccttgagcagataagagggctgctggaaggatatcaagttctttaaactaagaaactagagaaaccatatcaggtgaaaatgtttgctcaaaaagaaaagtagtagcaatcatgtcaacatcaagaaaccaaaagagataatgtcattagatcacagatagcaaggaaataaaatttcaatgctgttctctatgtcctacattctaatattatgagaaaatcattaccgattacaaagctgaaagccccatcttcaagtgtcctcttaaaagctttcaacatgcttgaacgatacgcctgagaattcaagagtggcaagaaacttaacaaaataaatttatcgctgtggtttattacattcatctttcatttatctcaacatatacgttgaaaatatacctcttccatctcaggttcgtagcagtattccatgaccgtcttcacaataggtcttttgcttctaccagagcttaaagaagttgaatcactctcctcaaccttttacattgacaaaacaacacaattttagagtcctttgctggtccaaagtaaagaaaccattcttttagaaacgtctaaagaactatgaggattaattaaccttctcaacttcagtcatgaagtaatcatccatagaatggattcgtggagcactaccaccattttctacctcgacgtcacgcaacaacttggctaaataactcttcccactacctgaacatatatacaaatggagttattcaaatgcaaaaacaagtggaggttatattgtttcctgcaagaggctacgctaagaactgaaatcatgtaacaagtcgacacaaaaatcaaagagaaggctaggaaaagaacctggtagccctcgaagaataattacaaagtgatctggacgagtagatcgatgaggtggcttcagcaaatgagacacatcaatcactttagaccgagttggtgctagttgtgcagaagatggctaccaaacaataagagatttatcagtacagcaaaacaagatatttcgagaaaagaaggaagccacgaaagcaacattacagaagcattaggcatctgaggatatgatgatgacggagggatcgttggtgacgaattagtagtgacaggaaacaaggaagaaggatgagatgaaggcaaaggcggtggtggagaaaccggaagaggaggctgaccattagaaccgctgaaatagccaccgtacggaggcggatgatgaggcggaggaggaggaagaggagctacaccattaaattgacctccattcctaaattcactcccatactgatgattcatctctatattggacggcgcagctaaaccataaccatgatcgcgaaccatcttcaaccttcgttcattttcccaagagatccgaggactcggactctcagaaacaccgtaacccggagaaccacctgcgatcgtatcaatccgagctctcttatagctccgatcagcttccctatcaacatcaacggcaactggtcgccattgatttccgtggtgaggttgccacggaggatagtgattttgcggtggtcgaaccggtggtccggtgaaggaatcgaatccaggacgaggtgaattgaggtgaggaggaggaggaaagttggggttgtaagcgaaagaagatggaggaggatacggtgggcaaaaagggaagtgaggcactgtacaaatcgggcatatgtttggctgtgttggtgctggacgccattgttgttgatgattatgattatgatgatgatgatagttctggtaattattatccattgttgatgatttaatagcttgtaaatattgcaagagttttcagatgaaccctaaaatctaaattagggtttatgtgatgaaattgatgaacagaagaagaaaaactaatgtttctgagagaagctgaaaacttcgaactgtgcttgagtttgatctgaataatttaccactatgaaacatgcaactaattatggcggaggcccatttatacagtcccataatgtgagccaaaggcccaactaaaagttgaaggatatttagacttctattcttaagggccgataatgtgagccaaaggcccaactaaaagttgaaggacatttagacttccattctaaagtcagaagaacaaaaaaatagtggtcaccaaagcactatgttgtatatttttcttttttcactatgttgtatatatgttgacaaaaatatactttttataagaattatttaaaataatttacataggataacatattaacacatgcttcctttatgcgtgttaacactgattaacatgttaaaatttgagctgacacaacaacaatattaacacggtaaatgaacatcagtacatggaattaacggagaattcttttgtttaatccttaccacattttcgtaacctattacgtacgtcatttttgtgacatcattaacgtttgaatattcaatatacagaagaaaataaccaaatggataagttttattacgtcgtgatgtgattgtctgattaaacgtgacatcaaagaagataattaaacaatttttcatggtatactctctttataaataaaaataccaagaccgataccgatttatttgaaaaagtggagagacttatcttcttttattattctcaacaagtggttaagtttaaacgttggtggtttatttaatttcatttgacgtcgttagtggtttatgttcattacgctccttgttagaatcatgataattaagttagattttggctcctgaataaataacaattaatgccccactaatgtaatcatttcaatttgtttcttctccgtcaatgaagaaaatacaaagactttatatttcccatataaatattccccgggacccaaatttcgaagcgtacaatcttctctctcaaaaacgtttcagtttcagaaaacagagcaagaagaaacaactttctctcaaatgcagacgagtcggttactctccttctcctctaactctccgagttttggcagcttctcctccgccgttgacctcgctgcaatcgccgctcgagtcgtcgaagaattcagagatcacgaccaaacacaatccgattcttctccccaccgcgacgacgataatgattccgacttcgctttcgactgtccaagcaacacgtgttctcagcctctcgctaccgccgacgagattttctgtaacggtcagatccgtccgttgaatccgtacggtggaaatgctccggtggaatctcaaccgacgagtaagattactactcttcctcctcgtcgtcgtagaccggcgttgaggaaactgatgagcgaggatcgagatccggcttcgaattcttcgtcggaagctgaagaggatcttactggtgttcctccggagacgtactgtgtatggaaacctaaacaatcgaattccggagatgatgatcttcaaagactttcgtcttctccgtcacacagcaaaatcaaaagccattcagctgggttttcgaaacgttggaagctccggaatcttctgtacgttagaagcagtagtgaaggaaacgataagctcgtctttccggcgccggttaagaagaacgacgagacggtctccgatcaaagagaagaagaggaaccgccgtcaaaggtggacggagaggaagaaggaagggaaagggaagagacaaaacgacagacgtatgtgccgtatagaaaggatatgattggaatattgaaaaatgtgaatgggctaagtcgtcatttacgtcctttttgatggtgacgtggctctcagaagacgcggactttgggtgggcttcggtttctttctttttcctactttttttcttttccttttttacttttatttagtttccgagaaaatcttgagtgttggcgagaaagtaaataatttattttcgaatatttttaatgtctcggtttataaaatagataatgtataagttttggttatttgattattggaatggaggagattactggttttattcggtttattgtaataaacttgttcaaattttattcttcctcatcataatgttgaattgtttcacctaacaatatgatttggcaaattcaagtgtacacacgatatatcaattatgtgtctacttattaaagtttattttaggttacttagatgtgtgtgtgtgtgtataataaattctaaatttggataagggttgtatgtttctttgttttagacacaagaaagtgttgtggtcttttaacgtgttatacattaacgtgtggagtcttgtatacctttttatatatatagatggatttgttaatttgggtttataagttttaggtggatattgtaggaatgtttggtttgccttgagatctacttgctcgaattttccataaagcgatatgtgttcacactactgattgagagactcgagtcatcataatataaagtgtattcaatcagattatattagtttaattgtagtcgtcgattcattgatcttcaaactaaacttcagatttggtgtcttgttatatttaaaatatgttcagtggaatccgcaacaaatttaaatgaactggtttagaaaactagagatctatgtcttagaatgggtgtgatcatttcattagtgattactcattagtaattcttgccgtttttattgtgaccaatcgataaaacatcaaactaaaatacgactagaacaaaatggtccaatatttttaaggaactgttttatatctttcaactattctgtaatggtttatcgatatatatcaaaccaatatattttattatcaagtttcattacataatgtctcatactaaaccaacaaaaataaacgtcagtatatttagcatatatttactttgtcagtataccaaccctcattgcttaatatataatggaaatcaatctgaagtataacctacaagttgtacgtgtctaatagtaaacgaagtaccaccttagataatctgatatcacacataatagtaattaataaggttaaattatgaaaagaatgacttgcaagttacgatttatgataacttaaagaagctttttatcataaaccgaccaattgatttcctggtacatttatattaaaacatcattattgcaaaataatgagtcgacaaatcaaaacttctattgttccaaatcgcttttgccaaacaaattattaatctaatgtgaaggtgttttcctatgctatgactaataatttagttaaaattattcctaatgattttagcggtggcagtaggttaaaaagagtgcatttatatcttcttctttttttggtaaggagagtgcatttatatctttatccctacgattcgtaactaaatcctttaaaaaagaaaaaaaaaactaattgtttttaattcaagttttattgccggtattagaaacagaaaatatttatttcttgattgtttcaaataatggaaaccaaaaaaaaaggaaagagaaattagtaatcaaaaagtaaatttgaaagaaaaaaaagggaaatcaccatcaattaagtaaacccatcgccagagcaacaaaaaccattatcgccctcgtagcttcttcagtttctcgagtcatctctaagatacgacgtttcaagtctctcaacgatggaatgtaataaggaagaagctaaaagagcaatgactagtcattgcagagagaaaactttctgagaacgattacattggtcattggtgcaaagaaattcattaacaaggctcagaatttgtatccaacgctcgatggtttgaaacaacctttgatgatgatcaatgtttatatctctgcatcaaacaaagaagaaggagaatctgactggtatggaatccttggtgttgatcctttagctgatgatgaaacagtgaagaaacattacaagaccttagctctgttgcttcacccggacaagaacaggtttaatggtgcggaaggtgcgtttaagctggttttagatgcttggtctctactatctgataaagctaagagaattgcgttgatcaaaagagaaaaccaaaacaagaaaagagcgaaccatctgcttcgtgtaataagcctgcagagcctgcttcttcttcttcgtcgaaaccggtggacatgaccttttcgacagtgagcatgaccttttcgacagtatgcaataaatgcacaacgagatgttgtcatttttcgacgcagaatcatcttaacaagacctttccttgtccaaactgtggtcagaattcggctatgaccaatatatcatcgacagaggtgatcaatgggaggacattcatcagagtctctgtttctccgcaacaagaagaaccatcgagggccaattctcaagcaactagcagacgtagcacacgtcatgatgatgcaaactctactgagagttttttcaagaaaccaatgccgacaacaggagatgcaaactctactcatgaagctcagaggcttttcaagaacccaatgacgacaacaggagatgcgaactctactcatgaagctcagaggcttttcaagaacccttagatgaatgtaattaatcatataatgtgaaacaattaagctcggttttattggtaaaaatggtttcaaattatcagtttggcttgttcggatcacagataaattagctacacaatccataatccttgccaaaaacgctattaagtagtaccccattctctacactaatcttctttcaacatttcctcagaagcttccttatgttcttccaacaaccaattcttcatgcatgaactggcctagcaccagaagaaagctgcacattcgcggcatattcacgtgcccacaagtcatagtgaacaatctcttcaagagacggtgatgttaccaactcgtttcgatgtttatcgcatgttaattccacaaccttgaagatatccaaatagcttatcctgtaaacaaaagtgagaatataaacaattgtgattcgtatcaagaacttcattgagatgctcaaaactgaaaaataattcttacttttcatcaatgaacatttcaacagctttctcattggcggcgctgagaactccagtcattgtgcctccagctcgtccagcagcataagcaagatccatggatgggtatttcacattgtctggtttcttgaaagtcaatgaaccgagtctgccaaaatccacaattgtaaacaacttttggttttaggtgctgaatgctgatagataaggcagtggtcctaacccagtttaactgatccacaccaaaacagtagcaaaataaccaattgcaaaaccaaaccgaagaccgattcggtttcattttttatcttatctaaacaacctaaaaccaaactgaaaacaagattggggaacttttcttggtgataattaaaattttcaactaagcttagcttcacacttgataaacagagagtatataaatgtggttagcttacttgcaaaggtcaagtcttggccaagttacttcagaacaaggaactctatcgggccatgacatggtgtagagaatcggtaaacgcatatcaggccaacccaattgagcaagcacagatgaatcctgtggaacaaaacaaatacatgttatacagttatttttttaaaaccggaaaaataataatttagttagtaatgtttcagcaagacctgtgtttcaatcatggaatgtatgatactttgcggatgaatgacaatctctatatcgtcatactcagctccaaacaaataatgcgcttcaatgacctcaagaccctgtttcaaaaaatcaagaactcatctaccttgatcaaaggtattttcaaaatcagagtttaaccttaggagaaaataatcttaaccttgttgaaaagcgtagcagagtccacagtgattttctttcccatgttccagtttggatgcttcaacgcatccgctactttaacttcctttagcttttcgacaggccaatccctttttcaaaatccagtgaaaagtttccattaaccaaacgagaattgagaagaaaaaaagtctatgcagagagagaagaatatcgaaacaaacctaaaagctccaccagatgcagtcaagattatcttgcgcagagcgccttcaggcaaaccttgaatacactagagaacataaaagaagatttttcactcaaattgccagaggttgaacttgcattaagaccaacgctgaactcaatatgaaagttgaggtacttaattctatgtgatttgtgatacctgaaatatggcagaatgttctgaatctgccggaagaatctttacattatgtttgttggcaagcggaagcacgaaaggaccacctgcgattaatgtctctttgtttgcaagagcaatgtcctttcctgcttcaattgcagcaaccgtaggctgcagtaaaaataagcaacaagctttatcatctgcaactttcttttttcatatcctcttaataaggtttaataacaaaaaattagagtatatacctttagtcccgcacaacctactattccggtaacaacggttacagcttcaggatgtcgggcaacctgttgatgaacataataagtaaaaacctatctacactacaatcaaaactaacaaatgaactaacctcaatcactccttgctctcctggaataatctcgagtttatagtccaaatcagctaaagcctctttaagctcattaatcagtgactcgtttctaacagcaaccaatgcaggcttaaatctccttacctgccaccattcaaaatagaatcacagaaccatactatagagatttcttgagattgcagaagcaaaagcctaaaccagaacctgatttctctggtttgatctgatacataacgagttaatactatcttgcttatgatactaccactgaactgagaattaaactgaattccaagtggtctgaatgacaaattggagagactcaatactaatttttttacaaatgaagccaacttacctgatcagcaagtagagtaacattcgaaccagcagctagagccacaactctgaatttgtcaggattctcagccacaatatccaatgtctgcaaaatggaagttcttgtcgataaaaatgatgcaacaataactcagtaagaaaaaaatatcattcttctatgagtctagtcattcataagacaaacttaaagtctggtcatactcaagaactgcacaataatgccttaatcgaaataaaacctgagtgccaatagaaccagtagatccaacgatagagatgggttttggtccatcccaagattgacgaggcgcctcagggacagctctcccaggccatgctggaggaggttgttgttgctgctgcactttcactgaacacttaacaccttttccaaaacctctcccttgattcctcctcctcaaactaaacccacctgtgaaacactccaaagatgtaaaatttaaaactctacgacctaaagcaaaccaaaaaaaatcgaattgaagaaataacagattacctagatagagaaattcacaagagcctaagacaactaatgaaagtttgcaactttaatcgaaaagagagttgaccaaggaggaggaaagaagagaggaagaagaagaaacctgagagtttagggattggattgaacctggaggtatccaagaaagaaatagctttggattcagctggagatagtgagtttaatgtcatcatcagagtcttttaaaaatcgaatattttccagagaaccgcactactactcttgattatcagagaagacgaatcagataaacagtgtgagagagagagatgatgataagaaaggaatctggatttgaatggtacccaacagatttttgtcattttttaaagatttcgctgagcatttagtaacaaggacctttttattaaggtaacgacaacttgtaagtggtaaataatccagtcttactatgttcccattttctatttgatttctttagagtattaaacagcagaatctgtatcatcaattatatagtttgtcaaatataattattattagaaatatgcattacaagggattaatggttaaggatttctctcttacaaaataaaaaagaaaaagtttatggtattcgttcgtattatgaatttttgatatgaatatcttaaattgaatatgttttgactaacatgttgtatgctgtctttttcaaaaataaaacatgttacatgttttttttttcttcttctcttttttttttttttttataaagtacatgttatatgctgtaacaattataatccaaatgtcaaacttagtttagatctttgacaagtatataatatacttttctttttaaaaattatgtattgaatatttttcactatcattcttttttttttgtcaacatttttcactatcattcttatttctttgatatgttcctcaatgttcaatttgtaaatttaaatttcaaaagccatgtaactttaaccaacttgaattttttacgtatataattctctatatctctaattagagtcatgttaggttcgattgtttaaataaaattagtcttcttgtagactattagatcatccgttcaaaaagattattgttgtttgaatggtgctctcttttctttcttcggaaaggaataaaatttatcccataaaaagaaaagaaaaagaaaaaagataatttactttatttaagtgtgattaagctgttatgattgactatcacattacatagtgttttcgtggggatacagagatcaatagataaatgataatggtaagataatggtatgttggtattggtagatgagtcagtaaatcatttactactgctaatggatcatctgaggacaagtgttgtacgttaagtgacacatggcaaaacagtgaaagagacgttaaacaagtgttacttgctgcatccactcaaattccatcccaagtcatgcatgcaactttttctttaaacatcggaaatcggagcctgaattaatgcgttaactaatggaaacaaaaaccataattacggtgtagccatctctccaattccgattccatttcaagttaaccttatcgatatggaggatagcaactctcacccgcaaaatcaaacatcaaaaagaaaaagctctcacccgcaaaagaagcaacgtatggagaatgaaacacgatcggctaagttgttggatcttgatgttcttgactgtccggtttgcttcgagccgctcactattcctacctttcaggttatgttttgaacttgcatgcattttattttgtttcatgtgacattttgatttcgcttttgttaatttattttattgaatacggctttgattgtatctcgtttggtatattatgcgtttcagtgtgatgatggacatatagtttgcaatttttgctttgccaaagtgagtaacaagtgccctggtcctgggtgtgatttacccattggtaataagcgatgcttcgcaatggagagggttctcgaatcagcctttgttccatgtcaaaatactgagtttggctgcacaaaaagtgtctcttatgaaaaagtgtcaagtcacgaaaaggaatgcaactactctcaatgctcttgccctaacctcgaatgcaattacactggctcatataacatcatctacggtcactttatgcgtcgccatctttacaatagtacgatcgtttcctccaaatggggatattccactgttgatgttctaataaacatcaaagaaaaggtttcagttctctgggaatctcgtcagaaacttttgtttgtagttcagtgtttcaaggagcgacatggtgtttatgttactgttagacgcatcgcaccacctgcttcagaattcaagaagttctcgtatcgtctttcgtatagtatcgacggacataatgttacttacgaatcaccagaagtaaagaggcttcttgaagtgaattctcaaatccctgatgacagtttcatgtttgtccctaactgtttactgcatggtgaaatgttggagttgaagcttggcatcaagaagttgaaacaaacgtaactagatctagtttggtttggggttacgaggcgttctgttttgttgtgtttgttttaattctctgtttaagaacctttgtacttttgtagtagcccactcttgaatttattgatgttgttgttttgagttagttgtataatccaaaagctttctggtttggttcccggttcggttttgtacatagtaggatttttaataaagcctgctaatgaggttcagcaagttaccattgctcaggaaactgttatggaggatcctccaacgtctctgtttaagaattcagtaccaattcgagaggatcaaattcagaacgctatcacaaattccattcgctaatcttagaattgggcataaattctggaataatgggctcatttggtattagcgtccatacacattgtaggcccaataaaataatagaccaagaaaaaactaaaaaccggacaacgccgttatctcttcttcgtgtgaccaccacacatacatacataccactcaccgtaccaaaaagattagaccaacaaaaaaaaaaaaaaaaggaccagctcagatgagtctggagtttccaagtttaaaacctctctacctcgatttgagcaaatcctgatttactctcatcctcatcatctctcatcatcgagattcatagtctcttttgccgcttggattcttccaaggttagtgagctgctatggcaactcatcagcaaacgcaacctccttccgattttcccgctcttgccgatgaaaattcccagattccaggttcaatttacaccttctaatcattatttcttaatttttctttggtggattccatgaacagattctcagtatttcgcctggtgatgaactactgcgattgcataggatttttattgaactattattaatgatgaatgttcaattacaccaataccaaattttaaacctagaaaagattgatccttatgaagttatgatctatatttatttgatgatatagagtaatacatagtaggatttctactaatgttattattgatgaatgtgtttgttacagaggctactaagcctgctaatgaggttcagcaagctaccatagctcaggatcctccaacatctgtgtttaagaattctgaaccaatacgggaggatcaaattcagaacgctatcaaattcctttcgcacccgagggttagaggctctcctgttatacatagaagatcttttcttgagaggaaaggtctcactaaagaagagattgacgaagctttccgccgtgttcctgtaagcttcctccttacttcttttgtttggagtctttttccattcctattgcttacctctctgtgaaaaatcttaatcataggatccaccaccaagttcgcagacaactgttacaacaagtcaaggtaaacagcaacgacatgtatttgtttgtttgttcctttgattactagactgggaggtaattttgtatgaattgttatgtgacaagcagatggacagcaagcagtgtcaactgttcagccacaagctatgcagcctgtagtagctgctcctgctccactcattgtgactccacaggcagcttttctctctcggtttcgctggtaccatgctattcttgctgttggagtacttgcagcctctggtgccggtacagctgtttttattaaggtatcatgatcctgttctccatttatatgcagtgtactgagttttttatgttatgaatttactttgtacactggatagtttttagggttacttggcatagtcctctaaagacgtatttagtgggataaaatggttaggccattaagaaaatggaagcagactatataggaattcatttctttggcttatctaatcaatttcattcctctgacactcgaacaccagaatatagttgccaagaactttcatgaaaatattatccgtaagagtttgttagggtgttagaaagttgttaatccctttctggcttttactgattgctgctagatgtgttttaatgctccatgtggaatgcaactttatagtatgaatctcccttcttcaaaatcaatatcttattgaagtgagatttgttcttgtttcagagatctctcatacccagatttaaatcctgggtccaaagaattatgttggaagaagaaactgaccctctgaagaaagctgatgctaaacctagcttagctgaagaagctgtagctgcagccaaagctgcttctgcggctgcttctgatgtagccagggttagtcaggaaatgatgataacaaagaatgaaggtagatatatttctgcagcttatattgtagactaattttgtctctttttctgtgatcatttctggacttttcttgcttgttccttcttttcctctaaattaaattatatacattgcttcctgtcagagaggaaatattttgaggacttaacgcacctgttaggtgtccaagtacaagaaatgaagtccttgagcaataatatccgtaagcttgaaggtaagtattaagctttactgaaacagagatttggtcttggtctggacaactcttatcgggagtcatggagggtctagttaccttaatattcggttgatcttaagatccattgttaaagcttctcttacttactttcagggcaatccaacaacatcccaaagatttattcagctgatcaagaggtttataatggttcggtcactacagcaagggtgagtttataggttttggtttgagtaagctttgattcatagatttgttttttttgtaaaggtgattcatagattatataggattataaacacaaagaaaacccaaaaactatgtatcataattcttttggtaacattaggaaccttgatatgtgatgcagaaaccctatacaaatggcagcaatgttgattatgacacacgttcaggttattatctctctttttctctgcctcaaactgcattatgttttgttgtttttggttagcttattttttctaactaatggacaatacagcacgatctgcatctcctcctgcggcaccagctgattcgtcggcgccccctcatccaaagtcatacatggatgtaatgttctgaaatccctcaagtttgctgcagaatcatggatttataataaatcttatcctttgaattcctaataatctttgtaacatttagttgattattggtgatactgcagataatgtctatgatccagagaggagagaagccttcaaacattcgggtaagttgaaaactacaatcctttctcgccccatttctagactaacaatatagttttgtggtgacaaacttatggcactttcactgaaatctacaggagattaacgacatgccgcccaatccaaaccaaccactatcagatccacgcattgctcccaaatcaaaggtacaaactgaaaatgtccctgaatgttaatctaaaagtacattatttgtaaggaatcttggtcaaatttgtggaactgaacttattattaagacttcattaaactcgtattctctcttattaccagccatgggactatggtcaagcgccgcaagacgagagttccaatggtcaatggtggcaacagaaaaaccctagatccacggatttcggatacgagacaacaacagcggcgcgtttcactgctaaccaaaatgaaacaagtacaatggaaccagcagctttccagaggcaacgatcatgggtacctccacaaccacctccagttgccatggcagaagcagtcgaggccattcgccgtcctaagccacaagctaagatagaccaagaagcagctgctagtgatggccagtcaggtgtgagcgatgagttacagaagatcactaaattctccgaatctggtggtgatgggtcaggaggaattaagatcgcagagatacaagaagaaacagaacagcaacatatcagccaggaagggaactaaaaacaataataattaggggttattgatactttatgaggtttgcctgtaagaaaacatgcatttaggtcttgggatttatcaccacctaccttcatttaataaaatatgtcttgctacacaagtaaactcagtcatttgatgattacttgtcttattttaatattttgaaacttgtatcacacattaccattctaagctataagagagactgtacatagatatagagtaacatttggtttaagggaaggcaacacaactaggaggaagcatgagtgaagagcctgtaagaagaaatcaacgcgctgaccgcgaacgctccaaacgctaaaaaggaaaccgcgatggaagcggttgccatttgagtaaactcatctttgccccaattagatacccaatcatcaactcgagtcgcagcacatgaagaagccgacattagaagatatgcaagaagctacaaaaaagctcatcagaattcatcaaaaaactatgtttgattacacaaatcgctcgactaaatgttttaaagaaagactaacttgatccatggagaaaacgaataagtcatgaaatccacagttgatcatataactctcttttgcgatgtagcaagcagcgtcacaagcttcaaatgcagagtaaacgaatgctataacgttcacagccaaacaatacctgcaagagatttgtgcagatgatgatttttgaataatctgattaagatttcgattctaaaaccaaaaagttgtggtgaagaagagagagacctgtactctttgtagcgatcataagaatcgccactccatccttgagttttatcagccgccatgattgaaaacgaaatcacacacaaaattacttcggtaattctaaaccctagcgccgtcaaacttactaaatcgtctcctctcgctctgttcaccgtcgtcctcgtcgattcttctccgtttatcggagctccagcttttctcgtcgtagtttgtccaccgtcttctctcacccagctattgtgcaccaccatagacgacggagacttatccgaagaagaattcatcggaactctcgcattcctctgacgccgcggcggcggaaactgaggaggaggaggcggaatcggcgagggaagaggcgaaaactgtgtgagcttattaccagctacgatcgacttcggattctcgattttgaacggagatccctcaggagaaacgtaacggctttcaggtaaatctccggcatctgataacggagaatgaaatcgaagaggagagtgaggtgattcgttgtaactctgtgcttccgagttcgatgacgcagtccgcttcatcttcatctatttgattcgattttctccggcgtcttcttcccggaatttgatttttttttgccgagcttttttgtgtgtgtgtttgttatggtctcagtgtgtgtgagaaagtgaaggagaaaaagaaactttaatttcttcttctctcttttgttttcccggcaatagaagagaccccactttaacatttcttcgtggagaattaaaaccccaaaatgatctagtgtgacgcatgtctatgtgtacctgcacctatatgtctttaaaccaatgatgttgcaacacgttagtttataacgcaatcagatgattcagtgtgacgcatgttcttgtgcaccaagatgtaatcaactaacgattttgcatcgcgttaatttatgacgcaatcataaggtgtttatgaattttttgtgcatgtgtttgtttgattttatttgatcttcttaccatctacaaagattccatattactaaagaagtatatcaacttactaaatatacacataggagaaacaattatgcgattccgtatattttctttagtcacaaaaatatttttgtttagaaattttgaagtagattacttttttttaatgattctgaaatctattttcaactcttttaatgattccatttttttttttttttttgcatattttacaaaccgaaaacattagccaattctcgaaaataaattagcacaaaagttaaaggtagtataagaaaaacaaataaagaatacgggaataatatataaacctagacgaagctaaagtaaagcatcattgatctctatcaattatatttgttttcaatcttgtagttttttgggcattcccttttgaatcaaatgtcttctatctttagattaagaaactgtttttttttggagacgaattaaaatattttaaatatatcaaaagcatttttttgccttttcttctttgtttaaaactttaaagcacaaagcaacccacccactcctattttcttttctttatgtcttaccatatttttttttcttcaaattaatccatcgtcacaacactttctttttacttcttatataaattacttttcgatttaggcaaatgcaaagaaacaatcggggcctttgtttgaaatgagtagagcatataattattatttaccaagacttgaaggaaaagtctaagaaagtataaaagccaccaatactaaagacaccaaaaaacaaaaaaaaacagatatcatttcatccaaggacatgacaaagcaagcaaaagaaaccacaatgctaatcttttggaacataaccaaacaaccttggtatacaacggtaacattgaaaatgcgctgcttgtatgccacagaaaactgacttatcgggagatggtctatattcttgtccttctctagcaatccataccaatttggagtagtagaaattttcgctttcatcacaacacacaacaattttcttctcctcatcaagaatatagaagctcattgatctcgataaacaaggagaaactaaatctaatgttaagaacttgctccacgagacaaatgtggtctcaatctcaacggtcacccatatttccacctttagtgtctgcctactctgataaaacaaggaaagatgttcttctctaacaaccgagagagcaatagtatcaacacggcatggttgatgatgaaagtgagcacacaaacgttgaaacctttctgttgaaaaatcaaaactgagtagtgagtagtcgtcgttgtctcctttttcaatccatgacacccaataagtatttccacttaaagacgcacacgcatgaccatcacattttaagtaggcctgatcgggaatgatcacatcaagattcctccatgaattagaggtaaactcatacatttccatcctttccggagccaacttctcgtgtatacacacaaacctcaagatttgtagctacgacacaattcattcttgtcgtatccgagagcaaaggctccgatgttgtctttattttgcagctgtatccatcttgtttgcccagaaaacgggttccaaaccacaatcatcatgttcttcttaaaagggcatagcaatatgccatcgcagtgaaaggcttcagataaatcgactggttgattagaatggggagatattaggccatgcccatctttagatatgtatatgtttttctcaagtctagcgagaaaggtgctcattggacatactctatgatcaaccagcatgagagcatgatactgtcttgctgttttaattatcattgtattttttgatgaatctcggatctttgaataaagcttgatggtaccaccgtttgcaagtagctcgtaagcttctcagagatgctaccggaaccctatatagtatctcttctatcaaatcctctggcagatcggagatcatccttgtttctctcgtcatcagttagggtttaaactagatttagtactgtaacaaatttaagctcttatatgatgaacaaataagttaaagctattaaataagtagattctttatacatatgagacaaatttgtaaggcaagtatttaacatatgatctttaattttggtaattaatatatatcccgagattccctgtttttgttaccacctaaattttacttatcttatttttattatattttccaaactgttatatttatcttctaaaaatctgatcaacttaagactctaagatttgatatttgtatttctattagaagtagatatacttttttaaatcatacagtattcaactttcttttttaattccttaactgatatcaatataagttgatttctagtttcatatcattttcttttttacttatttaggggtactaaattaaatccacaaactgttttcaataacagtagattttaatatagatttttaaaatcattaatacaataacagtagatttcattagaatttttaaaattaatgagtgaataacataagatttgtaacctttcatgaatttcatgaaatccttcctgaattttgtagaatctttcctaaattttgtgaaatctttcaataaattattttcttaaatttagaacgaattttataaaatttaggaaagatttcattaaattcaagaagggttgcacgaaatatttttttgtgaaatctttaccgaattttgtagaatatttatttttcgtaagaacaaacttttatcaaatgaactagttgaagttttttttagaaacaaaaacactacaacttaatatgagtttcttgaaaaaaacatttaagaaagcaattagaaatatacggcctattatcattatgattatatgtactaacacttgcattgaaatctaaaactaagcttcaaaattgtatttgaataataacaatacatagatactgaggataaaatgtttttagtcacagtttggtggtttcttacacttatatacggcagaagcaggttgcttatacactggaatgctgtttgcatccaacaatcttacttctcctggtccaaaatacaactccgagtgccttcgaaggtcgagtccttggataccagcttgtaacaccgataagttgtctgaatcaggcgaaacaatcacgattgtgtcttctgagtattgagtctcgagaatagacatgagttgcgtcacacgcacaaatacatctgatacactctcgttgggggtaccgtcgcttataggaggaggttttgtcttcatcgatattgagtctaatgcatacacctgcacagaagttgaaactttcatacttcaacccgagtttttgtttgtatgttttaatgtgaaaaatgctaaaatcttacttctgatatagattcaagcttcttgccttcgtaagctcctaaaccacgagcatcaaggaagctatactccggaactatatagctgcgaaaaccaagtgaacataaaacattcagcgtaccatcacaaagattagattccacagctaaaacctcactaaagagtaagaagactaatggacgattttacctgcgactaattccattgatggcggcgatgatttcagcagcctgataagctctctgtgttatggaaggccagagccaacagtttcggtcacaagctcccattgcttttaactgtaacgcagctctcagagtctgcttcttacctttctctgataatccgctatctaccgatgttttggcaaccgggtttgtgttgattatccctaagctttcgtaatctgattccccagctctcacaaggtaataacttgatccaagaaaaaacaacaaccaaaaacacattgtgtattattagctccattttctaagataaccaggctaaataactccggaaacgaatcaagaacaagaatcaaaatgttaaaagtcagagattcactcttaacagttcaatgtgaagaatttggaatctcactaatctactaaagctttacaagatcctttaaacttagttccaatcaaaaggacgaagatacgtatacattgatgcacatctggttgtatgcacagaaactcaaaactagggttttgaaaaagtaaattaccgattagagagccggagaggcggcatttgaaagagaccgcgtgcgttagctggtgcggcgatggagacggagagtgatggtgtggcaatacatacggagagagttttgaaaaggtctcggcgggtaatatgcggcgaggaaagtaaattcagaggaatttggtaggtttccggcgacggaggaggatgtaagtgtgaggcggtggtgaccgccggtgatgatgataacataattcaatcgtcatctcaaacggtatctctggtcctccgtgttttaaggttacaaaaccacaattgtgaatcgcacattccggtttagattatgggttcgtttttaaaatcgaatcagctaaaccggtaactttctcggaaatattcttaaccggtcaggaccaaaaaaaaaacctaaaacaagagagaaactctgtttattactctgctcttaagaggacaaatttgtttctttccttacagtttccaaaaaagaaaatgttataaaagtaatctaataaacttcgattaaaactaaaattgtaacaacgtacatagattcaacttgcgaaagttacaatcatttccaaaaaaaaaaactgaaaacccatttcttcatacacaagaaacttcataacttaagggttccacttgttcattttttttctacataggcttacacaaaataatagtaataagaacttcacctcacttctgattctatcttaacctatcgatgaagcaccgtagacgatgaaatagctgaaactatcaagcctggccaagttcgattccagcattcgaatagcgcttttctttatcttcatcgtcatcgttccagttagttgttttatagtaagttatgtatattataagctggattattcctgatagcgatccaagaccatttggaatctgttttcatgcatggaagataattagtcctttttgagatgtagggatttgagttccaaacaataaagatatatatgagggtttaccaaaatataagggtcaaatttaagacatgcataaatgacccaaacgacaccgttcatgaagttggctaatgataggaagaacggcatgtatttcacgctctttgtctttatcacaagtttctgttccacattataactaaactcattaaatggaaattcacgagataaagagaacaaaagaaaaaagttgatagtgtagtatccaatttttgcatttccgtgattagtttagaaagaagaggcatcataccatgacggtgagaggagcagcatacatgatgacgttgaaaacaatgcacaagatcccaataagcattgatctctgctttgttgtatgcaaaaaatacattgtgcagaagatcaccaccgccatgaatattacctcgataaccatagctattgtgatctttctctgtacacatatatatatatcataacttcacatatcaaaatctatatcgatctacatttgaagtaacaaactaaaacaaacatcaaccactaattcactaattttcaattggtttaaaggctatcaaacctatgtctgaaaagtttatataaattgaataatttagaatgcatatacatatttttatcattcgtgttgaaattagaggttttaaaggcttacgcggacaggggaggtagcgaagacaaagaagatggtgacgtaaacgagttccatgaaaagaccagttccattaatggtgatgacgaggagactgtcgggctggacgaaaggaagtccgtaaaatgtccacatcatgcagtttaaaaccgtagctacgtatggatctggcttaaactcggagaccgatttcatcttccatatcttcaccatcgttggtctgcacaattttcacatatgtcattgcatgcaacaaaacaaaaaaagatttaatcatcatgtgtgcttacattggagcgcagaacaagccgaaagaaatcacgtttcctaaacatataacagacaaacaaagacatgagcaaatgtttttgttgttgattgaattaaactttatgtttgagtaaattgtggaggacttaccaacgattccgacgatcgtccgggcggtgtgggggtccgtcatttttctttgtttctaaagaagaattctttatcttctacagattttatcaaagaactaatttatattttataaaaataaaagaagaagagaaacaaaatatgttgatgatttcgattcttcttttcgatgattcttgtttataatttttttctttagtactgcgtttcttttttgtttgtttctgatttgtgatgtgagttttgtttgtttgatgaaatagcttttttttttttggtgtggtttctaggttctgtttttggttttttgatatttggattatttttggtttctgctttatgaacagagaaaaaagaaaaagtggattttaatagtgagtctgtgaatcagcagaatctgggtagagtaacaaacgcatgacacgtggtttcaaatttgagccatgaagccgttgactccgctcgtaccccatgcatgagaaacacccggctcttcactcacattaatacctctgtctctctctctctctctctttctctttctcaaacataattacatttactattactacatcttcattatgtataaagagtttgttgtctcatattcatgtcatagtaaatgttgtgtagagcatcttgtatagtatatacaataatacaaagcaagtgaatatgtgctgtaaccaaaaactttgttaatagcaacttgtattgatgaataaagagaagagattttagttttactctctttttaggtttactatgtaaacactttgctatatatgaatcacttaatattcctttctcatcaagctacgaaactgcaaacgaattgaatcaagatgaagagaaacagaacacacaagcctcaggtttcagtgtgaggcgcatcaatcgaaaatactaaattaatctctcattgtttcttaatgttttccctttaaatgtaggtcggttaagacttgagatctaaaacctaatgggacatgaaactgggctgcttagcttataaactcttttgtattgccaatatatagaaaatatccaaaaaaacaaatgtcataaacccccaaaaaatgtcaaaaaccaaaaatatatatgtgtttttcttcgttcaagtttaatgaaatagaaaactgacaccatgaagagaggacgccaagagaagaagacctcacgatctccaaaacgacgacaacaacgtcagaacgaaatctccgagagagaaaattcaaacggtatacatatccctttcgatgtaataaccgatatactctcgagactccctgttaagtcacttgtgaggttccaatgtgtatcgaagctgtggtcatctcgtatcaccctcttgatcatgactcggtcattattctcgccctctacttatcctactaatgatatatcattcatatacccagacaaagacagtaattatacattaaaccatgggcgaagttgggattttaagtatcaataattttcgaggactcttctgttgttggtcaagctcgatctataaacataccaataggaaaacgattttattaccggaggtaaaacacgatagatggagcaactcgtgtgatggattgttcggatatgatccagttgagaaacaagttttcacattagtgggaggtccaatgaagcagcaatggaggagccttgacatccaaggcatttggaatcactctccagaagctaggagtagtggtttatgtatcaaagagtttatctattacatagcacatgtagaaagctgggatgatcccgaattctatgagctagtgaggttcgacgttagacacgaaagctttgatcgtattcagatgcccataactctgcagatgaatcagcagctcagtgaagtgagtttcgatgaattgactttggtaaactaccaaggaaaattaggatgcatacgttacaccaaagctagtgcagagatgtggattatggaagatcatattgagcaacaagaatggtctaagatgatgatatttgagaaattaggtattgcatcgctggtgtcagtcctaatggtgagattgtgataatgccaaagacagtgacatctgctcaatctttgtacccctcgtactatgatccgaaatgttagtttgttgtacccgccggatcacatttgttcaactcgttcccttagtgaatagtagtttttataataaatatcaattttgttttatcaagtgtattcctaaaaacattgttaggaaagtaactatcttataacggattctagctcaagatatttattttttctaagactcgttttcaccagcctaagaaattgtttaacactttttatgattctcaatcgtgttgatcgataattgagtttctaaggttttaatatttacagccatgattcgtaaaagtgtcaagtgtgcatataataacatagaaaaaataacaatttcttaatttatattacaagtgtcaagtgtgcatataataaataggaccaatcataatcctttacagctaaaacttgaatcaagttatattatcatcacgagtcttttgacccaagaaaaaacttctctgagtttcggcccatggaactttcgcagtcggacccaacccgagatcctgatacccggtacgatcaacgttgctgttgtttccccagcttccgccgatcaagaagctccaccgccgttggttactcctcctggggacgaattcgaaccgtcgatgacagtaatcacagcggcgaccacggcgacgagccacgttggtggatccgagcatccttgaagatccgagagtggtcagaaatcgttgctggtccacggtggaagactttcattcgtcgattcaatcgcgatccacgacgcggccgcgattgggacgcaagcgagaagtttcaatacgatcctttgagttactctttgaacttcgatgacgacgacgaggaggatgaatacgtcggactaggtggattacgaagcttctcgacccgattcgcttctgtcccggtttactcaggtaaagctccggcgatttcgccgacgtcgttgtctgcgttgacgccgcgtaatgagatcattgaaagttagtgggcgcgtgtgagaaacgcgtttgcgtttctggcggcggggaaaaggctgtcaaaatggttgactggtttggtttacatcgtttttggagtctgtcgcgttttcttatttaatcattctgtttatataatcaactttgaattaattttattattttcccagtttaattaatttatttatcaaccaaattttatgtttcttgaaagagaagcaatattttgtttcttttttgaggggatattgaacttgttgtggctaatataatataattttatgtaaattagctgtttagcatatgtggaagtaatgatttagttaatcatggttgcttgacatgatttctttatttttataatctatactcatttttaaaattccactcaaaaacttttctgttttccaaagatatagttaccgttaaagccgagtaaagagaagaaactatcaatcgtttggggtagtatgtaatgaaccaacaacacttttcccaattcaaacttcaaacctttctattggaagccataaacgaatgacgatcattgatcaaaacattcaaatacattttttcgtttctctcaatttattaaggaactacataacgatttacatgttctagagagaaaactgtaccgaagaatcgattcaccttcagattcataagaatggttcaaaattcataagaccaaaagaaacagcaaattaaagaaaacaataaaagaagggaccgataggaacaaagagggagaaaacacgtgacctggcaagggacttccattacgtgggtcggctcgtttcggatgtggcccatatattgagttgtcgggcccgttgcatttgtttgttgagttcatatgatatattcgaaaaaacttttactttttcaatattaacccaacttcaaatccaataaccatatttcttactgccaaaactcggatttgtgatcttcaagtctttttcactttatggataatttccactgttaatcacgttttgcttttacgcgcatcaactgttgtggaaatatatatttatcgtttgttcttgtttcttttcaatgacgctatccttacaccagcacgacatatgctcctgttacatgtcttccttagagaccaaaagttatggattcacttgtacacacatacacatatattgatttagtttaatgtgattactagtctccttttgcgattttcgttcttactagtctctatatttatctggtttaggccatacttttgtcattgtattgtattattaatcagctactttaatttgtacttgtattttggagcttttggtggaaataacttgcaaaatactaaaatattggaccagagagcgataagttcccgtggtcgtccttttgaagacctctctagttaacaatacttttgcattttcatatttatggtggttgcgtcgccgtcgatatagtcgtaggtattactccaataattaacttaccttataaaataaaatcatttatcttctgcttttggtagatgttcacacagtttggctccaacatccacctataaatgattatttaaacacatgacaaaaacacttttactttctaaaccatgagtctgcaattatatccataaacaaacaaaaaggaactatttggtaagagtattcaatttttaataactgtattaaaagttgctttgtgaatattgagaatttttattgctggttgttgccaacgaaactcttgttggcaattttaaatatcttgagtaaattaaattagatgataagtttttttaaaagtaggtccacataaaaaaatccatatatcctaatataataaatgaatatcctaaactaaaattacaattttagaattatcagttttacacttgtgaattgtgatataagtaatgttgaaaggttggtcttagtgattttgctataaatttttgttgctatgatattctattattttatatattttgtaaccctagcttgtaagttatgctatatacattatatgatatgtaagtctcgagagaaaaacaaaaatagcaaaacatgtattcgacagtacatgttaatgtatacaaatatggtatatccatcttcacttgtcactgtgtggctcaacgtgacactattattaacttgacgaatatctaccttctcttataattcgattcgtaacgccatacttgtatgtaatacacattatttcattttcttacaatccaatacaagtgtaataaacacttaaaaaaaaaaaaacaagattgaaccaccaagatttggttaacaaattccaatgcaaatttgctcgttggagtaataaatgaactacaagaatttggaaaaggaaagcttggacgatggatcatgtgagtcatcaccgctctttctctatcttcaagttcaaaccaaaaacaagccaccaaataccaataaacaatttcgtttatctaattggaaatattgaaaaaacaaacagaaaaaagtaaaaaaggaacagaaaaaaaagccataaatttatgcaacaaaccctaccttcttctatgctctaaagagggtttatttatcttttactcctctttttaagtaatctcacttcatttatctctctctctctctctatttcttttgcttccttttggtatttgctttgtatgtttgttttgagatcaaaatggcttcaagtgcttcaaagttcatcaagtgtgtgactgttggtgatggtgctgttggtaaaacctgtatgctcatctgctacaccagcaataaattccccactgtaagttctctttaaaaagacctctctttctctcttgaattttgatcaggaatctcatctggatttatcagatttagctcaaattttacaaaattttaatcaatttcagtatctgggtctactaaatttcagcttcttattgccataaaggttcttagaatctatctgggtatgtcaaagttagctcctttttcctaggaactgtgcatgatataagatccatttttggagattttgattttttttacttttcataagtatgtgtggcgcatctgggtttttgcagcttttgtgtatagtccagctttatgttatcttttttcatttaacatcctctggagtctggattcgtcagactttttcttcattgctattattattattattatatgtatatatgcttgatttgatgattgaaagtttgaaactgtgtattgatttgatgaattgtttgtaacaggactacataccaacagtttttgacaactttagtgcaaatgttgttgttgaaggcaccactgtcaatttggggctttgggacactgctggtatgaacactctttctgagtcttgaatcctatagtggtttataacattcttattggtctagttctttcatttggttgataaatgagatccattgaatagctttgtctcatatgaggttacatatgtatatcctttgtttgcagggcaagaagactataacagattaaggcctttaagttacaggggagcagatgttttcgtcttgtctttctcattagtcagccgagctagctacgagaatgtttttaaaaaggtctgattgaataaatgatccttttctctaattgttgaaaacgataagactcttatagtgtcagaatgagtcatttctaatgttatatgactgttcttattgagtcagtggatccctgaactccaacactttgctccaggagttccccttgtccttgttggtaccaaattaggtaagaataaccgatgagcatttaccaacagattcctcttaaccgtttagttacaattcatagctaatgattcttacaacactggtgtagatcttcgtgaagataagcattatttggctgatcatcctggactatcccctgtaactactgcacaggtttagtcttaaagagcctttttactttagatttcatataattccactataaggcttgatggtattaactaaatgaacatttctatctgatagggagaggagttgcgtaagctaattggtgcgacgtattacattgagtgtagttcaaaaactcaacaggtatatgaggcagcttctttatgttactcttttcttcggattaacaaagcgatgaagtttatatattgcagaatgtgaaagcagtttttgattctgcgataaaggaagtgatcaaacctctggttaaacaaaaggagaagactaagaagaagaagaagcaaaagtcgaatcacggctgtttatcgtgagtatatatacaaatctttacaaactctgcatctacaatcttatgaagggtactgatttcacctttgtgtttattttgtatgtgcagaaatgttctgtgtgggaggatagtgactcggcattgatgacgatgacccaactcagtctgatgattttaaactccacttttgagattgtgtgataaacgagagactttatattatatagattgaatcatgtaagagattattagcctctaatcaatcaatagttaccttgaagagagaaagagggggaggtagagagcttattattaattcaattgtgtttatttgtttcaaacctgttattgcaatatattagccattttgatacaacagagaagctctctcttccttcgcttaaccctgtgaagacaagcagttattgtcctacattagcaatcaagtaattttattttgtttgttaatgttgatctcttgtcgttacattgtccagtgtcagtcaaatcactgtcctcaaagtacaactgaccaaactttgtctctcttgacatagacattaaaactttctacataagagtctcatatttcagtagtcgcaggctaattccagtcggttccaatgacacattgtcttcaagattttgagacagcagttccaaaggtttttttatcttccacctgaccaaaaaaaggagattaagccataaaaagatggaagcgacgaactcagtcgaagactttccgatgagactcgagtacacgagaaacgaccactggactcaccagaccagtcccaaaggcaaataaataacggagtaaaaaaaaaaaaaaaaacgccgagtttcatctaaacataatagaacaaatgtcaatgggtccgagagagcctgtaagagcataaatgggctttaatcgggccaaattaaatgtaactctttctgttgttgtttttccggtgtacctctctctgttttttttttagctctttttggaaaaagcaactttttcttgatttctttttgacgtgaaagcaggcttttctgttaggcagataaaagcatatttttattacttaagaccatttccttcgtaaaagaaagcaaaagaaatatataaaccggacaaggttaaaagatatgcgacacttacacatcaagtcataaattagaaacaacaagaacatgattacttatttatttgagttggtgagatcggagttacaacacacaagtttctattgggtatggggaagagagaatgacaggaagagcagggagagggctcgttaatctaaaccaaccatgacccaagtagccaacctttttttttcctcttcaaaatttcacattctttattcgagattatactacttataaagtataataactagctcattcaaacaaaacaaaaagtgctgtaaggataacactatcaacgcgtgttaagaaaagtaacacttttgaacttctttttaccattgacaaattttaatagttacaaccatgtcattgctttatttaacaattttaaaaaggaaatctaaaatgtacataaacctttagctaatttacaaatatatcatattcttaatgcatctacaacaaccatattatgaactctaaatactaggatttgtaaccggattcggtttatttggactacaaagagtaaaaatggactttgtccatctcatctagccaatgttttataagattctatattgggtgcatcatgcatgtgtctctcttgctcacaccctacatctacccatcgtttcagccacaattatgtatatatttttttgtcttcaacattttagctcatatgcaccaaattttcatgaaaatgtttgtttatcaatcatattcatcatgtgttgttagccattaatttcgatgagattgcaaatcttgaaaaaaaaaatggaattatgtgggggaaaaagtaaagaatggcacatgaagagagttttgcgtaattcccaaaagtaaagccagaaagatttttctcccaccccatgtgcttactctccccagtccccactttttcttaattaaattcatatttcttccatttttatttttcggcttttaatttcttagcatacttttaaaaaaaaaatattgtcacactttttaggccgattttgactgagttacacaggtcaataatgctcccaattcggcggactatagttattttagtggacatttgtgttaactaattttgtggcaaaaagaaactcggaacaaattaaaccataactgatttagactaaattatataatgtaatggccattatgtattaactaaagacaaaagtaatactacgatctacgataatacaaaaaaaaaattcagaatatcgcgtcattatcaacttgacaccaacttgtgagtctcccaaactcaatgattatgtggtcattatcggtggtgtttttaaaaaatactatgaaaactcgctctcactaatatcaagtggcttacacacttgattgactaatcaatagtttatcactactactataatgtttcaggctagattttccatcacgtgccaaaaaattccttcaaacaatttagcaagctaaccatcaaatttaattacgaatttttttctttcatatccacgtggcggatattcaaacttaattatgtgtaacatatgaatgacgtaaataatctatgcacatctcgttttactgttgtgtgttgctttaaaggctatcatggataacgtgtgtatatgaccttcgagaaaattttgaagagatccattcaacaaaacatgcatgacattttgaatatatcccaattattaaagactcaataattttcagaagtatattttgggtataaacaggtaaccgtacgtgttgctacacttgctattgtccatctataatgtgaaaaatatcaatttaaacattactgtttttatgtagtttttagttcatgtagtatttgattatctggagaagaagaaaaaaagatgataaataaaaaaattgtcggcaatagaaaactgagtttaggtcaaaatagttatgtactatagttattaccgacgtaaacactgataaattgaaaacgatgcatcactggtttttgacaaaatgtcgaattagaacaaacatgactcagtgtattagaaagtcaaaatatacacatttcctcttgaatagtagtattagcttgataactttgtttatcttaatgaaatcgtattaaagaagtttagtgccgagattaaatctcgagtcctatcactctatcaggcactagaatatataatgtcccactaaattcgataacaaattatctttaaagttaaagtatctttataattgtttttatatatggatcacgggactacaagaaaaaaagtagacgtgacaattatcttttctgtgtttttttctcgttatctctagttttgtttgatgcgtatgtatataatttggacaatactataataaagtatgcttaataagattctccaatcgtttttatattattcttaatataaaatcaaaagagattgatgatttcaaatgatgcctacaaagaataacatccgtgtcgttaatagaattcacaaggaatttatatattctaatgtacattcgacttgaaatcaaaatcatatggacattaaacaaaaaaaaaaaaactagaaaaggattaaaaagagtaaagtaaaattttgatggttcgaaattagaccaaagcgtatgaaacatcatcttttgagtaccatatattttgcaacttcaactaattaagagtgtagtataagctgggagttttggaactcaaacatcataatccattccatcatctctaaacttgggaaaaaatcccacagctaccgtattatatttgggaaatcgtataaaccaaaataagaaagttgttaattttttttaactataattaacccgacacttagaaatgtgtatcaaaaaagtaatgcaagaattatcattgacaagtttcaacaacagaattattgaaagatttactttatttgaacaaatctcactattaactttgtttttgtcaagcctctagagataggttaaaactttaacaaactttacttaacaagaaaagactatgacttttcaaaatgcaataaaaatactttaaagaagaaaagattcctctcgtctcttcctttgttcacatcactttcatctttattttctttattaattaatcatttattactcctctttcaaaaacaaacattttttatttataaaaaattcatacggcgctaatttcaccaccgctcttcctaattgattcttcaaaatccatgattactattgacccccaaacaaaaataatataaatctgatactatttggttagctttaagcatataattctcatctataactccaatcaccaaatcaagaaccgcctttagttaataaattgttcattaattttgctaacaacaatatttgtccacattacacgttccattcataaaaaaattgactccaatattaattgtatttttttacacctcgagttttgcagaaaaataaataaaagctcacatttttattttctccctctctctctctctgtgtctgtgtatgtgtggctttaccttttgtacctaaacctctcacactctctctctctggcttgctgtttactctcatcgtctcctttacttcattcgtcttcttcctctctttcccacaagctcccattgatgtgagtttcttatcacttttctttttccgatttgtcaattccttttttgcactgatttgtgcttcgcttacacattgctagtagattccccgatctgggttttttcttattcgtgttcatcatactaaagtttggtgcttttttgtgtttgtgtagatagagagagagatttaaggaaggaatcatggcagggggtggagctccagcacccaaagcagacgaaccacaaccacatcctcctaaagatcaacttcccaacatttcttattgcatcaccagtcctcctccttggcgtgagaccttcttcctacttgttttctgattctaagttttgaaattaaagctctttgatttttatttcgaggtttttccggctttatctgtcggtggtgtgtgtagatgttaggtttttttctctttattcggctttgttcttcttaacaatgtctcgacctgagatttactcttgttttactcgtttagacctttatttttagtaagatttgtattcccagtttgcttttaagctggagattttctttcctaatttgttgcatctgtggcaaatttgtggttttcttctgttgttaactaatctctgggtgggatgcttgtgaaccgaatataagctttgtttgatgtaccagttttttacaatgtcggaaaccattatctcttacatatgttcaatcacattagtctgtgcttctatcttcttttgaaacatacaatttttggtgtttgcaatgagttcctttggaattctgcagtttttcataaagacttacatttttcatgcttgtgtttcagctgaagctattcttcttggattccaacattaccttgtgatgcttgggacaacggtgctcatacctactgctcttgttccccagatgggaggtggatatgtaaggcctcaacgatttaacttgtagtaaagaggaagatgaatcaaatgatgtcagtgactgaaaatgattttgattttctattgttctaatttcaggaagagaaggcaaaggtgatccagactattctctttgttgctggcatcaacacattgctccaaacactgttcggtactagattgcctgctgttgttggagcttcctacacattcgtgccaacaacgatatccataatcctctctggcagattcagtgatacctcgaaccctatagatgtatgattacttcctgctttatcattgtgaaatgggaattttttctttctttgatttcatctctatggcccttacttggtgctattatgacaacaaagaatatgtttaaattgctttgtttagcgctttgagaggataatgcgggcaacccaaggcgccttgattgttgcttctaccctgcagatgattcttggtttcagtggtctctggcgtaatgttgttaggttagtctcgaggaaaaaatggtctcagacattcgatttgcttacacagcaatagatttctcagacatgtcttcagaattacaatgacgatgtggtgatgtaatttcttttgtatttcattttcaggttcttaagtcctatttcagctgttccactggtgggtctcgttggttttgggctgtatgagtttggtttcccgggggtaagtctactctatatgagcacttacgagcagaccagaaactcttatttcttttagttgttgatatcctttttacattttaggttgctaaatgcatagagattggactgcctgagcttcttattctagtattcgtttcacaggtaatctttttaacttacttacagattaatcctgtctaactcccaaaatcttttttttttttttaacttacctgatttcatgtgttcatgtttcctgttacagtacctgcctcatgtgatcaaatcagggaaaaatgtgtttgaccgatttgctgtgatattcgcggtggtgattgtgtggatctatgctcatcttcttacagttggtggggcctacaatggtgctgcaccaactactcaaacaagttgccggacagatcgtgctggaatcataggtgctgccccatggtaagtggttacaacaaagctcaaaatatgtagctcccaaaataccatttccactaaaaatttccagtttaaacagaacaaaagaacatgaacgaatagagtatcagaagataaatgtgatctcattggattcgttgttaacattagtttctttgtacttaggataagagttccatggcctttccagtggggtgccccatcgtttgatgctggagaagcttttgcaatgatgatggcttcttttgttgctctagttgaggtctgtggttatcttcttcacattttaatctttcaaaatataatgattatgctctgttgttctgtttattcattttggtttcttgtttattctgtgtctggctgatctttaaagtcaaccggtgcttttgtcgcggtgtcaagatacgcaagtgcaacgatgttgccaccttctattctcagccgcggtattggctggcaggtaactcagctatacttgaagttataatgttgctgaatcgatattgaaagaattctgaggtgattatgttttgttttgtgaatcagggagttgcgattctgatatcaggattgtttggtactggtgctggttcctctgtctctgtgtaagcatctctgagatttacatgttctgatttgattactttctctggatattttggtatgaaagttgatttttctctcttttgtgcagagaaaatgccggactattggccttgacacgagttggtagtcgaagggttgtccagatagctgcaggcttcatgatattcttctctattctcggttagttttgttctattctgtttttaacaaataaaaggaattacttttgtttgaaattttatctgtactgatgagatccatcctgttaatgcaggaaaatttggagctgtgtttgcttcaattcctgcgcccatcattgctgctttatactgtctcttcttcgcatacgtgggagctggaggtttgagtttccttcaattctgcaacttaaacagcttcaggaccaagttcatcttaggtttctctgtcttcctgggcttgtccatccctcaatacttcaatgagtacaccgcaatcaaaggatatggtccggtccacactggggctcgttgggtatgtagaaccaagtcactgttatttttgcttctctttccattgaaataggtttatggtagaatgatctattaaggtccctaaaactccatagcaaagattcgagtttagcatggcctgaactaatgaaacaatcttattctcttacatatttgacagttcaacgatatggtaaatgtcccgttctcctcagagccttttgttgctggaagcgtcgccttcttcttggacaacacactgcacaagaaagactcttcgataaggaaagacagagggaagcattggtgggacaagtttagatctttcaaaggtgacacaagaagtgaagaattctactctctacctttcaatctcaacaagtacttcccatctgtctaaaagggaagagaagagcaaaaaagataactggaaaacaaagaaaatggtgaaaactcgagtttcgccattgttgacttggcctctgtgtcgtggttcgtttgttcagttcctttcacaactttggaaactttaaatatctcatcacattctatagtcttatttacaagaatgatgaatcttcttaaagagcattgttgtttactctctctctaatgcttttgtctttgtaaatccgagggaacagaaacactactttgtgattttgattagtttctaaacaaatctttagcttaatttttctttttatatgtttctcactccaaagtcttgatttagaagcttaggaaacctgattggttgaactttaacgagaattgacatataacatttaatttcaatagataattacaattaattagttgttttttcttattaatttggtcatatgtgtagagaaaaaaaagggaaaaatggtcatataaaatagagcgacctttcactcttgcgtgaggtttttgttctctgatcaataaaatagtatagagagacattaataaggcaacttttgtatgttatcatctaaattaatggacacgcaaaagttaagattactttgttttgtaaggcagatcgatttaattccgtaattaagtaagtttgttgaataattaacgattaatacgacacaggctttcaggagatcgagataaagtgtacagtaagcatgtgaataaggttgattgcacgaggggaatattattcttacttcatttttggttgtcattttccttattttaatttccacaaaaagctcatcattgcttaagaaaaatatgatttataaagttgctttttatttagttgacaaaaaaaaaatttgtttgtttattattctgcaactattgatctttacgtattgaattgaaaatttgaatgtttaaattatataactacaaatgtgtttttgatcatttttatattataaattataaacagctgctacattctataatttgttagttgtagtatttacttaaaacaatacaactatactaggagaaaaatgaacacagaacataaagtaggaaattggatgaaagtattatctaaattgtggtccaatagtttgtggatactttaactttagatgtatgaagactatagacttttcctagagatttatatataggtggtgtatatatacactgatttacacatattaagttatgtgtatatctaaaaaagatagtgactaatttctgaagtagagatttactatgaatttcttcagaggttgaacctaagctaaatgatatagcatgaacaagaatttaaatgttaataaatagattcgtagtatcaaaggcttaaagatttaactattatttttgcttggaatctacttttcgtgaaagattccagccaagcaaacacttggggctctgtacggacactctaaaacataataatcatttaagcaattacgatcattattctatctcttctttcttgtttgtttgttaaatgttaaaccatttatcgaataatggagatacatatataaataaaacctcttccacaccactttttttttttccatagaaacgaaaaatagttgatgatgacaaaatgaaataataacatgaaaacttatacttatagttattgtatagaaataaaatgatgagtatatataatgagtagagaaactattaaatcagtatagacccctcacctacgctttactctttcactcctctctctcctgctttgctccgccgtgagaggagaaacaaatggggaattgtcaagcggcggaggcggcaacgacggtgatacaacaaccagacggtaaatcggttagattttactgtacagtaaacgcgagcgaagtgattaagtcccatcccggtcaccacgtggctctcctcctctcttccgccgtacctcacggtggctctctccgcgtcactcgtataaagcttcttcgtccttctgataacctcttgctcggtcatgtttatagactcatctcctccgaaggtatataatatattaatcacaattcacacagaacatgtttcagttttaaattcaggaaagaacagaaccctaacttatagggttttcttcaatttgtttcttctgcttcacgtttgattacaatcatcatatacgaagtgtataaaatttacaaatcagaactaaaagctttaattttcaggattcttatcaatttatttgttctgcttcactttttgatgttaagtcagtctttcttttttgtgttctattaatagaggtgatgaaaggaataagagccaagaaatctggaaagatgaagaagattcatggagagttttctgttgcagaagaagagattaacccactaaccctaagatctgaatctgcttctgacaaagacactcaggtattattatcacatactacaattgctctgtatcagatgtttcagttttagttctctgattgaaacgatagagtgttacaaaagaataatagagttggttttgatttacagagaaggatacatgaaaagcagagaggaatgatgaacacaggaggagctaccaataaagttagagcttggcagccttctcttcaaagcatctcagaatctacaagctaaaacacttcaatccatatttttctatctttttttcttacttttgactcttttttttatcatttcatttctctttgtattgttgtttttcccaatcaaatttgtaaaggaagaagacccatttgattgtggttgaagaagaagaaacttttgtcattttttaactttaataataataactgaagaaagaaagatccaaaggattattttcattttctagatttctagattttcttttacgttttcaataaatagttatgtcatagatcaagttttacaactttttttacgtacttaaaagattgataaaattgtacttgttgttgttgaccattgaaacatttccctttattcactaaaactagcttttgcaacctttttattcaactgtattggtttgttgtatgtttttattattcaactctatttaattattcatgtagcttaacatatcaataataactaacatgccataaattccgaagaagaaaaattgttataaaagaactatatgcacctaacaaaaaaccaacaaaaccatagtattttctttttgggttacataaaaatatctttgtatgaagaagaagaaagaatcattacacagctttcactcacaagattacaagtttgcaaattgcatataaggaaactcccaaaaaatatcatcaaagatcttttcagaacacaaaaaaaaaaaggtaaaagtatatctcttttgccatagttagactcaaaaatacgacatcgtttacctcacacgtgcacactcaccgacttacagaagaacccacacgtacgttgagggtactttagtcatttagcatcgaacgaaattgtctgagcggagaagaggagtttccgttatccctttatatattatctctctcacctttcttctctttttctttgatttttattaaatcaacaaaaatagaaaaaaaaacataaaaataaaaataaaaaatcttcacgtttcttctctctctctctctctctctctcgagccaccaaatctgaattagggtttttgagaatattcatcttttgatttcaaattcttcacccactgtgtaatttcactcgtcaggattcatctgcggaatcatgattacagattcgatcaccaacgcttctgctacttcagctccgagagattccggaaagaagaagagggtaacgttatcctctttgataaatctcattcctttctctgaaattgattcaaagttttgatttttaatggttttgttattgcattacgttttgcagaacaataagtcggctaagatgaagcagaacaagcttggtctccgtcgtgagcaatggctttctcaaggttaaaacttcatctttctctcctttaatgtttcaattctgcctgattcgtttggttagatttggttgtctatgtattgattttgggtttttgattttgatattagttgcggtgagcaataaggaagttaaagaggagaggagtgttaatcgtagtcaaaagcctcatcatgagagttcagataaggtgcgtagagaagaggataacaatggtgggaataatcttcttcatcatgagagttttatggagtcaccttcaaatagctctgttggtggtacatattcgagcactaacttcagtgggagaagtagcaggagtagtagtagcagcagtggcttttgctctggtaatataacagaagaggaaaatgtagacgatgatgatgatgggtgtgtggatgattgggaagctgttgctgatgcgttagcggctgaggaagagattgagaaaaagagtcgtcctcttgagtctgtgaaagagcaagtgagtgttggacaatcagcttctaatgtgtgtgattcgtcgattagtgatgcatcagatgttgtgggtgttgaagatccaaagcaggaatgcttgagagtgtcatcaaggaagcagactagtaatagagcttggaggctagatgatgaccttcgcccacaggggttacctaatttggcgaagcagcttagttttccggagttagacaagcgttttagctctgtggcgattccgtcttcatgtcccatatgctacgaagacttggacttgacggattcgaatttcctcccctgtccttgtggatttcggctctgtctgttctgccacaagaccatttgcgatggagatgggcgttgtccaggctgcaggaaaccctatgaacggaatatggtcaaggctgagactagtattcaaggtggtggtctaacaattcggttggctcgttcgtctagcatgttttgcaagttttaaaaggagaggtgcggttttctcaaccatgttgtcttttggaactcgagaacttaagctctgttttctatgtcatctatggttctaagtctgaaacactgtggtgatgatgtagaatgtgatgtgtgaatacataaaaggtggtacagaaaatgattcaaatacatttagatagtttcaataatgaatgctatgttctcttttctaattccatatgtttggtctgcatttattccttgtcaaacattattgaaggtttaagagttattttgttgctatggtgaatcctcttgacaagttactcatgaaccaaagcttgttttttagaatcaccattcaccagagatcaactctcattacttcaaattcttttaggaaacttctgattgtttatgattagctaacaaaatcatttattcacataaagtgaggcttcttaacaacttctattaagccagcttacaaatctcttgtaaggaaaaaagctatgacccctctaatgaatataatatataatatagcttttgctcatctctataccatttacattactactatatgaataaacccactgaattcaatcagcgaaaaaggccataggggttggaaaattgtataggtcattaagctggcgagaatcatcagtgtaggctcaagtgcattgagtcttgaagcttctgtatatgaaaaggctttttctaagatccagtcacggaatttgcatcggagagctcagatctttgcgcgtttgagctgcgagtgaacagggtagacattctctgtttctagctctctcttctgaatactctttgtgaaagacaaatcttcaaccttcattagagaatctcttaatctttttacatccgagagttttaccggcttcagtaagaaatcttcagccccttcttcaagacatctgaatgacaaaataataatcacaagaaaatcagtttgagtaaactccaatttcaataaagttgatgatagctttggatcaataagttttttttttgttgtatatgtagcaaacaatcataaaatggccagttcgtaattgagttggccattgtgtgtaacacaaatacatattcctttttattttatttggtctagaggtttcctaatattgtatgcaaagtgaaaaagcatgtgaggtggctttcacaataccctaccaaatattaggcaagcaagatcatgtacttattttattgtaatatcacatcaccagaaatagaatcaaatcccaaagtaaagattttgctggttagaaacatctttatacacaaaatcatcttgggacccattaaagatcaccaaatctcaacatttgtttaattatgcaatatccaccaccaaaaatggtttaaggaaattaacttttaaccatatgagcaggaactttactttgtgatctaatccctttttgttttatctaattctttttttgatcatctaagacaaagatattcaccaaatttactatagtttgacttaagattatgatgaagttttatacctatcaatacgaggcaaaatgttctcggaggacataattaccaccggtacttctctaaaagctgaggattcctgtggaaaatcacgtaaaaaaggattagataaacataaaactcaaattccattgactaattatatcattatatgtttgtttgcttactttgatcttcttcaagagttcatatccagtcataccgggcattgagtaatcagtcataattaaattaaccttcaaatcctgaagcacaaatcacgatttaacatattgcttgagagctacggcaaaattttgttttctcttggaaattgttttatacctcaaaaccgactgatttttcctcaacatccaaaccaaggtattggagagctcttgttgcactatcaacaacagtaactgaacaaccaaaacagagctttttactcagataacttgcccgaattcagagactgatttttcaaaatatgagtaataattacctttgcaagaagatactctgagcaaacgctcgatgaatttacgatcaacgtgactgtcgtcgacggcaagaacatgaagaggatccggtgatccaaactttgaagaatggttgagaatctccatcttcctcggtagcataacttcagccattgatcaacgaatgttggaggatttggaagaaaaaggaagagaaagatatgatgtgaaaccatggtggcagtggttgggccatttatataagtagaaagaaagaaagaaagaaataaaagagggaaaaaatatgaatgaaatcgagagattttgcatatctttaagattttgtcaatttgctttcaaaatctttattttatattttatataaataatagttcggtggatttttattattaaataagttaaaacaaaaaaccgaaataaagtcaaaccaatcggttcaagtttagtcaaaacgaagaacaaaccagaaaatttggaatgggatgcaagatttaaccgacccaaaccgatattcaataacttgtagaattctttttttatttttaaattatttgtgtgtgtttgtagttttttttggtaaaagtgtgtttgtagttgaattgtggaagttcacgcatttaacttctacacttcaatacttcatctacgtagaagttcactttgaggttttgacttaagctcaagacagaaaaatgtgaaatcaagaaatcataaactaatactaaaacattacacgcatccttaatctacaattagtaaaacctctttagattaccaccttttcattcaccaaaaatataacaaattaatactaaaggcccggcccatatgatttggcccagaagagactttaagtttcctaatacagttaacggtttactcagtgaaccggagggagacagcgagatgaggccggagatagttctgttcggcgactcgatcacggcgcagtcttttaggtccggcggttggggatctgctcttgccgacgcttactctcgcaaggctgatgttgtggttcgaggctacggcggctacaacacccgatgggctctcttcttgcttcatcacatcttccctctcgtcagtactttttatctctctctccctccctcgagtctacaaatgttgatttgaaatttgatctaaacacgaacgaattttggtagtcattgggatgattttgttcatgagctgttgtgattgtgtgtatgatctgtgtggatatagatcttgagttattgtctcttgtgcatcattttttgttttgcttatgcttgttatggttcagttctgaatggttttgatatgattctaggatgtgttggttttatgacattgtcatggattggttgaagtacgaaagatttagatttgaattttgagatggtaaaaggcaattacatctgcatatatcatgagaactcttcttgtagtgcgtgttgttttggtgtgcctatctcagtatgtgttctactctgtctttttgcctagggctcttcgtctcctcctgttgctacgacgatattcttcggtgcaaacgatgcagctctcaaaggaagaaccagtgatagacaacatgtgccggtggaagagtacacagataatgtcagaaagattgttcagcatttgaaggttttgatatgcttctttgatccactctaatgcatggacttacttttcttgaagtgtgattcctttaaagactaatgactctgttttgtagaaatgttcacctacaatgctaattgtgcttataactccaccaccaattgatgaagctggacgtcaaagttatgcagagtaggctttattatgatccttttcttctttgcatttttgtttctcaaagcatttagtccgacatgtttcttaaatgagccagtgattgtgttacatcagatcaatctacggtgagaaagctatgaaagagcctgagagaacaaacgaaacaacaggggtatatgcacaacattgtgttgcattggccgaggaactcggtctgcgatgtgtcaacttatggtctaagatgcaggaaaccaatgattggcagaaaaagtacctaaggtctgtatctaagtctgatctgaaatgttgttggtttttcacaaacactcatctcctcctcaatcatgtttgttgtttataaatggttcttgctcgttgttgttggctataagcagtgatgggctccatctcacgcctgaaggcaatggggtagtttttgatgaagtctcgagagtttttagagaagcttggctctctcccgaagaaatgccgtttgatttcccccatcattcgcatatcgatggtaaaaacccatcgaaagcttttgaagagcgttgcttataacgatcatccccaaattcatgagcaggtttgttttgatttaaattcatgaacacgtttcaatgttgtgatttagaaaactctcggatgtgaataaatacctaaaaagtgcatcatcactagagatcgttttcaagagaaatgaacttatgatgtacttactatatgttgtgacttttgacttatgtacctgcactagctttctatcttccttgctatatatttcagtctgaaagattttttttaatcttcttttcaatgtcaaatactcgtataatttgattgcttctctactactaactagttgatgacggcaagaaaatattacagggccttatacagataaattaagagcccagtagagttaaatttggaatgtgagcaattgggccttaaccaaacttgcccaatctcattagaatctaaccagttggttatgataaataaatatgaccgtaccaacgagatttgcaatatctcgtgcatctacattcatccgacgattttggagtcgaaaaattgaagttattcaatagtttttgtaatatagagctatatatgttaccaaaagtaaatgggcactacttatatatatcaagaaacattacacctcaaccacacgaacacacacaaacgaaatatctctctgaatactctagtcaagattactaattaagattactctcgtaaataaccaccaattacgaaagtaaaactggcttagcaaacaaacccataaataatttgaagtgcttctctagtctccaactactattactactactactagttgatgacgacaagaaaaaagaagttctgattaacttatcaaaccaaggagtttgttttagtggacgttccatagccattcatcaaaccattccacgacgaacctaaaccgttgatataaccaccattgccgtatccaccaccgtcggattttcctgcgcctccgctaccaccaccattggagtagcattgatcttgctgccaatcaagcgataacaacttcggatttggcttcacatccattattgttgctaccctttgatgatcttcttgatgattgtaatggtgatgatcataattagatagcataagtctttggcatgtcgatatatccatgagaccaccaccatttccattgcctcccgtagaaatcccattaaatccaccattgttgttgttgttgttaagacctacaccgtgattcagacccatgtgatgattatgatgatgatgatgatctccgttacttccatgattaaccatgaccaggttgtcattgttcactcccatgagatcaaacttactgtccaagaaatcaataggtctagggctctgcgaaagcaaaccgccatacttgctctccaagaaaccaacgttaccatgctccggagttgagtaagaccccatcatcccaccaaaatgtgaaaaccctagaggagaatgttggtaattttgatgagaatgtgctaaagccataagatcagaggtattggcggtaacgatgttggatggttttttgccggaagaagtggaggaggaggaattagaggaagatggtttcttgtttttacggcatccaccaccaaccggaatattccttagagttccgccttttgtccagtaacggcgacaagtcttgcagaagtaacgaggctgagagaggctgtagttattgtagtaacagaacttagtatgtgttgactcgcaacgaggacacttttgaggatggtcgtgaggtggacgcagcctccttccaccgtccatcagagctgcagcggctacagccacggccgaggcttgtggtctagtgctgcaagctgctagtatgtcggctgctgacggagaattcgttgaagagtctaacatgcttcctcctgatgactcggattcctaacatttcaatttacagaaccatatgaaaatgtggaaaataaggacgtgataaacacaaacaggtcttccatttgtatattgacatttaccttagacatttgttaagaaataaattttgcttaaaatgttacaaggcttatgttcatttttggaaaagaaacacaaatacaaacgatggaggtaggtctaagtgaagatacctggagccaatcagaatccatgcaaacttgaagagaagtgagacccattttgtgttctgtatgtttgtttagtttgagggagagtgagagtttttaagacaagttcctgaacaaaatctagagagagaaggagaagagagaaatgtgagagatgatgaggcaaggaagagtttggggttgggatgtgaataagaaggaaacaagaagaggacccttcttctcctcgggattgctgtctccactcaaagctacttagttctactacttaacttaaccttattattagttcacacttaattattatttttttacttttttttttttaaatgtttgaagtttaatacttattttgatactaaaataaataatttcgtcaaaaaaatgcttactgtaactatctgaaattcaacaattgattttgatcgtggataaattccaagtactttattagaaataaaaatgtctaaatatgaagacattatttaattaatcaatatgttctgtttccagttacaaagaaaaaactctttcaaaattttgattttgagaaagttaatacgtctcgctttggtgtgatcatgataaaagttaaaactttaatttcgagttatttttgtattacaaatgtctataaatgtataaagatggaccgtatatacggtcggatgtggcgaggaaaaagaaagcgtcggtggttccaaaatccacattctttggtgggtctacgtcaacttgaccaatcatctttatcaatctaacggttaagatcaaacagtgggacctaaatggacaacgtgagccgttagatgggttcagaaatagcggcttgatcttcacacaacagagacaaaagtgagagagaataatatctttttttgaagttttgtctctctgtggtttttcagacttacgataaagaaggacgagttttgataacttaggtgggcctgttaatggctccactcgctcgctcctctcaagcaaagtatctattctcttgccacctgtcactttttctgcttcttctaccatgtggtaatatgattcaagtttttatttttttgacttcttgaatcattagttaattatttgaagagctaaactacttttgatgtttttcttattactaagtttcgaaattaaagttaaaagagtttgatcgatggaaaaagaagagcaagagacaaaagtttgaggctgtgactgtgtttttttatcaactgaaaaaattaggttttcaaagttctttttcaactataaaatcggtatttcataaataatactatcaagtaattttgctagtcgcaataatacttttaacataacaaccgattatttaagcttattgtctttttcagctgattcagttttggtacttacgtatatattattatcataggttaagaaaaaaatgttgttatcataggtgaaatcattttatttgcgtacatgaaatttatattagtattttgttaagttgatcgtgtttaatttgtgtgttaaatcatcatattttttttgaattgagtaccacattacacttttaaattagaaacatattcatctgacggtaggataagaagagtctaaagttgggaattagtaaatatacttgtatgttggaaaatgttaaaagtggttgacgatgaagtaatcttgttacgaaagaattcccccttgggccttaactgatccttgaagaaaagaggttatttttaatctgtttttattttttggtctttgataaattctctttttttgtaagtaaaagtttccatcttattcgcccttcaatgtataattaagtaaccttcataatataatatatatactatatataggttagagaatagaggctcaaactttgaatttaacgtgcagtttactgataacattgagtgttttcataaggatagctcagataagaaacagtttaattatcaaatttaagcgaaactaagattgtatattttctggcgggaaacatagaaaccattgcgattccactaaagttcactaaaataaaaaaaaataaaaaaagagacttacttaagagtttgtttcttatagcttaaacaaacaaatattttgatgagctgatggtgggatttcaaatcgaaattccgcccgaggcccatgccattataatgtgacacatgctatatacatggactacaattaaatattggaaagtggaggacgattaatatctacatataagactaggcaatagcaatactatagtttctagaatttgatttcaatgtttttttttttccttcgataactttattaatcatcatggtttacatcattgtttataagaggacatgagaaatgtaggacatgaatgatacaatgcataattgagagggcttgagacagccattttagctaacggatctgcacacgaattttgctcccgatgccgaaatgtacttcacctgtgtaaatgttttattgatgattaaagatcacaataaatcaaaattttcatattaaactgatataatctatttgtattaaaatgatttttggtagtattcctaaaattgtcatatggaaaccaaagattgaaacgaatcaaacctcgttataattataccgacatttgttacatgcacgattatacaatacggttaaaatgatgttattaacaaattgtaatcatctaagtttatcatacaatacgaataagtgagtcgaaaatttaataaaccttaaagggaaagcttcataactatatgggacaagtgggaaactgaagattgtaaggatctagggagaatacttcatagttggttcacatggttttttcttttaaaatagaacttataaaaagaagaaaggaaagaggaataaaagggcatcgaaaatggtgtgagaaagaataaattacacaagataagctaagcgtgacaaagacaatttctttggcacctatatatctctatttagtgagacccactttttaaagttaacaaaagtatatctgtcccgcgtatctttgttctattgcatcactcattacttgtcattacatcatcataagttatgattcacaacatcatgagattttcagtctagtcctataatattgtgatatttggaaaaaatgaagtatatgtaaaatggagttgatgtaagtttaagttacatactcttaaggattatatgtaaatttgtacaaacaggaaaattggatactaaaagaagcatatcagaaaacaaaaatttaaaacttcctaacaacttggttttacccaaaccgaaataaatcacttccaaaccaactgatcaaagaaaatgatcttcctttaccgggatcacgactgaaccagcacactaatgaacataaaccatgtctaattgagatcacaaacactacaagagtattatattcaaaattctgtctatgtatttcttcttgaatgttattctgattatgcttcaactcaaccatatgtatgcggaatttgaatatttctaccatatatttatcattatagctcagtgaaacaatggaatggattacatatgctttcataaaggttgagatacctatttttgctcaatatcaagatgtcaaaccttatgcttatccaacgaaatttgaaataatattcgacaagaaaagtatattaaataagttgtattattctcctttagtataattatagaacatattcctctacacttttgtgggtcgtacctctatattttaaagtttaaatcatttagtatggacctgttttttttttctttgttaatgaatggacgtaaattgttcgatcgattatcttcttaacttaaaagataacaaactcaatctagttaataagcgtttaagaggatggttacaaaatcaaaacataaactcaacaacttcattagcacgtcacgactgttcaccattctctgtttcttcttcatcatcatctttaggacttgcagttgtaggcagaggaggtaacaaatccttcacaagctctaatatcccatcagtgtcgatttctcgatcatccaggttctctatgatctacaagagagtcacaatcaacaaatgttataaaccatgaagaagagaaattaaatgcagtgatagaaatggtagtgtataagctagaaacaacaaacaaaccggtaacagttcgactatagaagaaggccggagattgatgatattgagaatctcagctttagcgagtttgaaatctttacacttgtctgcgaatttgttaatgctctctcgtgtttgagtggaagcagcagtctccaccaaataatcatagacctataaagatcattccaattagcaacaaaagtgcactcttaagaccaaatcagaagagagatattgcaggcaagagaaccttgtattctgatctagcaattggagctataactcttgtagtatcttttgatgcacctctcgagttaagaaagtcaagcacttcgaaattggtcagtgctcctgcatttgccttgactctgcaacaaccacaccaaattttaactacaaaaatagagaaggaatcgaacaaaaacacaatggaagatggatgatacattttcatctcttaggttgagcagagagacttcaaccacaggaagctttttcttcaaccaaacgaagtcgttttaacaatatgggaagagaacaacactaacgatgctccaaaatcagagtttttgctcctgaaaaattcaatgggaacatcaacatcaaggaacagatgattctcgttcccacaaatcatgatgcaatgggaacatcaacatcaataacgtttctaaatcgaaaatatttaggtcacgttcagtactaagcaccttaatatgaatcaaagcttaaagtgaaacccttggattcgatcaaaaataatgaccaatttaagggaagaaaataagtaccttctcttctttgacggaaaggattagttcaaatactagaagtagctcgctgattgactcacaacacacaaaatatcaacgtcacgtaattaagatcaattactagttggatttgagtattaccaaagctactaattaa

SEQ ID NO: 950 - DNA, 27856 bp, Arabidopsis thaliana
gatcaaacacatacatgaatctgtaaaagtaaaatctaatacgaacccaaacccaccaaaatctaacaccaactcaaacccaccaaaatctaacacgaacccaccaaaatccgtcgataaaaacgccaacccagatcgctatttcgctatggtgacaaaaaaaagagtagaatcaaagaaaaagaagaacaaaaacttcacctttagggattgaaaagttagggtggctgctccttcaccaagctctggaagtttctgtttatagtcagatcaatcctttgaattcttcaactcttatggcttcagagaagtaataaaaaaaaaaaaaaagagatcgaagaagaagagcgtttgggagaaagaagaagaaagaaagataaaaaaaatggaataaagaataattaaaaaagtgtaatagggccaaccctattttagcccgtaacaatttaagtatagccctatcttaacctaaaatcttttattagggttagggcttatatcttttaacagactcgggccggccctaaattataagcccatattaacatccctaattagaggagctccttcgaggtatgattcagacggagattgagaccacgatttgctccagacggtggcggtgaatgaatcggtagaacgacgtcgttattgtcaaaagtaaaaccctagagaccaaaaaataaacttaagctgggcctgtttatcccataaagaacatttatgtgttattgcatccacggccctcttcagcttgatgggttataagcccaaatacatgtcccaatgcttgaattgttgtgtgtttagcgtttgcttagttatttttaaactatgccaaacgcttgacttgttgtctgtgcgtttgcatttacactttgcaaaaaatatgttataatttccgaaaaatatgattttaaaaaaaaacttacatgtaacataaatagtttgaaatctttctaagaagtaacttcataaataactaaggtgaaataatcataatcctactatattatttgggaagtacattttaaatgtaatcttattttttgtaagtaattacataggtatgccattagaaataaaatttaaagagtaaattaattcatctctttaaatattaaaaagttaaatactaatttaattaattaaatttaattaaaaaacgaaatacattattaatttttttaaaaagtaaccaattaaaatcaacaaattagatttgatatctaaattatcatattaattttttattaattattatagttcacctcttatctttatatgattatatttttgcgaaaaaataatatcatcgttataaaaaataattagatttttttcgcatatgccataatttgaatttttaaaaacgaatataaactgttcaagacatgaaaaatactataacgggtcaaaaatagatttaagacaattttctactgagtattgggtcataatttgcaaacttttatatataataaataattcttaatattttaaaaattactactttcaaaaaaaaatcacgggacgagtaaagaaattacagaacgggttttattttggaatagagttatatggtggatgtatttgaatcaatatttataaaaatttaaaatattattaatatgatgttttaataagagttaaaacttcagttttttaacaattgtctcatggactcgtggtatagctttcttaataacaattgtaaactgtaaaatatatatatatatatattattataatacaatttgcaagttttaatatatattacctttaaaaaataaatcgtcccgcggtataccgcgggttaaaatctagttttttgtttaaaatatatgtcaaaattttgtatgtttaagaagagtcttgtaaactttttgaaaatcaatttttatatattgtatcattttttatgcggcgtctcgatgaacgacaaatataccaatacaaacctaactcttatttcttaagaataaaaatcaattcagttttaagcaaattaaaggaattaggacacatgattcttgctttggagaaaaaagcacttgaaacatgtaagctaagctaactaactgccttttttaaaaaccccaatttggcaaggctcctctcattgcctttaaagctcctcatgctttccaccctttcttaaatctcaaattacatgtacttatattttcttacacatttcaatatatattttggtttgttatataaacatcatctttttggtttattcaacatttttttgcttcttcttttgtttctttgtttctttttttttctgcagtcttgcaagaaatttgtgaacccatggcaggtaccaaactcattctcttattttgttttaatgtgaaattcctgagttactatgagcgttatatattcaatgaatcttaattagaagtcgttagtgcatccaaattcttacaaattatacacaaaaataaaataataaatcaccaaaatcccaggcatcttttcctcttacgtatctttgataaagacaaatagttattgattatagagttatattttaatgtagtttcgtatcctgtggaggctattttaaagatttaagtagttacttttgaaaagaaaccttgtgagtttgttcattagataatagagacaaaagatgaaaaattcttataactatgtgttgtcgaattgaaaatggaatgtagtagaagtagtagtaacgtgaagagaacagcagttttgttgcaaacgcgtttacttagacgcgtcgctctcgtatcttgcacgctcttttggcttcgtttgcaacagctgtctctctgtcacacatgaatcctcttcttaacctacgtaaccgacctgtagcctcacctgttacatatgacagaaaaataacaaatttaatttatttagctactagtttcatccgtagccagtatctattaatgtatatgactaaaataaatctaaaattttaatcattggaaactcattttggtgttcaaagaaatatttagtaacaagtaaatcatagttaatcagaatgtcaagttaaaattagaatcaggaatatgacagcatttttctttgacgacaaatgtaacaaaaatccaaaaaactgaagaaaaaataaactgccgacagaatttgttccctcataactcacacatctttgtctttcgctaatcgctacaatcaatttgattaattggaaaaagttttctttaacaaagccatgaaagccgctatttgatagattctcaaaacaggtgcaaaagatttgattaattgactcgagatgatgtatgatacacatatttggtgaatgcaatagtcattatatatcacatttaaagtatcaattttattaaagaaaagatatgcgtaaatagcattggctgttgtaggacaagagacaaaagtcacaacattaggcatcaaatcttttggaattaccaataagcaattccctaggttggtccactactaatcgtatattttggtttatataaagattttttttcttgtttttttggagttaccaataagcattcctgccttattatggcccattaagaatttttgttaatagtttgacaaaaaaaaaaaaaaaaaaagaatttttgttaatactataaatcctactttgttcttacgaatattttatcgtatgcaacaagccatgcattatcatcaacaagaaaatctaaactagtaaaccccaccagaaatggctaccgacttatttcccaagaaaacaaacttatcccaaacagaagaaatagaacaatacgttatattttccaaaagcttaagggtaaacaattttttaaaacattatgattcttccgtttatttcgctatacaactatagtcttcacgctaattactctagcttcatttacttcaactgttcctcatcgacgtgacccattttcaccaacttaccgtccaagtttcaaactcaaaaacatttgttctcaaacatataaaatgtacaaatttgcttgactgcatttaatatcgaaactcagaagaatgagaaaaggggtcctacactgtggtctttgcatgtaatctctgaaacctctttaaagtctttggttttggttgttagtgggtcccacttttcacgcagtctctgcctttgaccaaaagtaacctatcattacatttttttaatttacacatattaataggccacaacaaaaggtgttccttcattaatttctcatttgtcattgacacatccaaatctttcaaaatccaacggttcatgatttctttagaaagctcccaaatagttcctttgcacataattaattttctttttcacttcaattaaactattcaacagatttattccctttttgaatggtggaaccatacaataacttgactaagcacaaaccacttacagtatgatttatgtgctcctcctccccacatggtatacacatatgatatacgtaatatgtagtgaaagagaaacgacacgtaaacaatgcatacgtcccaatgtctatttgagagcgaatagcttttgtatactctttttgggtatttgcaaaaagattgagactcaacacagagatgccttatgtattttatttattcacatgatcacatctttatagattctctatccttatattcaaccattcattcacgttttttaattttttttaaaaaattacatttttttaatttacatttttaataggccacaacaaaaggtgttccttcattaatttctcatttgtcattgacacatccaaatctttcaaaatccaacggttcatgatttctttagaaagctcccaaatagttcctttgcacataattaattttctttttcacttcaattaaactattcaacagatttattccctttttgaatggtggaaccatacaataacttgactaagcacaaaccacttacagtatgatttatgtgctcctcctccccacatggtatacacatatgatatacgtaatatgtagtgaaagagaaacgacacgtaaacaatgcatacgtcccaatgtctatttgagagcgaatagcttttgtatactctttttgggtatttgcaaaaagattgagactcaacacagagatgccttatgtattttatttattcacatgatcacatctttatagattctctatccttatattcaaccattcattcacgtatacgtgtgtatatgtattctcatttatatgcatcaatctgagtatatgccaaaaagaaaattaaataattaccttcctttaagacataaatcctcacccgattgcctcgaatccattactttttttttttttaatacgtgggatttcaaattcttaatgttaaaaattcagtggtgaaaatatgctactacatttttaatatgcattgtttttgttttgaacaccgttacttattttatttacagatttaactctctctaaaaatacttgtctttcctaaagcaaagaagcaaagaatcgtgtcctcttacacaatcacaggctttttgcaatttttttttttgcaagtatcatttcttttcttggcttcgaattcagctccctcttcttcttctttattcactttctttcccctttttcttttatttcattataaataaatctgatccgatacatatatggttccttcttctttatgtgcaagaacaacacatggtttaaagcttcgaatctctccctttgcttcgtcatatatctaaatcaccccactcaagatttcaaattccctatatctttgtttttataaattctttctaattttattgtcacatataattgaagcctaataaatcacaccacactgtcttactctgtttttgtttcttctctactctgttttttttttttcccttcaacattgaagataaacttatcttttctctctcaaagactgaaactttatcaaaatggtctcatcgtcttcatcattgttatctccatcttcatatacagagttaaaagatgcttggcatccatcaacaacagcgaacacaacagaatcaagctactggtttaattggagggttatgatctgctgcatatggatggctatagcgactgtgatcacagcttttcttatattcaaatacgaaggttttcgtcggaaacgaagtgacgttggtgaagttgacggaggagagaaagagtggtcgggaaatgtatatgaagacgagacatggaggccttgtcttcgtaatattcatccagcttggcttcttgctttccgagttgttgccttcttcgttcttcttgttatgttgattgttatcggccttgttgatggacctaccatcttcttctactacacacagtatgctttctctctttctttttagatttcatttttggaaaaaattgatacttttcttgaatcgtttagtggggtgattaaagactttgtaggttcttgataatgttattttgtttttgttttggtttagggtcttagaaacgttttgtatataattgaagatttttggaggttcaaaagcatagattcaagagtgtgatattcttggtttagaaaaaattaaaacttttcttgaattttgaattgggaaattgaagattttgcaggtccactagcatagatagtagatacattcttgattaagagtcaaattctcacattctttgttcaagatttctggtgggttttagaaacattattgaatcaagtagtgggagattaaagttttttcagctttaccaagcatataggggcaagaatgtgacattctgataatgatatagggtagcaactattctttaatccaatctttagactagtttctctctaactgtctctaatgtttttttccttgtctctgttgttttgatttgcaggtggacttttggtctgatcactctctatttcggagtaatgttctgtcacaaaaacctggttactttgcttattaacttatttgtgacattactcaagtttcttacattttgatctggtatcttttaacagttaggctcgcttctttctttgcacggatgttaccaatacaacaaaagagcagctggcgatagagtagatagcattgaagccatagactcagagagagcaagatccaaaggagctgataatactattcaacagagtcaatactctagtaatccagctggtttttggggatatgttttccagattatctttcaggtaatcaaaatcaaaattcataatcatgcgccatgattatatcgaattttcgtgagttcttaattggatatatatcgcgtaaaacagatgaatgcaggtgcagttttgcttactgactgtgtcttctggttcatcattgttcctttccttgagatccatgattatagcctcaatgttgtaagtacttttataagctatatagattatttgattcattatataaaaacatttgatgatcaaaatattgcagctggtgatcaacatgcactctcttaatgcgattttcttgcttggtgatgctgcattgaattctctggtaatagctcagattctaacaaatgaaacataaattctttaataattctttatttgaactatgaaattttcattattacagagctttccatgcttcagaattgcttacttcttcttctggactatagcttatgttatattccaatgggccctccactccttagtccatatatggtaaatttcatacaaattctactgattagttttctctattgtaatcattcttaactttgacagtgctgtttattaataggtggccttacccattcttggacttatcatcacactatgctccactatggtaacttcaaagttttatagcatttctcagcatctcctttgttttattggaaatttaggctgatgacattgaaatgatgtgaaatttgttacaggtacttctcagtggcagtgatgcatttgccatgctatggagcctttgccttattggtgaagctaaaacatcggcttctacagagatggtttcctgagtcgtaccagagtcctcggtagtagcttgcaaagcaagcgaccacgtttgattggaagtttttcttaagtagaaagaacgatttttgaatgatagagaatgaaaaaaaagagtggagcaaccaaactcatcatgcttataaatataattaattctttgcagtatttatttagctttttgtttacgaacgtgaataaaaggaaaaatgtggatcgaaattgaacattaatacattatcatcagaacagagtttgaaaacgcctttgtataaaaccagcactagttttatttgggcttaaaagtggcctaagaccaaaacattagaaatttggggttgaaagaggcccgacctaaatcacattcttctagggctttgttccgttcctctctttctttatttattattctctgcctctgcctctgcctctgcctctgcctctgttccgttcctctggttgatgttgtgagggtaagacagaactaagtctgttaaatctacagtgagggttttttgtttaagatatggacaagatcagtgggttttctgatgatgaattgctcgtgaagatcttatcgtttcttccatttaaatttgctataacaacgagtgttttgtcgaagcaatggaagtttctttggatgcgggtgccaaaacttgagtacgatgaagatagcatgtattctttcgaatattccttccgatattttttacctaaggctaaggaggttgacagcgaaacctattctatagtgtccgaaagcggccataggatgcggtcttttattgagaagaatctgccattacatagctctccggtcatagagagcttgcgtctcaagtttttcactgaggtatttcaacctgaagatatcaaattgtgggttgaaattgcagtttctcgttgtgctcaagagctaagcgttgacttttttcccaaggaaaaacacaatgcattactgccgagaaacttgtatacatgcaaatcgcttgtgacattgaaattaagaaacaacattctcgtggatgttcctcatgttttttccctcccttccttgaaaattttgcaccttgaacgtgtgacatacggagatggagaatctcttcaacggcttttatctaattgctcggttttggaagatttggttgttgaactagatacaggtgacaatgtgagaaagttagatgttatcatcccttcattgcttagtttatcctttgggatgtctagatactgcgcttatgaagggtataggatagatactccttctttgaagtatttcaaacttacagatttaagtaaaactttctccggcttgattgagaatatgccgaagctggaggaggcaaatatcactgctcgtcacaatttcaagaagcttcttgaactggtcacatctgtcaagcgtctttcattgaacatagaaaacaacgatgcagaggtgatttgaaatccgttgataatcttcaatctcactatatctcttagattactaaaaccttcctttgtacaggccctaactgctatatatggagatgatattgtctttaatgagcttgagcatctgaattttcatattcataatgcatattggtctgagttactatactggttgctcaaagcttctcctaaactacaaaacttggagttcgatgtaagtttcttccatagactattatttttgttcaaattcagtacaccttgccctttcatctaacttttcttgtttattccaaggaacaatgttcacgtgatggtactatgggtacactggcggttttctggaaccaaccgaatagtgttcctcaatgtttgttgtcgactcttcagactttcgagtggtcaggttaccctggctccgtacaagggaaagatttggcgacatatatcttgagaaagtctcgccagttaaaaattgcaacaatttcgattggatatgggttggatccacaacaaaagcttaagatggagatggatgtcaaattttctttccgtgcttcacccacatgcaaacgcgtattctattgagcattcatatccttatatatgaaagatatatatataccttattaattttgcaaaggacatatttggatttgttctattacagtttgtgttgcatttagtttagatgattttatgtgttgctcaagtcattaacaaaaaaataatatacttaaatagtccaaagcaacttcctctattcctccattccttgaaaactgagctgagttcctaaatgtttgttgaagagtcttggaactcgagtcgtcgtattcctctacgggttatagttttgccttcttgtccaaagaacattatttgaaacgatgttccaggtatttctcagttgcagtgatgcattcgccttgttggtgagctaaaacatcggttactacaaagatggtttcctgagtctgaccagagtcctcggtagtagcttgaaacgcaagcaaccacgttcaattggaagttttgtttaagtaagtagaaataatgattgttgaaaagatacagaatgaaaaaagttagaaccgaacgacatcatattatacatattgcttgaatatatgaaaatttaaacaagtagaagaatggtgaaacccagctttcagatggttagaaaacaatggggaaccagatttcacatggagcaacgacttaaagcaaaacgagtcaagaaaaatagtttttggacattatcttacgaaagccgttttcacacgcattagcagagaattgttatacacattcaattactacggggatagtaagttttagacagtagccgctaaacaaaatatagttcgtggtcgaagcctcaatgccaccaaatcaaacaaagtgtcccgttcagcaattaaactcgagaaaaagtaaacagaaactctatgggtggtcttttaagatgattggaatatgcttgcactttgacttatcgagttctttcttgagtgccttgagatcttcatgatagaccggacaccgatccactccaccgccgcatgagcagtttttgaggtttggcgatttcttgaggcgtcgattttccatgtcttcgagaattagctcacgacgttccgcaagaaggtccggtaatatgccgtcgatgagacaaaacaaaaacaaaccgatggctgcaatggcaaataccaaatccgctgtatccactgtcaatgccattactccccctgattcacaacaaataaacttctagctaaggagatatctaagaaacttggacaagatatgtattaatatatataactaagatttggatgacttcgaatttcttccgatgtggttcagttttggatttagtttcctgaatttaatatacaaatacaatcctatccccactctaattaaacctaaacccttatcaaatattgcaagaaataaaataacaactgaccccgaaaaaacatcactcatgaatttatttataatttatcatcaaaggtttaattattggggatggacttgcacgtaattcaattgcgtacaattaaattaataatgttctactgctctatataagcctagctagctatgcgtgggacaataactaaaattatgatacttgtgaaaatctattaagaaaagtaaaaaaaaacaaatcattaaccaagaaacgtaggaaaaagtaattatcaatttacgatttatttgcgtacatataaattaaattatgtagattaaatagctatagaaacgaaaaaagaaagaaaaatcttgacacgcaagaacttggatgacttcgaatttcttctgatataatactgtttggactcattaaacgtaacccttttcaaattgcatacacaagataaatttaggtaaaaagtatattccaaaaaacttaagttagctagtaaaaaaaaaaaaaaattacaatctcagttcataaccaaaagcaaaagaaaaacataaaaaatgatgtttcctacaatattgaaagctaaattatttggttaatcttttaagttgagagaacatggaacgaatactgtcgcacttcgaaagacgtataatattggagaaagctcttatatcttcatgacagatgcggcaacaatgatcaatgtctccaagttcaatgtcttcatcatcatcttcttcttcttcttctttccaataatacactgaaaaagtatcgacaaagatgtagatatagaaagtagctgcgatgaaaagaaagtaacagttcaccaggtcttctactgtcgccatctcttcaatttactgctataccaacaaaatatagtttctgttaaataaacgatgatgattcacaactaatgatctacctagctagggttttaccaaaggaaggtatttatattttataggggagcatccaaaattttatttgggtttggttacaagttaaaacgccttggtataaaaataacgcaaggactagcactaattttatttgggcttgaaagtggcccaagcccaagacattagaaatgttggtcgatgaaatatcaaaagcgtcgtgctctctacagataaattctttatcttcttccactactctgcgccgctttgtctctgtcgcaatctcgtaagcttcttcagtcttctcttagtttaatcattggtcgtaatttgtattcgttcgaattgagtgctgtgatgttgaaaacctaaatttatcgggtcctgatgacgtaatgggactcgggaacgatctttgagttagaagtatttttgcagttttgtgtagagtttcacaaaattcttcggtttttttaaactgtggatcaaaataactgctatgtaaatctgatttttgtttcaaagcctgtaattttgttatacagttttactgtataagctgattgtgtttatttgaacagaaccatatggagaaagacatggcaatgatgggagacaaactgatactgagaggcttgaaattttatggtttccatggagctattcctgaagagaagacgcttggccagatgtttatgcttgacatcgatgcttggatgtgtctcaaaaaggctggtctatcagacaacttagctgattctgtcagctatgtcgacatttacaagttagttttaattactaatatgagaggatttgctagagatagttaactaaattctcccctttactcttgaccaatccatttttattgtgacctcatccaaaaatgacaagctttgcttatataacaatttgtcatcactatctgtgtcactgagtgatgcattgattataggatatgaaatgattctttgagattgaagatttgaaaaggttgtgtgtaggttatgtagtagtgactacacttttcatatgctgtgtttgaaactgtatcataatttgttttggaatggaatgaataatcttagcgtggcaaaggaagttgtagaagggtcatcaagaaaccttctggagagagttgcaggacttatagcttccaaaactctggaaatatcccctcggataacagctgttcgagtgaagctatggaagccaaatgttgcgcttattcaaagcactatcgattatttaggtgtcgagattttcagagatcgcgcaactgaataacactaaaagaatcatttgtatcccagttctgttgtatacatggaaattttattttttcatatccaaaagcttttgtaacatgtcattgattttgaagaatttttctgttacaaagtttaaataagatgaaagattgggaaatattattgtacttgagattctctcagcaaaattcagtatggcaacatttgaagcctctcttgtttattagaatttgtgatgtaattgtgtttcttttttgcatttttttttacggggtcctttttaaacaaaaatgaacatgaggacctctattgcaaaattcggaatccttcttcagatgctagaaataacacgtgtaaagacacattccatgttgcagaaattacagtccgcttttgctttgatcattcaaagatcattccctccttttacttttgtctttgtaaggttcatcaccgcaattaccaaaggtaaaagattttaaccgacaaatctctcctctcttcccatgtttgcttgttatgtcgattatgcaattggcaagttttgtaattggcttctctcagctgcttatagttgcacaccatgtgtttgtataaatgcctgaaagacctacttgcttctgaattcgtactttctattggtagattttgggttttctgattaattgtttcgacttttgagatagccctgtattaaaatttgatcctttctttgattatgtttaggatcaagaagatgaatttctgagagattttgcggatgatgatggcgcttactcaactggttccttcttctccagagaagctgttctgtttctccagcttcttcctcccttcaattcctctggagattcgtagaagtaacgtaactacgaaaaccagttccaagaaactcggaagtctgtctttgaacatctcatgttcagctcacaagattgttcggagtccatctttagacagacatgtagtgaagcagaacagagttcgctttgtgcagaagttgaacactttgcttctctctaaaccaaagcattacattccaattgaaatcctctataaatgtcgttcttacctctgcatcgaaaatccattggccattctctcaatgatccgtcggtatcctacaatctttgaactttttacgacacctacgccacatttgcctatgaatgccactaagccgttatctcaactctgtgttcgtttgacatcggctgcatcatcccttgcaatgcaagaattgaatctgaagtctgagatctctgataaattggctactaagctccagaagctactaatgttgtcatctcaccgcaggttgcttttgtctaaactggttcacattgccccagattttggcttccctcctaatttcaggtctcggctctgcaatgactatccggacaagttcaagactgtggatacttcctatggaagagcactggagcttgtctcgtcggatcccgaattggcgaaccaaatgccatctcctgaagttgataggggtttgattgttgatcgtcctttgaagttcaagcgcttgaatcttcggagaggtttaaatttgaagagacggcaccaaggtttcttgataaagttcagagaatcacctgacgtgtgtccttacaaaatgtcatctgactatctggcaagtgagtcaattgaggcggagaagcgagcttgcgcagttgtaagagaggtgttggggttaacggttgagaaaaggaccttgattgatcatttgacacatttcaggaaggagttttctttaccaaataagttaagagacttgattgtgagacatccagagctattctatgtgagtataaaaggcatgagagactctgtgtttctcgttgaagcatacaatgacaatggtgatcttctagataaagatgagagattggtgataagagaacgtttgatagatcttattcaagaaggaaagagaattagacgtgaacgaagaagaaaaggcgccacacttggtgataaaagcgtggaagagaaaaggaaagatgatgaaacaattgatgattatgatagtgatctggatgatgaatatgaagatgggtttgagaatttgtttgactcagaagatttaggtgtggaatatcatttcgacgaagaagatgatgatgatgaggcaggggttaatggtgaaagtgtagagtattggagtagaaagctttcgtcttcaggtagtagcagtgatgaagcaaatagtgctgtggaatcatggtgatggaaaatgttaaatagatcgttttgatatttatactcagaaaattgtacgcaattacacaataacataatgtttatgtcgttaatcttattctcattggctttagagctgtgtgtattgatgaaatagttcgggataatggtaatattgaatgggcttacgaaagaatatgaggccttttaactaaacgagcccatttaagcattgaaagaagtcgaaagtcccacatcgcttagaacaaaataagaagttgcgtttatatacaggtagagtcgaagtagtgattgtcccttcggggacatccgataaaattggaacgatacagagaagattagcatggcccctgcgcaaggatgacacgcataaatcgagaaatggtccaaattttttttgaaaattttcccggttagttaatcggtatgggtagtaaaccgacgtgtcggatctttgtcatactcattagtcattaccgaatctagttggtcagagggtttctggataataccttgtaagaacctgaagaagaggttttttgataggcatcattcttatgactatccgagaaggaatcattttgatgaagaagatgacgatgacaaggcatgagcagtgatattggagtagaaaactttcttcttctcctggtagtaagagtgatgaagcaaaaagtgttgtgaaatcatgttaagagagtagaaaaaccatcaatgttttgatatttttgtatattcgaaaattgttgcaattacacaagaacacactgtttctgtttggtatcttattctcatttgcttcagagaagcgaatttagcatacaaaactgtgcgcgttcccttctttattttctcaactgttgttcgagtctctcaatggctgcaccaacaccactcgtgacctcaccgtggtggcctgtgtcaacgttattgccttcgtttgctttcttcatgagcttcagttgtacccaccctgtagaatcaatgcaagtatcacttagttctagccaactttccaatcctccctgatgcttctctatcattctctaaatatggtaatgacttgtaagacttatttatgtaaataaattaccaagagggaagcacactgtggctccaagaactgaaccaagcaacacattccgcgcacgccaagcaagagaccccggcactgccacattttgattagaggtaaaaatatgttaggacacagaaaagttaacatcctgaatctaataagccacaagtccaaaggaggatgcagagagtttgggatgtatcagtactgattaggccaaaaactgcagcagtagctgaaccagctccaaccacattgaaaacatcatgcactcctcgggtctcagctaaaaagttttgtagactaaagaaggaagcagtgaacattccaagacgcatccctccaatgagggagccacgagttactcggatgaaccttttctccattgcatctcgcatcaacctgtgttgttcacgcttatcctgtgtactacccatcttcaacatcacttctgcatctttgctctgtttcaaaccacacacacactgattttaacacaggaaataatattcagctaaaagtcttaaactttgatatcttatgagttcagtctagtaccagaagtcactaagttacaccaaggtagtggaatcgaaacacaaatctcaaggacaagtaacgagcttgaatctgaaattgaaagcagacataccacagaagcagaagcttctttgctccctccatatagcaatcctgcaaatactccaacaacagttgctgttccccagttgggatttccagctaatcttgaagaattctgttttatataacataaaaagcaatcacaccacaagtaaactatgaaccaatcacttaaaaaccctaacttttatgtagattcttgaaatgataatcataaagaacacatattttgaaaagctttgcttctaacaatgatcttatcacagggaaaatgaatataaatacaatttcaagtaagtgatcccgattcgaatgatcttattctatgcatttgaacaatacaaccctaaaccggcttgtcgcttaaggaaaatcgttgagagggaacataaatctcacccctgggattgtttcttcgggtttttctaccgcttccatagatgactgatcaaacactatcgccgtaatctccttctccgccgtagtctctttctccttcagtccaactaaaggtagaagacgaccagaacggtttaattaatcatcggcgatctatcttaaccgatcaaattttcctagaccggttaaatttgtcataaccggtcgcatagaccaatttatgttttcttatgcggaacgtcttcgtattcctttaaaacgctttattttagccgccggggaaaaaattggtgacaagagcagagagagtcgccatggacgcagcagattgctatctcgaaggaaacgccgacgccgtagaattctgtcctcacgagtcttacgcaaacttgctcgcagcttcgacttatacacttcaagaaggagattgtccctctcgatccgggtcagtgtatctatttgatgtcggagatgttgaagatgttggcttgaatcttatccagaaaattgacactgctggagttttcgatatccggtggagtcgtggtggcgatggaggagacgtggcgcttgctcaggctgatgctgatggatgcttgatagtttacaagatagatgagactgaaagtaaaggtactaactttttttatcttgtaatggaaacttctgaatcaatggactcagtaattaagtgaaataaaaattggaactttggtgtaatccaaagggagatctgtaaaggatcaattgctgggttgttcttaatatgcagctaagctttgttttgttagcttgttggtgatctgagtaaagttttatgcttgaaacaggtactctgagagaagtctccgggaaaagaatcagctcatcaatgtgtctttgtttggattgggatccatcatcaacatcaatcgttgttggtttatcagatggctctgcttcagttgtttcattcacggattctaatctagaaacagttcaagaatggaaagggcatgactttgagctttggacggcgtcattcgatctcaacaatcctaatttggtctatactggatcagatgattgcaagttcagctgttgggatatcagagatagtccggctgacaatcgggtttttcagaattccaaagttcatacaatgggtgtttgctgtatttcatcaaacccaagtgatccttactctatattcaccggaagttatgatgaaaccttaagagtttgggacacgaggtctgtttcgagacctctgaacgaaacatcagtgtctttaggtggtggagtgtggagaatcaagcaccatccttctctgagcggtgttgtattggcggcttgtatgcataacggttttgctttagcgaaggttagtgatgggaaaggtgaagtgttggagagttataacaagcatcattctcttgcttatggagcagattggtacagagggaaagatcagaagcaaagcgttgtggcaacttgttcgttttatgatcggcttcttcgggtatggatgccgataactgatttttccacacgatgttcctaaacttaagaacacagctgttaaggtagattcatctgtgctccgacttgaattaggaaatttctttgagctctgatttcgaagggtcatgttgttgtacttcgttttccttatttcccggaatatttatttggttgaagttgtttcaagaaccatctgatatggttgaaacaacttgaaccccatacttaatgaaagtgaatttaataacatatgttgagttggagcaataacacttatgtctgaatatttaagtcactcaatatcagcaacaagaagtcatcgtctcagaaggaaatctcatagccgtcagcgtcgatgttctccggaaaagcctaaaacatccaaaaaagagagtaagatccaaaggaatgaataattaaaaagaagttttggcagataaatgcgagagaaagaaccttgagtgtaggcaagaaacgggctttggtggcttcatcttcccattcaaggatttctatccattttttatgtgcctctatgacaagatcacctcttgggacactcgtgaaattgagtggaagttttctcagctctgagcatccattaaccaaaattttctgtaaacagggaaatggcaggggaccccggtggatgtgttttagcatctgaacattttctagccgcaactcttttagttcttggaagggaataaggttttgctgctcagctttctctttgtttattacttctttcaggtcactcgctgaaattactcgtagaaccgtaagatttggagcaaagatcagccacgtcaaatcccgcaatcttgtgcagaattctaaagacacttgcgagaggtttgggaagaatgtggtagtggttgggatgtgcagaggcaaaaccgtctcattcctctttaccttgatctcccaaatgtcagagtctgcaaaatgaagctcttgaagactgtccatagtagcaacaaatgagattacagatgattgcggattaagattctcgatgcgcagagctcgtgtacagcttgccaacctctggttgctaaggaattgttccaaaatagaagcaagaccaagagttatggttaaagtttgcaagttttccaaaagctgcaactcgttcaaaacacagggatcttcagggaaaccggaaacaaataatctcaacactttcaaacttgttaaacctgatatgccacagatactctctaccatccttgtgtactccaaattcaggtataaaagtttcctcaactctactaaaccagcaggccaaatccttatccttgtacgtgataagctcagatactgcaatgagacacattctgatatttcatttggcaaatgtctgagatccctgttcattgatagatcaagaacaactagcattggcatcaaccgaaagaagctgcttgagatatgccccaagaagttctttcggaggagcaaagttataagttggggagattcaggagcatcacgtatactttcaatgttgttaaacatcaatgacacccttctcgcaactttccacttctcgatctcaggtatgttcctcgactgtaagcccgcttgcactataaagttttctttttgctttccaaaatcagatgctatccacaatgccatttctcggaccacatcatgcatcttcaccgtttcttgattctcctccatcaataagcatgaacgaactagaataccgataatttcataaccttggttctcagctttacctttgtttctatctatgaatccctcacctatccagtaatctaccaaatcatttttctcaatgttatgatcttctggaaacaaagcacagtactggaagcacaatttgagctgttcactttttaaattatcatagctgtactttagaataggtagaatctcatcttccatacctgaaaactcagctgcagatgaagtcaaaacgtcgattgctgaacgccattcttgcactgtccttttatatgccattgtttcaccaatgacgttaagggccaatggtaggccgcgacatttcttagcaactgttcttgcgactgtgggaatctcagggtggctccctaatgtgatctctcctactttcttagtaaacaaatcccacgcatcatccggggctaaacaccggacttccatatcgctatcaactcccatccgcccgcagatttctttcaaccgagtggtgaatactattttgcatccgttttctctactcggaaacggaactcccacctctgttaaatccactttactccatatgtcatccaataacaagacaaaccttttgtgctttaacacattgtaaatgttagatgcttttatgtcctctgttttctgtttccacttctcgttatcagaccgtaacttctcccatatctcatcttggatcctctggatctgtaactctttggagaccacaatccaaatcacaatatcaaactcgcccccaactctagagaatctattgttgatatgactgagaagtgtagttttacctactccacccataccatgaagaccaagaatcccaatctcatcttccattagacggttccacgcactctcaagcattggatccatagcaaccataggtctagtaggcctctcttccactcttgctgcatcaactctctcagccaccacagcgaaatctccctgatatcgaagaacctcaacttcctctatcatcttcattactctcttcccataacggtagcttgagacaagattcttggaacaaaacccacaaagacacaacctttggacttgaacagatctcattctgacgagttcgttaactcgaggtactattgcttcaacttttgaaacccatccttgcacaacagaaagtcgttgtaaacctcgtctttcttcagacaaaatctttctcaacaaatcttctcgtctttgctcaatctgctcaagagctctctgcagagctgtcagattctcctctaagccatgaatgtaatctccattcctgtttaagcaactacaaacattcttcgtcaactgatcacatgatattgatacagagacacaacctcccatcctgcgtttacacaaaagaagaagtaaacttgtggcagagaactagaagaagaaaaaggataagagctgctgagttgtgaaaattgacaataatccaaactctaaagtcgtcgctattgtaaactttaaacaatattctgaaaagagaaatttctacgaaaaaagactaaaagagtatcatttcagaaagataactttttttcaacgcaaataactctttaataaatattgactgaggtttgattgaaagagataaaaacttcatttgccagcaagattggcacaaaactcgagcagaggacatctgtaggagttgtgtcgtggtcgtctttggttaagagaagaagaaatgggttcaatgttcagtggaaaccgaatgagcaaggaagagatggaggtggtggtgaacaaggctaaagagatcgtctctgcttatcccgttgttgtcttcaggtttgttctcgttgaaatctcccatctttttcatctgggtattactcttttcgttcgtgattatgaatttgttgagaaaattggatgttgttgccttgaggggttttgaattagtcaaaaagtttgagtctttaccatcagggggtagagtctgcttctatttgacgcagaggcaccaatggatcattgtctgcttgttttgttgtttccatctgtgaaattaggtcgtgaatgaaagatcgaacatcatcttatattagtgattctccatccaattcagagattatttgtgggttccctagacgattagggatgtgatcatgtaatatatactgatagatccagttctcaaatttgattctgactagtctagaaatctttgaagaagctagagtttttgaagattgatccgtgcaagctcctatgactgatttggggatgcctttcggagttttgaaatgaagcttaatttgttgttgcttagagtcttgagtttgattttgcttagtcttaaaaggaacgtatttctttccactttttgagatggtctaaaggttacttttcaaatgtaatgtcttagctctgatccatattttctctttcgcagcaagacatactgtggttattgccagagggtgaagcagttactgacgcagctaggagcaacttttaaagtacttgagctcgatgaaatgagtatgaaaccaaatccctgtcaatacctgtatattaatatatctcaatgaacctgaattatctcgatgctatgtttacttcaggtgatggaggtgagatccaatcagctttatcagagtggactggacagaccacagttccaaacgtcttcatcaaaggaaaccacatcggtggatgcgatagtaagtgaaaaacctacacaaattctctgcacaataatggaaattcgggttgccggaaaaactaactgcgtttttcgtgttgcttctatattttgcaggagtgatggagaccaacaagcaaggcaagcttgtgcctctacttactgaagctggggctattgcagataactcttctcaactttgatgaaactcgaaactagtgtgtgaagagtgtgtgttgtgtttagatcatgaaaaaagaggtatcgtcacatactcaataaagaaagatcattcccgttgtttaatacagaatatctaagtgtatacttttcatgttggtgtttcggttaatggaataaaacttgagaaatctgctctagtttcttgctctaaattactgaagattactggttgcatcccaagttgactttgtagcaggccggtcaagtaggtggattaaggcttttggttgaaccaaacttatctagtaaccggccgtgtaggtgccttaaaggctgaaaaactaatattagccaaatcgatcaacggaaagttacgattgaaagagaaatgaatattcgaacagcagaagtgcattttcactgatttgtgtaatccaaattcggattcgaacagcacaagtacatttttcactgatttgtgtaatccaaattcggagaaccaatgtccaatggcaatgaataatgtcaatttggttaatctagatttattataaagtatagtgcaaaatcgtagtttaagagaacttgtggggtcaattagtaaatattatctagagccggttaaagaagagaaactgaggaaactgaatttgaccagagagtgtgttcaagcgaagcgttgtagaagaaaagacaaagttttggaataagcggagcaaaacctagacaggcccgtgtaagatggagatttgttttaaagatttatcaaatcaataactactaacctaagcaagtaacgaagccgtggctctcacaaattagcccaaatcctcaaatttcaccaaaagtcttcgaatttattctccagtatcagtttctctgggaaaaagttctacttttgcggactctgaggaaatcttttgtatctgtacaccattcatgggttaatccgattaaacccgtgttgctccgttagggtttaagagaattgccgccttcaccggccatggctgctaaacttgtgtcctcctcggcttcttctttggttccatccattttctcgccgtttcaacctcggagttcctttcaggtgacaatttcttaatttgtagtcagcctttagagtttcttctatgctgcatctgtgtttcatgctcccaatgtattgtctcgacagatgtttctcccaatgtggtttgagacattgaacaaatattcatttgatctagtaggaaaatttagttgacacatttgagtatactaaaatcaatgtgtctgaagtggactttaagatatagtttttgcaattcttacttagatttgattgggacattgcagtcttgttctccatagatgatgcctagaaaaaactggaacttcatctgatcaataatgctttttattaggttatgataaaatgaaatcaagtgttggtttcatttgttgttgttgatgaggttattacctgctgtttcttggtcttgggaagcccatgtttatggatatttgctgatatttgtcgtctccaaacttcagtttcgttcaccgagggttcagcctgctcatctccattgttaccattctctgcaccttaaaactgataaaagtaagttcctttcttactcttaattgttatcctttgggggtatgagtgacttgtgagtaagttttctgactgtatttgcattcgttatgaacagttggctctcttcacatttcctcaagaggccaaaaaccaagcgaagtctcccgaaagagaacttatttgcctcttgctacttcagaagaaaagttccactacactgaagatacaacaaatgatccagacacagtaagtccccaaattggcaccgaagctacacctagagatgatgattcaactatccaatacaatagaaatgacgggaaaccgggtttcatttcgttttacaatcctcggaataaaactgaggatatcattatcccccctgaaactcaaagtccatggggacgcctgctctggctcattggtcctgcagtcttagtctcctctttcattttacctccagtttacttacgaagaatagtctcagcagtttttgaagattctttgctcacaggttcgtcttgcttctcccttttccgatttactcgtcacgttttcttcgaaaattgcagagacaaagtcattgtatctttcttcctctatttgcagacttcctcatcctgttcttcaccgaggctctcttctactgcggagtcgctgcatttcttctgataatagaccgctcaagaaaaggatccggaaaagttccccagaaccgaatcaatccttctcagttaggacaaagaatctcctctgtagcaacattagtgctgagtctcatgattccaatggtgacaatgggattcgtctggccatggactggacctgcagcatcagctactcttgcaccatacctcgttggtatcgttgttcagtttgcattcgaacagtacgcaagatatcgtaactctccatcatctcctatcatccccatcatctttcaggtatgtgatcactcttcttcaatcaacacctctcaaaagatatttcactttaacacacttttgaaggaacctttttgggttttgtaggtatacagacttcatcagctgaaccgagcggcgcaactagtaacagcattgtcatttacggttaaaggagcagaggcaacagttaataatctggcaatcaagaaatcactgggcacacttttgaatgtgatacaggttttgggtgtgatttcaatctggtctatatctagcttcctcatgtggttatcatcaccttcccaaaaccagtcttgatgtatgaaaacatctttcttattattattacagagaagagaataacacagatctgtctcgagttcttaactgtaaaatcctttacctttttaaagattttacttagggatccagttattctgaaacttaaaagattcaagtggagatctgattccagttacaaaatttgaggtactttgtgacgcctcaatttacccaacacatttggaaattggaattattgggtaactgaaaagttgtcaaaagctaatctatttgtggtaattggattttcttcctaaaaatagtatgtacatatcacttttggtcgaatgtctccttgtctaaaaaaaggtccataatgttctgttcaaattcatgtctttttacgtggctgcataaacttcatctaagtcccaacattttaactacctcaaactgtcaacgtcttggaataatcaagtccccaaatattgtctatatcaatcaaatatcataaaacttctccacaaggcaccaggaatgtaattatatttaacacaaaaagatatcgatattaataaaaaaaactttatacaaccctttatttgaaatcaattggtaaaccaaagtacaacaataaacatgcctaaaagtctaaaacaattaaaaaaaattcaaaacaatttgttaagtagaaaattcaaaattgtatgccaaggtaaaaaatcgatttcaatattactgaagagatattgaaatagcgatcttttacataccgaagggtcaaacatgataaaggcactcaaagattaatatgtgcaaaagatggccgctctgcctaccaaaacgacatgacatgcggatggaagatttttgcaccatcatacgtaagtgtatacactactgtgtaaatttctcatatcgaatataccatctcatataaaaagcttcctatcttgactaagaaatacaataaaactgtaacgactattggaatgaaacctcaataaaacaccaaaaataaacagctgcaaatctaaatattagaaagattgtaacatttttagaacaagatcca

SEQ ID NO: 951 - DNA, 81662 bp, Arabidopsis thaliana
gatctattctctaactgaccaatcaactatcaccaacgtgtaaacaagctaacacataagtttatggagttagagaatatcttctaccacttaaaaagaaaaagaacgaaaaacatggaagagaaatatcgaataaggaggagacagacaaaggaggcttctaaagataatgaaggtatatgcaaaagaggtttggtttatatagagagaggcttggaaattaggtcaatggtgtttattagtcggtcgatggaaataggcagaaattggaaataatataaaaaggcaattttctaagaaaagaaggaaatctgtttggtcagcgggcagctacccggtgaattaaacaattcagcaacttgtctgaaacaggcagcctcgagactcccacatgatcttcccggttcaatttggtttacaagtctaattgtattttagatttcggtttggtttgatttttcttctttttctttctcaagggcccatttagcatgatttctcgcaagtctactattggattaaccgattaagcattaggccgaagcctaggatcaaaattcagggtataaagatccatatatcgcttgactaagttgataaacatccgaccacaaccccttttaagtccaatgaaatcaagttgttagttaattcattgtgaaactagagattcaagttttggttccttcaaagatattcgatataaaagagaggacttcaagttttgagaacgtaattacatgtttcacgtcgtggttttcaaaaaaatgattataagaaatgttattttcgtgttgattgtatgatttgaagaaacaaaacatcatgtaaatctaaatgtaaagagcttttttatcttgaaaaaagttgataaaaaagttgtgaaagttctattcaaatgatttttttttttgttaagactatgttcttcaactcgttatttgactatttaaaatagaaaatcaattgtgatttaataaaaaaaaaaacttaatagtaatttctccgaaacgacgacgtttagaggtgttggtattaaaaaacctttgattaaccgcttgcctgcaatctgctctcctatctcttccaatctcctctcctctctatctatccgcgtccccatttcttcttccctctaaaattccaatctttcttattgcttttttttattcaaagcttcaagattttcactagggttctttccctttctcttattcgataaattctgttcttttctttcgtattctcacggacgaacaaaccccaaggcaacgagctcatgattgaggtccgttcttctgctctttccctctcagtttcttcgcagctgttttctaatttgcaatctattttatggatttggggtacttttgttaagggaacaaaacctatcattttccaggtttcttatggttgcgctttagattttatagtttagtgtaatttaatctgatttggggaattgggtgttggataagagtgttttgcagctgagaggattgaaaaattgaatatttatgatatttaagctcgctaatgaggttctcttacttcggattttgctcagcttcgctcctgtcaagtaatttttgttgtgatctatatatgaaatttccttttaatgttttatggtcgctacttgtgatttcatcatctttggaggttacaatcatcttattcaatcctttcttcggcctcagattgtggcttttgagtaaatgattcactgctcagctagagacaatggtgttggtaacccataaattgcaggtatcttagacatagatctgtaaagtcctaaattctactttgttttgtgtctctgtaatggtcatgtctgcaaatggttgtaccttccgtttcactcttgtaaagccttcttttacttgccacactagaaatatagatgtttacctcccccttgttctctcatgtagggttcacatgtcttgtctccttggagttcgccaacatggaccagaggcttgtgtttaaagagacctgttacgacagtgcactttgttgagaggaaagataagcatttacgattgaagcaaaaatgttgttttaggtgagtatcccactttacaaatccctgcttaggttatgtactacttagtttgagactcattactctctctgtacgactgtactctaggaaggtagatacgtagttatattgtggattaaaatgtgcctcttaatacgctgagacctatctgttagctaagagattccttgttagatactgagacgtatgaacatataggaaactatactaaaaagttatagttcatatattccctttgcaattgattctcggaatcataatatgttgtgaaactcttttgcagtttagggtccccttgcaacggtggattgagagcaaaacctttcagagttacatcttttaaaggtggcatccaaaataatgaatcaggaggaagtgagggtgggaagaaagttactaataactctgtcaaactatcttaccgttcagatgatgacgaaaataatgtgaatggctccccaaaggcacagaacacttcgttttcatatacctcggaaacagaggattccatgacagggcaacccgctattcagaaactattcaagaaatggttgacattgttgcgcacacagtcacctattcaagtgattgacgagactttaggaggagaacaggttccacaaacgacgaagcaagaaactgaaacagaaattcggaaagcagaaagtctccagagtaccaaaaatacagtttggtcctggttttggagtctagacgcagctatcaagattccgttgctgttattgtaagtatcagcatcaaagcatctttttcttttgcttgatgaggtagtctagagttagttatcaatagaggaaaatcgactagatgtgaacttatattcaaaaactgtccttaggaagatttaagagtgtcacagccacttttttcttttccaagttccttgtatgtgtattgactatactttcaccttgaccttttttgtagtgttccagctttcctagctgtttacgcgatctgtggtgctgaagttacaaaggaattatcccctatgtgggtggttggccccttgatcatcgccctttatataaaaatgttccaaggactatgttccctttacgccttctgcttcaaccaaaccatcaaaatgataagaaacctaccatcgtattatcttgtagcataccaatacattgccgatggaaagctcaaagacgacgttaaagctctagtgtttaaaccagtggtggccatcaagaacacagactacaaagagctcacacgcacgaagctgaaacagttccaagaatggatcattgagaaatacctggattttgttgaatctgtatggccttattactgcagaactatcagattcctgaagagggctaacctgatttgaagatcttcaacatggaaccctcaaattctgacttctcagggcttctctatgatttctctctgtgctttgtttacctttttttttttttttcttaattttaggaaggcttttcatgttgtttgttcttatctctatgtatactgataccttttttgaggttttacaatgagttcttttaatattaagggttatcccttttctccatacttaaaaattatctatacacatataaatcgacaacaacagaagaaataagtgcttaaaggtctcttataaacctctttagctccggaaatttgatggtaatgtttcttcagtaaagtactcctttctgacggtctctgctgagcaaaacttgaccttcacataaagcaaagtataaaaatccatctagtccagtcctctgaataaccacactatgtagtatatagcaattagaatcgatgcataaaaacatagcaatatggtatggaagttaccagagaagcgtattgcttcaccaacggtttagtgaattgccaaattggctgaaatatgaatggagcatctacaaaaaggacttcatccaatcggcttggatagtaatagtaaaatacgtcaaactgcagaaacaaaacaatggaaaagacaacaataagatcaaagaccattcacctgtaagaagatacaaaaaccattcacctgtaaggagaaagaaataccaggaaagtcaagaacttaagatctgcgttctgagatccgaatccacggagatcaaatatcccaagtatcttgtgttgtcctgctggtaacttacttaaagccttttcaagtaagaacacacaaagcttttcatcttctattggatcaagcagctgcaaaacgtcagacatttcacaaatcctcagctatagtaaatctgcattgctgaaatttaacaagaaaactggtgtctaacttgccccggggatgtgctttgcaggagctacaataaccactggccgacctttaacatctagaaaaccatgtacataggcttttccagtgtcagtagctgctttaatagaatcttcagaaagctcatctaccttgaactcatgacgccatttctaagcttttaagtaaaggataacatggaaaccaaaccttatcaatattaccaaaacaaaaaacaacatgtgatttgattctacaggttctacataaaagtgaagtctctggcaactttctagattcattatagtgaagaattgatagaagataaagaaaacacaaggaagaggatacaatagctttagttagctttccaatggcttcatcaacagaaaatctgcgatctttcaaaaaccagaggatcatatcctcatcatctcttccatatttgccaagtgggagactagtacaatctttcgcaagccgttcttttacttccaaaactagctgcaccacatgttcacaaacccaaactttcattacacaatcccctcagaactcagaagacacattccatagtctaaacatccaattcaatgggtattgtggaactcaagaacccaattctgagaccacataagcaaaagactaagtttttattttatttcttaaacagagcttccaatgccaacaatggaagaaagaaacagaggaaaacttgctgcagatatcatcagaaaaaagcataaaaggcatatgcgaagaagaaagccattgcgtaagaaattaaaaaaagtaacgtcatcgtaacattcatccaatttccatgattctcgctttttggctaaaagagaaaaaacaaaaccttgtgcgcatgttgggattcagacacgcaacttcggacagagaatctgcagttccgagatcgattaatgttcaaattcttcgagcttttgaaattgactgaagcagcaacgatggttgagctgaaacgaatcgacattgactacaaggagtaaaaatttactctttagagtttgattctcagaaattagattgatgagaggaattcggaagtttcaaaagctgggctttgttcaccacagagcaagaagaattcagaatttggaattttgcgatttatagatacagaagcgaaacagaggcatatgtttttgtttcccctttttatagactcttgcttcttatacacacgggtacgggtctttttatctgggtttagatccggttcagggtctcggatccacgttcggatccggtttggtatttctacattattaccaaaatttatttgcttagccagaagtttgtattttgtaaagacatcatcatagtactacatatataactacacactcgcagtaaatctttttttctctctgtataattgaagttaaaaataacaacaaaaatggcagtttatatggaggatcacataaaaatagttaaaaataatttagtcctagtaattataggtcttctctaattttatttggaactaaatttcagaaaacaaaatatcgtatcaaattttgatgtaaattataaaataatagaaattagtgagatagcattctaaatgaggattgcatattttggtattagatatgtcggattttatctgatatggtagttttcagtgtatatatatatctctaaagctttttcaagccaaataagaagaaaaatggagagcaaatggagtgtggtgatgatggtgtacttagtttttgtggtgatggctgccattggaggagaagcacaagatctttcatgtgaaacgaaatgtgcaatcacctgcaaagattcgatgttccctaaaaaatgctcatccaagtgtttggaaagttgtagacgacattatccacctactcaacttcacactcgcagtactaaatctctctttttctctatatagttatattatgtgatatgatagttttcattgaatatatacctataactttttcaagccaatggagtgtggtgatgatggtgtattcgtttttgtagtgatggctgctgccattggaggagaagtaaagagtgttggatgtgtttttaaatgtgaatttcactgcaaaactctgctccccactacagcttgcgtcaaacggtgctataaagagcgctgcgagcatcatccacctacaagtacctcgcactaaacttcacactcgccgtaactctctaactctttctctacatgttatgtacttatgtttgtgtgtatatcatagtgaaattgacattatatatggtgataaataatgcaggatgaagatcgagtagagggctgaaagagaaagagagggtagagatcagttgattcagttctaaagttgtcaattgtcatgatggaaaatgtttcctacatgtaaaagaacatctataatcagaatacataaatataagtttttttttatgctcatgtgaagaatggactgaagaaacattataattatcatttcaacacggtatgatgtgggagaacatctattgatatatgccaaattaaaacaaatgattagttgttgatcctaaaaaaaaaaaaaaattattaagcaaatgatcaatttccaacaattagtgttcctttaatatgtgaatacaaaaaacttattattatgtaaaagaaaatctatcataagatgaagaagaagaataaataatagtaagttttttgtattcacataatcatttactttattttaatattttgtttactttaataataaataataatatttttttgtattcaactattcttcttctttttaatgtcaagtttctctgcaaaagattttcttgtcactatcatatccaattatccatatttcagatttctagagtcaatattcaacacttcacataaaaatggcttagcatatataaagctcattgtaattacatgaaatttaacaaaaacaaaacaaatggttggtcattttggaagtttggaatactctacgtactaatattacttgggaagtacagttgcgtggtgtatagtgattaaccaacctacgcagactagttcaaagatggagaagatatgtggttttattgtttcttttaaattatggattgtattcccactcttcacgacattttctttattatcttttgcgtatttaggataccaatggaaggaaattggcggagatttgtgttcttcaagaactagattgagacctctaacacgaaccgttactgcggtggtgttcgagtgttagaagaccagatatgacgttacgtgctttgtagatttgctacgacaaatgttattgtatgctgcatcgatcttaaaagttgagttttatttaaagccttaagggacattctaaagaagagaagatagaaatcacaaagcacaataaaatggtccaaaaaaaacagaacagaaaaaatctttctgacttgaaaaaacagagctttttcttcatcacctgagaggaataaacctggtggaccgacggaaacaacaacaaccacaaatacgtggtctatggtgattaaccttcttgcaagtcatcgaaaactccgcaagataatgaccaatcatctcaggtttaatcacgatttcattaaacttctttccattgtgcactccgacaacacttccaatcatctcagggacaatgatcatgttccttagatgtgttttcaccacttcaggcttcatcttgttctcatcgcttgcttctttcttcgcccttcgtagcttcttgatcagaatcagaggttgcttctttaatcctctgtagaatcttctgcgaacacgagcgttgaagagcttagcgagatcaacgtttgacattttgagcagagcatcaacgttgaaccctctgaatgagaatttcttgaacgttctcttctttgttgccaccgccacggccgtggcaaactctggttcgttgatcgccattgttggaatttgagtttttctgcaaaaggatagaatatgccattagagattggtgtagtgagaattctttgtttgcttcactactatttatacaaaaatgttgggagatatcgtaaatctctaggatcgtcggaaatatcgaaaacttacctaaatgttaaagattgaccgagtaaatgtaaatatttttgaaatattatcaattatttaatgttactaatcttgtaatctaattatggctgttaccaaccatgtcaagataagaacagatattggtttaggatatttattcttaacatagcatacagtagtttttaaaagtttactaaataaaatagattttttattaattatttcatttacatctaaataaaatagatttgggaggaaaaagtattgtgatggtttatcatttcaacaagatcctttggagaacatatttgcatatttggacctgcaagaccactgagcttttgtaataattctttcgaagaaagaaactgatcctcttcctccatgtgaatccttgcataagttcttcccatgtctctgacaaatctgagaaactgtggatcctccagtgtttctcgcaagtccagatacacttcctctgcagttacaccgcctgcagatatcatcttcatcatgactttcagtatagttgagagattcattaacaggttttgggccattgctaatgaacacgaattcaggtttttgtgtttgtcagagtaagattgcagtagaaccatgttccccaaagagaaccgtgacatgaagaggaagaaatcatttaaattcattcctgtagaggagagaaaagaaagggtcatgataggaatattcatattcatagatccaaaactcttataaggattttcttgaatattttgttcgattatacattcatgtaaacacattcagtcaactcaaagattcagttattcactattgcacagggagttctccaaagatattaaaaagtttcaatcaaaagatctcagatgagataagttatgcatgcacctgtgttggcagcaagattacgttggcagatagcttcaaaatcatcacatatgtctcttatgtcttctattgactcttcagtgtccttgtagtccttccacagtagatcccactggaactcaagtagacatgagtacttcctattttagttcagttgcatatttctctatatagaaaattagaaaggtaactcgaaatgtcattaccacccaagataggttgtatgcgttgagccaattgtggttaatagatattgtgtcttcctgtaataatatttgagatcattcaatataacattgttgttgtatatatagggagagggggtgagaaaagagagataccaagttatatacttgatgatgccatccactgggaacaaagataatttcaccgggttcttgaatgcactcaagccaggtggtctgaagacaaaccataaaacgctcataaacacatggtggaagaaagaatatctcacaaattgatagtaggactagctgatttaccttcttaaaaccagggaatttagtttcattcacctcttcaaaaatgtcataaacgcaatttttcatgtacctgaaaaaaaaatcatcaaagtataaagctaacaagagcgaacaatgtggatcagaaacaaatcaaagaaaggttacatgaccaataagataagaatacttgcctgtcataaacaagatgactttgaggaggaggaaggaaaagccatctttttttaccacagacattagctgaccaactataagatctaaatacatcagcatgtagaggtgtccaagatcctgcagccaagatatcagaaatgatcagctttttccaaaggccaaaacactcaaacaaacaacaacacaaacagtttctttgatcttttactcagacctttcccacccatataaacaaaccgataatcagagcagcttatttgatcatacttctggaaactatctctatcctcatgcatttggtaattgtctagatacacgttaagccaatcatcagaaaacaacggcggtgtttggtaagctgtatagtctggatactcctggattcagcacaatcaactctcaaaattgatacatagaaatagcaattgttcttcttcactaagagaaagaaagtaacaagcgtgtgaattaacctcagatatgcaccttcacaaagtgccaatctttcagatacaaaacagattcctcaatagaatccttattagtccattgctccacaaattcagtaacagacatttctaatcttttctgatctgtaaattctctcgtatcacaatctgcaacctgtaaatattcaaacaccaaatcaatgaacaaacaattcattcccaaaaccaaaaagactcaatttttattctttccttcaacagtttggctatggtagctaagccatggactattttacctgaactctggattttccaaagtgagtggcaaatacgtggagattagggtttccattctcactgacccaatcttcccgagctcgccaatcttcagtgagatcggatattaccactggctggttcttagctaagtatctctctgcaaaatcgccgtaactcagctctttaccattgattctctcaatttgacctataatctgtattcccatgtttctctcaatttgatctgcttcttctgagagtgagaatctccgatcaaagtcgccggtaaagttgaagcagatatagagctccggccgatgaacgaaagagactctctaactcacctagagacttcctaattaaaggcggcgtttaaggtcaactcacagaaggttaaaaagcaatgtaattgtacggcccatttataggcccattattacccacgtagtgacgtagatgatcaaacggtgacgtgttggtctccgaatgggaattgggtcaattatgtttttaatggtgtcctgatctctctagggaaaagccagtcaaaattatcacttccatatgcgtttttagagttctaaagtcaattttcaacacttattttaatgacttgacatatggagagttcatagtaatcacatgaaatttaatacacagaagacaaagagacgttttctttatatatatagagagaacttccactgaatatatattacattatatactgatatacatataatctttacaaacttataacaagagaaatggataaaaaatggagtgtggtgatgatgatgttcgttttggtagtgatggctgccagtggaggagaagcagcaagtcactcatgtacattaaaatgtgaactcacttgcagcgactgggagttcaaaacaccttgtttcaaacagtgtatggccgcatgcgagcatcatccatctacaagtactccttcttcaatgaaatccacagtcgcagtaaatctctttctcttataaacctctttgtctgtgtatgtaatatatgcatgcatgtacttttctgtgtgtgtcatatatattgaaattgatatggtttttacatggtgatcaataatgcaggatactaaaccgatggaagaaatgagagggtagagaaattttaagaagttgtcgtgatggatactttccttatcttttttcttctatatgtaaaagataatctataataagatgaatattagtcataatgttaagtttcttatattcgggaaatgggatgaacaaattattataagtatgatttcaattattataagttccttccgattgacgggagtcacgggacaaatgcatgaattacaatttgatcggatgcttaattatctgaagctatcgatatttgtactttattttgcattttgcaaccgccgatgtgacaaagtcgtcggagaagaagcgatggagaagacttagatgttacggttgctgccacgtggtctcacactcatgtccacaaatgttggactatattggctcacttttcaatggagtcttactcaacaagtatctcgattgtgttataaactgtacggcccatggtctgtgaggatgatattgatgaataacgcagggaattgatgaacaatgtcattttgttgtttacatctagtacatgagttaattcatattcgtcaacatcgatgcaaacaatcggactcatgaattttcattcacatcgcacgatgtattggagatggcttctacacacgtgagtaaatcttgttgaaacatcaaccacatttcattattagtatttcgctctcttgtaagagcgactctgttttcagtcccctgtcttgtttaaattctcttcacttatacaacgagacaaacaaaaagcaaaaaaattcagtttggtctgatatggttattactcttattgttattgtaagcatactttattataaatgaatgtgaaagcaaagtctaattacattcatcaagttttgggctcaaaacggtgatgcccaataatccggtgagtcaaaataatgatccagttatgtttcccatccatatatatatatatgaacaaaatttagcatagtacccaaaaaaaaaaaaaaaaaaaaaaaaaaaaacagaaaaatactattcactaaaacaaaggtaaaacgggtatattcaatctaatattttaagtgatttgtgtaaaaattacaaatcttatgttatttaatcatgaattttaaaaactctaatgaaatccagtattattggactaatgatttaaaaatctacttttaaatccactgttactgaaaacaatttgtggatttgattctttttaattttaaaggatttgagaagatttctttagttaaaaatacagaaatccaaatctcatgattttaaataaaatttgaaaaaatacaataaaaatcacatcaactttccaaaaatcattaaaaatcatataaaaactcactaaaactcaaatcattcaaaatgtaaggttcaatacacccttttaagatagaaaatctggcatttaattagatttatttctatcttatattagtttgaataatttcaatgtttctatatgcattttgtatattccaaggcaaataaatgacttgccataaacaaggcccaacatattaattacaaaagatgtggtcctttcatctttatatatatattaaatagtgagagcttccatagactatacataaaacttttaaagcaaaagaaatcgattaagaagagagaaatggagaacaagtactcgagtgttgtgatgattttggttttggtggtgatggctgccattggaggagaagcatcagatctttcatgtgaacagaaatgtagatcagcatgcgctggcggcaagggtttcgtacaccttccggagtgctacattgactgtgtacgaaaatgcaaggacattccacctacgtatgtatataatacttgtgtgtgtgtgtttctatgactatatgtgtatgtgtgtttatagtgaaactgacatggtttctctggtaattatattgcaggattgagacttcgagggatggaagaatgaaagcatagagatagtttcggaaattttcatgatggaattttcatttcctttgctttctatatgtttaagaaaatatataataagatgaataaaacaaatttctcatatttatgtgaaaaatgggatgaacaagtattggagaatatataatggttctgaagcatgtaatatcgttcttttaattatttttttctcaaaaaaccacaaaaataaaaagtttaggcctggttcttaaatgcttcagaaccatttcaaaataattccagatccttttctaaacgtttttgttttggcataaaagtctttacatcaacatcagcctaatactatttgctttaaaaaccatatatatttcgtcaagtgtgtcggttggattcagtaatgcatctcaactgagaattgcatttgcctttttatttataattcagtcaaaagattagtcaatcaaaactctattaatcactaatcattatcatcccttcttgagtcatgaaactgctaactaattttaaattattatggaaactcacttcatatattcttttagaaatttgagtggacctctttcaaaatcatgagattctcgtatgtatctaacaatcaatcatttttcaggttttgttcaatgcatgcggcttcaagaatcatgattattattatattttccattgtagtataattattcggtatgacacgatggctggaaatggaatagttgggaattcagatcttatgaatcctgaatagtgcttatgattgacaaaagagttcccaataattgctgccatgatttcaattcaaaggcatgcatataaatagcaaaaacaacaacaatacattagtggactagtggagcaatgtttttttaatataccaataatgaataaggaagtagttgctctacatgactaattaattaagaacatatgtctagtttttttgttttgttaaagtaaccctgttagttttagttagcagtttttgatactgacttttgtttggtatgaatcctcctttcataactcttttaagcattcaagacattattatatccagaaataaatgatcattgtgagaaaactgttatatggaactaaaaaagaaacataatccaatgccaaatctcaacccactattattagaatctatcgagacaatggtcggcggttattaggctattagtttattcaatcattattgaatcctaatattcttacaaatcaatgattggaagactaaagaacatatattaaatccttttatcaaaaaaaaaagaagaaagatcacatattccaaatgcaccaacaatctattagaaatacaaactataaaatatggaggctcatttatcctagatatgatattttctgtgaaaattatacaactcttttcacagtatttattagttgattttgtatgtattaatcagacaatctgactcaaactcgaaccgttcggaccaaaaaatgttccactctgtttgacattgtccatataattttatatgaatatttgactctaactcccatctaaaacatcttagaattagtccaatcatgatccaaaatttcagatgatgactaaaatattaaactaacaattctcttaacttcagatgatgactgaaaacctctgagtataaaagattggctttaatcctcggacttcgaattttgactcttaactgaaactacaattctctgtgcttttacgttttttttttttttttctccagcttttgatgatttataaatcgtaaaaagtagcaatttgggcccgcaatgcacaatgtaaaaagagattgtcttgttgggttttgtagtttagctcaaaggcagaaactcagagtttgcttccttttcacgtctttagagacatcgattgattgatgggtttgatggattctcgatgacttcctattattttctccgcgacaatatctataatttttttccttccaaaaaatggcagagagttgttttaattttggttatggtgaatctatgttaatttgggcctagataaaaaaagagtggaaactaaattatgggcttaattaagatagagatatattccatgttgaactaatcattttaaattaactagatttggaaacgaaaaggtatggttaactatgttactaattatgtttcttgacatatatcactaagtgttagttattgcaattcacaagctttgggtgtaccaaactttcgacttaatttttaaaaggtttggcttatgtatggaccaaattaacaattaggcattcaagcaggtttacgaaaaagttgaacgtatatgacgtaattactcaccaccatatttttagttacataacatcattttagttccaaaatgctcactttcttgcattgcaaaaagaatttaattaatttaaaagcgactatgtgacaaatatactttttgtttttgtacggcattttaatcccaaatttgtctctttttttgtattgctacttcgatttcactactcatgacttggtctatatttggtatattataaaatgttcacacctaatgataactccataatcggacaaaaaagaagaattcaatagcaattttcattaataatgcattaacacttctgagtctgaagatcatattttatatgactaaaaggctgcaaacacaccataataggcagaacttttattttaaaaaaggaaaaggaaacttcataatacacatgcctagccgtcgctctacaagttcatttttactcaacaaaatggaaaactaatagtatgataactccaaacaatcaatacaattatatattgtacacttaaacagatacaaactatgtagttaaataagttaaactaataataaagcagagaccttcaattattagcacccttaagttctctgaaacatgcatccacgcaaactacaatcctagtttaggtattgaacccaaggcaataacaatcatcaccatattatatatctaatcataggtatttttaaaataataaaattcaccaatgccactatagaaacatacctttttccgtttcgtaattaaatgaatatatcttgcttaccacagaataccattttatatttcaacgtatattgtaaataagattttaaatatttaatgatatagcattaaataaataaataaaatttatactaaaactgatatttttgttattgatattcattctaattattgaaatcattaaaaataactaaaaatgaaacggataaaactatatcatgtttggcacctaacattacaaaaacaatcaagaaaataattatctagtaaaatatatttgttcaagtatcatagcttagttattgaaaaacatacactaataataatcaaaaaccaaaatatatatacctcatcaatcatcataaataaataagaacagtccatgcatttataattcgctaggaaataatatcccacacacagtccatgcattaaacaaataatatcgtattcgtaccacacacacataaatatagaaagagagagatgagaggatgaatactcataatttataaactctcacatgttacctccttgctgatcatgaccattgttccaaggaagaaaagtcccatacgaccctccggtgccacgtggcatctgattcatcaccggacttgcccccgaaagcctataaaccgggttcaagggaggcagttgctgcgacggaagcggctgaggctgaaaaaccaagtccacgacgttgccaggtgctccggcggctgatgtggacaaaccataatgtgccaagtcagcattagctgcgtcgagctccttctgaagcctatggacttgtctctggagataagagatggctccgacgcagccatagacggggtcacggacacgtgcctcggcctcataggctaaggagttgactgcgtcttcacgttggtgagggaggagctcgttgaggagcttcgtgacgttgcttgctccaaagattttgtggacgttggcgaatttgtgtggctcctccggtggaaaatatggcgcgaatatgcatcccggcatgcatttccggcgaagaaacttgcacgccgcgcatggtgagttgtatgagtttgatgacgacgccatttgtttttcttcttacaacctaatattgtgttttaagaacaaaatacaattagaaagaaaagttaaacacacacatatatagtatgtttatacatacgatctacatatatataatttaaatttgccagtaaatgataaaactcctacgtttcgtttagaagtcatttttctataatttctatattgcaactttttcaaattttatattgaatttttttatttccttctttcattgaattcctaattatctttccattgattttccctttccacgtttttcttgatgtatatgtaaaatgtccaccatcaaatctaatgaaaggaaaaacatactatttacaaaacctaaatgtctttagattgaatattaattgaacacgttaggaacacagagataatccggacgtgctggaactataactttagtttcacataacgttttttttttcaattaatttagtctacactagttttcaagtagacaaatatcacttcacatatttaatcccctattaccttcttaatttatctctacgaatatatttaactaacttctccgaatcttccttaacagagtatacacatacccacactcgcctttaattctagctaatatatgatgtcatacatgtcgatcagttattccctgaacaaaacaaaaccaaaaaaaaaaagcaatcttatttttaaaatgtcagatgagtttgtgtatccctctgtatctatatcaatcttacatataaatactacatatttttgttcaatgcatatctacttcatattttaccaaaatatatcaaacagtttttctttgtaattcaattgtgtcctgatgtgttttaccatcttcttcatcttcctctcactctctcttcaaccctagctttgttaaaagaaactataacttaaaagggaaactcagtgaggattttataatttctatttgtatgcctcaaaactaaacttggtcaaagaaatttcaaaaattgtctttactaagtaagataaactctctctttttctccgagatgaagcaattctactgacctcaagtctataccaatttggatttgtttgtaaactttagatctgaccttaattatgtcaactcaaagagatcacgaaggtttaattacacgtgtttacttatatccttgtctcatttgctataattaattagataaccttgttaagtctttattatagtagaaattcaaaaggaaagtgacagaaggatcaaagtgaatatgtgtatgagcaacatagaacatagaacatggagcatagaaaataaaattaaacatagattagaagacttgttttgataatcgggagctatgcataaatccagggatttattaagatacatacatcaaagtatatacatatacctgcctttagatctttaggttctttgaggatcttgtatctttcttcctctttcaagggcttttaccttaccctttgaatttcgcttccaaagtagatagagtaggcttaactctttagtcaatgagagggatatattagggttttagccctctcaaagaaagaggaaaccctaatgtcaagaagaattgagaaaggtttgtatagaagctgagaatttaaagaaaccaaacaaacaaataaaaaggaaaaaatagagaaatgttttagtggagaggaaggagaaagagcaaaagacaaagtgtaataataacaaatgaacaattaataaacaggaagaggaggagagggtatgtcccttaaagaatgactatgacatttcatctcaagaatattagtaatatcatttcactgtgcttacttttgtctcccattagattattttttaaaaccttagcttttgtgaatttttcttcatacatttaatgttaacaatattccctaacagtcccgaaatcaaccctaagctaactaatcaattatcattgtgtgtatataaatatcactatatatgatctctctatatatacctgtctcacgctgatggccaaaatttggaacctcaagaaaaccctaagcatctctctatatcaatctcgactttaattgaatatcataacaaaccctgatttgcaatgagaactaaagaacatattatatgactgtttttggcagaacaaactatacaattaatatatagcggtataaatttggtgactggtaacttgttctcttgttcataccgttgtgaaaaaagcttgacatcctaaaattaacagcaatgaattgaacctttttttcaggtgtggcaaaataattcttcaatttaatttaatcgaacaacagttaataggaacaagaataaactcttgagacctcaaagtagctacgtagagacaggaaatcagtaaaagtcaagcgatttcatgtgaacgatcaagtcaagtttaaataggttttgtaaaatcagaacttttgtaatggaaaataaactatgagggggtccgaagatttttgaagctatagctagctagggttagtatcatacaacagttacttgtgttagattatatattattggaagtgacaaccgattgagacatttttcataatgtcttcttctttttatttcgcaccaattcttggtctaatgtagaattcaaatggttcaatattgaagatatattagactggcaaaattcaaatgcaaatgtagatcataaatagttacctaatggaaaagtaaatgagataattttcttattactatcagaaaattgtggtaaattaaccttttgaatattttcaagatcattatttgttggtctaagttatgatggtggttagtggtgggaacttagtaatttactaaagtgaagcatctataggctttatcaccaaactaatgtcttcatatttttcttaagatattaattttgtgactaatatatatcgggattagggttcgaaaatagaggtcctattcttttctaaaagaggaaactagtctcgtacttggaaagtagagcttctctctcgttatgatacaaaaattgactgattattcaaagttttcaatgttattgattgcgcattctgatatgatagataataagtaactatatcgaataagttgaaagttgtttggagagctatgatatggtttattcgttccgtccgacgttgtaaattcaacactaagcctacatattacagaagaaaccataacaaagtttaccatcaaaagattaaagtaatcgattagaatgggtattgatctatatatatagcccttcaatatatatagagaggttgcatataaaatgatacaaatagagaggtgggggtatgaagtgttataaagggtttgcagagagaaagagagagagagggaatatgggtcctcctcacacatatgatctactaaaactagactagtacctagtttgtccctcgaattttatttttcttcttgtaatttaattaagtcagtgtgactctaagaatctatagaaaccacattttatatatatggtctcatttgaaacaacacacacataagagataatgttgaattaatgaatgtgcatgtgctgattatggaagggtaaagttagaggtatatatgggaggtcaatgatgcaacttggaggaatagttttgtgaatatgtccttttgttttcttgtttgtttttatatatgtagaatcgaataacaaaatagacaacaatcatgaatatgaaacacatatagcaaaggaaaaattaggagaggtagaatttaaactgaaaactcctaatacggaagtttagtgtattcctcatacaataaaaataaacaaatttaatagaaatggatagagattttattctccctcgggattgcttattgctgcgtaaccacgtgttgagtcaaataaagtcaacaacccttacagtaattataaatttcgtttactattatatgaatacgatcatgaaaatgttgtatttatgctaaaatatatcaatggcatatccaatttatttcacagtttatcgacactccaacatggtggcactggtttcgcgctctctaatgttcaacatggttttttttttttttttttaacttttgtaatttcaatttacgataacagtttaaaaaaaaaaagaaatttaaagacgaaatagctatgggttctaacttctaagttaaatgatgagattccgaatagttgccctatcaagtattataagagtgataggcattggaatgatatagagattttttttataactttcaatctttcatgacttcacactttagtctatattctctaactactctacaattttaaaaagtgaaaaagacaattagaaaataaacctgtggtgtttatatgctctagtgatactatatacccaactactgtaatttgtatcctatgggcgaaaagcctacgttaagaaataagcatgcgtttgatttaatatctctacaattattcaacttttattagcatgtttaatggtaatttagggctagggactatatagtctatatcttacagatgtaatatattgattaccaggtacagatcaagaacttgcgcttagctgtctatagtttgagatgataaatgaactaaaaaaaatgcaaatgaatcattaatcatcttcataaataaaaatcatctgttaagtgtaaacacaaacaattcttattttttttacctaatgcgttggaaacaatcaagagagcaaaatgatgatgtcaaagaaagaatgtggactgtaatgcttttgccttgtgataaaggttcaatggcttataacctaaccactgtctatatcttctccttcagagtatgaactgccagaacaccaaagaagatgagagacacaattttcgatttggattaaacagagcgagacaaagatcattgtcgaatttaggtttaataataccagaacaaatcatacataacagtaatgagtaatctcaaattctcaatccctctgaaagaactagacaaccttaatattcatcaccaataaagacacgatgaccaagcaataatttgtacacttgtaacaaacactctctgagacagaacaagttttgtgtattagctaatcaggtttcatcatagcttgaattccaaacacattgcagcatccatcacaaaaactgattatcaaccaatatcatctaaagactaatatctcaagcagaattctctataaggtatccacatatcaacatagcttctcaattcactacgcggtaatctcttcttccacgcatcaagatccggtaaatcacccgttaaagctaccgagctatcattcccattcccaagcgttagaacaaatagcttatctccaaaaacctgactcatcactctcaacgtttcctccataaccaaagctccatctctatctgaatcctcagcttccacacatttacctccaacattcaccataatcctccctctatatctcaacctagatttcaaatcctcccacacttgaggatcttgaagctctttgatcacactccctttactaaacaaatccactaaaatacccgaaaacccggttttaacactagcgttcaaagcatcaccaatgttgataaaaatcctatctttatgatctctttcgagcttagagagaccaaagaactctctaccaacgtcaatcacggaagggtcaagttcccatccatggacagcgatctcaggaggataaagctcaagaatcaatctagctgttgaaccagctccgaatccgagaataccaattggtccgggaggtataatcggaggcagagtagcgaaaacgtcgaagtaactatcggttaaggttttaagaaggaaagagatgctatggatgttaccgggattatcgagaaggaggagacgagaaccagcgagtgggtgattggtttttcgtgaaacttcgatgactctgatgtaattgtgacgggatttgaatttggcgatggttttgacgtcctctgctgggattccgttatcgtcggcggaagttttgttgcggtgagagtcggttcggataaagattggattttgcggaggttttggccggagattgagagttaaaggaggagaagagaggtttagaaattgacgagaaatgtgaagtggaggtcggaggtattgaagagacacaagctccctggccatgcctgttcttagttaccgggaaaatttcgatgaatttgggtgatgatgagacttcagtggtttgtttaaatccgttcggtttagtaacagcttcaatggtttaattttagggtctattgcaatcggttttcttcggtttggtaacaacaacttcggagaaagtaaaaaaaaaagaagaagtaaaagcccatattttttttaaaaagtttctttgcatttttcacatattctgattttctaacttgggccaaaatactagtcagttgtcactgttctaatcaatgcagcgttttcacagaactcaaaaggttgctgaaaaaacatcaaagaatcattcattcccctaacttgtttcttaaatctgccgacattatcatatggcaaaagagacaccaaaccatcaagctggtttaagacgatggaggattcacgtctggctctgggttatcgtcatccatttcatcttcaccggtagagtccctgtagattttaagagacatcaattaaattatttatctcctgttaagaagttagacaatgaggatcaattcaagtgttggtagatttgagtaggaggaaggtttttaattacctgtccgtagttgcgccaccacgacatgagtaaccatgaagaggtttatcatcatcgtcactgtctgattcataagtcgcagttccactccagatgcgaggttttggtcttgtctccatgtcatcttccggctaaggatttgagatagcagatttaataagttggtagtcaataggacagaacgcaactaaaaacatcaaagagagaaatggatgactgaaaaattacctcgtccaaaactcgattgactggtggtgtgtgctgaaactggacgctaggtgcgtgtattagtcccgaaagttgttccagcaacgtgttcctgaaatttcaaaaagtaactttctctaagttcaatatatcccattgacaaggctaagaaggtaagctactgaacatgtaaagctttcgttaactatttggaaccggcacaaagataaactcatatgttacatacagaattacaatctcgagggagcatcattagcatgttaaaattactaaattagagtggactagctagaagttcagtggcaactgaagtacaatgaccataaaaatggaaagtaggagatattaccttatcctctccatatctttgggcgtgtttaaattctccataggacttgggtcgacatgaagcgtataatctgggccgaaatactcaaaatactcattgtaagggagtttgttgtccggctctactccaacagcaactgcagtctgcgatgaggcaacagaaacaaacactttcaagaacaaaaacctatatgattatcaaaaaacatagaagaactgcaaaggagatggaaaagacctcataacaccagcaacgggcaacatttcgaatagtataccctccaccacccaacaccatgagaggaacgttgtaagatcttaagaaccgaaggcaatcagcgtgacccttgactgataagttgaagcaacccaaccgatcaccacttaaggagtcagcaccacactgaagaacaactgcctctggctgatacacttccataaccttctggataagaggtctaaacaagctgcggaaactttcatcgtccataccatcgtttagtggaacatttagagcatagtatttccctttttcagcgccaacatctcttatgtgaccagttcctgggaaaaagtccccaaatttgtggaaagaaacagtcataactctatcagtggtgtaaaacgcttcttccactccatctccatggtggacatcaatatctatgtagagaacccgctgcaaacaaaatttgatgaaagcattaagatgtaagcaatggaaacatcgttccacactcaatcaacattttgaatgatgctatcagaatacattaacaaagcaacggaatcctaattagagaaacttaaagaaccagacgatgaaaacaaagaggcaatgtagaaaaccattctcaaacaaatcaacatccttatcagaaacacctgatgcacttgacctaacatgagattctaaaggtaatatgcagtttaggaacatgaaaggatcaaagctcattcgataatcacacaaggcttcaaggtttcaggtagatttaagaaaaaccactcaagataagcttaaaccctaaaaatttcagaagaacatgaagaagttctctatgatgagatcataaagaaggaatggagcatttaccttaaacatcttgagcaactccagaatccctagcacgatgtcgtttacatagcaaaacccagaagcctcgcttttcttagcatggtgaagcccaccgccccaattgatagcgatatcagcgtcctgtctgtttaatttgacggcagcaccaatagaacctccggcggaagcacggcaaaaatcaaaaagtccgtcgaagacaggacaatcctcaccgacattgaatcgccttaggtttcgtgcagcggaaggatcgcccatagattccggcgaaacggaagcgaggaagtcaacatactccggcgaatggaatcggccgatatcggaggcgtcagcgaggctagggcgactgatttctaagcgacggtggaggtgatagtgaatgattaggctatgagccatacggatccggtgaggcttcatcgggtggccttgaccgtagtagtagtctccgatcgtcggctcgtagaagtaactgactcgccgcttacgtccgtcgggtcccgacggcagagagatgccgctttcgtctgcctccatctccgtctctcactcagaatctctctctcactcagagtctctctctattcccaagttttactcagagcaaaatttgtgtcaacaatgcctgagaaagtcattactaggagttgtgggcacagcttatatatacacgcacattaatgattacttacattattatctttgcgttaaaaatttaattttaataattactgaatgttaaactaacgatcgattatataattccaaattcgattcaaacatagcgaattatttttaacttgttttcctaatggtagacaatgttagacaaataaatgtaaagggttttttagctaagtatgatctatttacacatttcaccttaaggattcgtaactagatgttgttgggaaaaaagagaagatatacatgttctagatgttatagatgcttacatttgtctaaattctattcgcaatacttgaatctcccaacctaataatccacatccgatttttaaaaacaagtttcattacagtgttacggttgacttgagagtaaagtagtaaagtgtatttagttgatagaattaagaaaaaggcaaaatgtttagaaatatcatgaagaagaagaagaagaagcagcgaaatcagctaaatagttatatagtaaatgtttgttctctacgacaaagaacttctagtcgaaaccaaacgctgatcatcatcatcataattaaaggttttctcatagaatcaaaatgatgggattctctttaccaagtcctctttccaccgtgaggtacaaagtttgaagtcgatcttgaccgtttatctccaaacccaccaccacgtcctcctcctcttggcctgaagtttcttccaccacctgaacctgaacaaatcaacaaaattgaatcagatcctcgtaccaaaatttagcaagattgattgaactcatcaaatgagagaagagaaatgaggtttcacctccataaccagaaccagatgatcggactagtgcggagagagtaggaggtacaacttgaccagcttcttgaaggatcttgacaagctctctcgcaaacttagcattgtcatgtgtgaagaatgtaaaggccattcctttagctcctgcacgcccggttcgaccaatcctatggatgtaatcctccaatgtatttgggaaatcataattaaccacacatttaatgtccttcacatctgtaaaacaaaacaaaagaagaaagaaggaacacagttgagaagtaaatcatagactgagatgaaatgcaggaagaagaacagaaatttctttgtgtaaatgagtttggtgtttaaagcctagctaaggagaggatagagaacaagaaccccttatccctacaactgcagatctggaaagatcaagaaactaagagcaacacatttttcccaagtaaatgtgcccaccttaacttgcagggataaggagtgtttgggacggcgttataacactattaatgcatgcaggtgtcagtcgcccaggctgctcaaaaaccaatcagctccatgcccgggagatggatgcaggaaacaaattcttcaaagaagctccttttttctttctatgtgcttttttccctaataccagaggaaactgtggaaagcggcagccaggcgactttttttattatctttaaaaccccaagaaaacgaaatgctctaagtataatctctcctattgtgtatcacagttaatcctaccaagtccccttgctgctacatcagtggcagtcattatcgggcttcgtccactcttaaattctgccaagactcggtctctttccgattgggtcttgtcaccatgtatggcaagagctggccatccgtccattctcaattgtctagtcacttgatcacaccctctctttgtctccacaaaaattaggattttactcccatccattaactgtttaagtagtgtaaggagcctatcaaacgagaaaaaaggcataagtatcatatcatataagaaggcaaataaatatatatataaatcgtttcttatctaatgacagaaaaattaagaacctgttgtatttctctggcgtcggtacaatctcgattacttggttaatagactggttagcttttagatctgttgatccaataatggcctacaaaataacaactgttttcagtgcacaacataaaacatcccctactttattcaacaacagtatactcaatcctaataagttaaactaaatagcaagtaaaccttatatggatctcgtagaaactgcctggcaagagtttcaacctctcgtggccatgttgcactccaaagaagtgtttgtctatcaggtcggatctgtgaaaaataaggaacaatctcaagttctgaacaaaagccgtgatggttcttatttagcaacagaacaataaactgggaagataaaatctatcgactaataatgttggtcaaccaccctttccttaaagacactacatgatagctttggagaaagtacaaacatacctgagatacaatctttctaatttggggttcaaatcccatgtctaacattctgtcagcctcatccagtacaaggtaagtcactctcttcaaattagtgtgttgacattccaacatatcaatcaaacgaccaggtgtagcaattacaatctcaacacctgacaagccaatcatgattcataaactttgatgttccatccaagaaccagacatgaaaactacactattaaaaaataaaatacctcttctaagatcacgaatctgaggtcctttaggagcaccaccatagatacaagtacttctaacaccagacctcaacccgaatttccttgattcctcttgaatctgaacagctagttctcttgtgggagctaatattaacacaatggggccatcatcctgacctatattacaccccaacaatgcaaataaaaaagttgccggaaaaatgaatgcagcttaaatcagaatatcacatagtgctgtaatactcacctaatcgaggttgtgcactaacgtgaaccaatgctggtaacaagtaagccaatgtcttaccagagccagtctcagcaataccaatcaaatccctacccttcaacgccatcggccatccctgagcttgtataggtgttggctcagtaaatcccaatttagcaattgcttcaagaatgttatctaacagataaaaggaaccattaaactaagaacccaaattagatataaatgaactggaaactctatgaccaatccaatcaaaatacctggaaagttagcatcttggaacatcttcatcggcttaggaacatcacgaccttcaacggatatatccctctcggttctgtacattgcaacatcctgctctgtcatagcttgcacagtgggactctccacatagaaattcttctcaaaatgtacaagattcccaaaattctgcttcggaagagaaacactatctagctctcttttactcgatccgccacgtcctcctcctcctccccaattccctccgccgtttctatcgccgtattgaccatatccacctcttccaccaccgcggccaacagagaaaccgccactaggtggctggaaagatgggtaccgattatagccggaattatcaccggccattaccggagatggtccatatcctccaccaccaccagtgtaccgtgggttgtatggtgcggcggaaggatccatcggctgagacgaaccaactggggcgctaaagtaacacagagaagataagtgttacagatcgaaggaaacaaaaacgaagaaattggtcgattggtttcacttacccagagcgttggcgatacgaatttggatcagcaaatctacgatcatacgagctcattgtaacttaagatggttatggtttttgatctctcgctctctcgcgtaaattctactacgtaaccttggaaacgaattgatgctacagaaggaagatagtgcaaggaagacgacgaaaagccgcaaaaggaacaaaaagcttagattttttttttgattcgttttggacagtaaaattcccaaattagtaaccctaatttgtcccaccatttttctgttctttttattgcgcgaatttaattaatttcctttattttgttggtaatcagatatgggccatgactaaccacttaatgggctacaaattggacccaaacaattgtttaacttaaattattggaggttttgtgatgggggagtctattgctttaaacattttgccaacagtgtcgaatcaaatttggaaaatcttaaagttgcgatgggatttttcagacataccatctcatgagtcatgtgactacaccaatcctagtcataatacatattttctggaataataccatatactgtatgttattttctaactagtgaaaaagtatacatttgacttgacccataatgcacagtatttataaaatcgaatcattaacattacatggccataaggtcatacttgacatatttataatttcaaacataataatgttcttgcagcaaaaaaaataataaaaaaacaaaatcatgttcagagcaatcagtaaaattgatggtaattaacaataacattaacatggaagagactgccaagaggaaggtacaaatcagattcagcattcaatatttgattaaaattttatgactagttttctttgatgaccaaacgtctataatgatgagcgacttttaagaaagaagatttcttcaaaatggaatcaattaaacaaaagaatattccattgttggaaataacagaattgtccaaaatgcccatagaagatccaaggaattttctatttgcccatacgcgtaatatcccaccatgacatcactccttccctataaaacccatccatctgcaacctttcttcttggtttaagacaccaaaaacaaacactcaattataaaaagcttccctcttctctcccaaatcttcaaaaattcaaaaaaaactaacaatggtagccgttgattataccgagaagaacagtggaagcagtctcaagtttctatgcagttacggtggcagaatcctccctcgctccaccgacggcaagctccgttacgtcggaggtcacaccagagtcctctccgttgatcgttctatctctttctcaggttcgtctccacttcaatttcgtattgaaatcgattctatttccgatttcgccgaatctgagattgattttttaattttgtttctccagagctgatgaagaaactctatgaattctgtggatactccgttgatttacgatgtcaattaccaaacggagatctcgagactctaatctccgtcaaatcagaagaagaactagcggagatcgttgaagagtacgatcgcatctgcggagccaagatccgtgccgttctatcacctccgagatcttcgcataagaccgaatcttcgccgtcttcaagcggtgatcgatctccaaaatcgccgttctccgtcacgccttcaccgccaaattctccgtcgccggcgtatggaagatatctacaatctcggtattgtttaccttccacggatcttcctccgagaagatacattcagagagcggaagaatcgcattgctgctatgcgtgtcgtgtacacaaagactctaggctcgtttggcattgacggagattggggaaataatcgaatatacgccatagatacgaataccatgataatgacgaagaagacgcaattaaaggatttaatttagggtttttagaaatttttacgatgtgttgattttttgtgaagagaagaattaaaattttcctatacaattaccggtcggagacgtaaccgacggagaaattaatttagacggagtatataccgggacgttagtggccgttactaaccgttagagtcgccgttacgacgtgtttacacgtacgacgtttgtttttttgttaaacgtgatacgtggcgaatagtgagatcatctcgtgtaaatatcggagatgtgaacacgtgtgttgtccgtggattagttacgtcacacgtgtcaacctttcgtcttctggagtttgtttttcttaacgaggttcttttttattttacttgtttgataagtaattttttaattgttttctcaactttataatattcgattttttttgtctgtctcatcaggattagagaaggacatgagattactcacagtctcacacggagttcctttgtttattcgattcaaaattttgcccgacttgagaaaaggaccatcaaatatattaattaatcagaaaactattggaaaaagaaatgttagtcggcgtattttagttgacttcctaaatattcgcaacttgtgaatgggacagatggaggagtggagaactaaagaatgaataagttggtgagcaaattgtcccatcttaacttgaaaacttggaactccacaaaaaatatttgaagttgttcattgattatttcgaatcaaattttgaagtaacagtaccacatatttcttgtttttcagcattatttgttgaaatatcaaccaaccagcacacgaaattgggctttcttagcatttttatacatatttaaagtcagaaacgaatctcaaattattaattcatacaaccaatcatgttcttgttttttatgcttttggccaaataaaatttattcacgtaaaacccaactacatatgttttcgtttaaatttgtattatttctggtcaaatatcttacccgtagttggcatgtacaggccggtctaaattttgaaaaatgtcatcatcatcaaatcactacaatctataaaccataaaattcaatgtcaatacactaacacaattaacaccatgagattgagacaattaactacgaataatccactgactaaccttagggccaaaagtgaacatttcagtcgttcctaagaaaagaaaaaaacctggtttacaaagtcagaatcacagtcgttttatcacaagaagatttagataagggtcctcaagtttcaagccaatgccatcaataacccttgtgtattttcggcctcaagattatttatccggtttcttgctcaaactcttcaccatctgattcctctgcattatctgcatcatcatcctctgcttcattatcatcctcttcttgttcgttgttgacgactggttttccaattaccggtaaagcaggactcatctttctgatctcgttgcactgcaccaaacccaagacaacaagaatttacttagaacttgtcttaaaacattcataacaacaacactgaaactgacaattagctctactgatctctctcacttttgagctcccacgtctatataatcacacaatctaatatatttaagaagaacatataattagaggtaacaccaacacatcacacgacaaggagacatgttgtctaaagttcacaatggctaaattccaaatctgcaaattttgtctttgcttctttcctttcacttgctagtgattcaggaaacggaactagttttcaaacattggaaaacatgtaacaataaactcaaatccttttccatactaaatctagaaaccaaaaatctctccaatttaaactcgaagatcacccttggatctttatacattattacgggtctaaagctataagatgatagtccaatgaacacaaatgcatatatccatagagtctacactggaaaaaccactacactagaatcacaactcgacattggtatccactaaaattctcacttttgtactaacttaaaactcaaacataggacccaaaagaatatgttccaaagcagaaagattcagaaactcatattcatcttatcaatatgaagtagagaagaaagtgatctgcctaaaaccaaaatcatcaccacggatcgaaaaagattgatcatttacaaagtagaaaccacttataatctcgaacacaatcaataaatttcactcataatcagctcaacttacatgaaactaaagatctaagattgaccttttatgctgcctgtagtgacagtcgaaaactgaaaatttcctattcagcagattccgaaggagaacgaatacataaataaaaaagaaggaagctaccttttcttcgaactcagcttcttccatggcgagaagaatctcctcgttctgcggctgaggccattgtaacggaagcaaatacgatgccggaatcgtcttcgtcgacgacggaaattgggtcatcaacgtcggaaactgtaacattcttcttctcttcctttttctctcttaacgaaaattgatggaaaagtaaataaagaccaaaaacacagtgcatttattattgggcttttatctgtttagcccattgttattgggtaaagataaatataattttgactatgagtagggactaaatgttaaatttgggcttgtaaaattacaaaagcataatttgaaacccattgggccactccctaccttccgcgcgtgacttaaatttgaaactaactaacaacgtcttaaaaattaaaactctaataacaaaaacgtaaataggcatctgatcttttgattggtgatggaatagtaacattccaaatattttgattacccataaaacatcgaatcttgcgaattcatagtactttttgtattattttttgaaagctatattaacattttcgtttatcatttatggtagtatttatgtatcttgttttaggttttcgaaataaacttgttcatgtcaaaagaaattgaagaaattcaaacgaataaaattaatcaactctaataattttcttatatttcaccagtctactatcataatgaacatacttaattgtaatgtttgttagtatgttttctaaaatccactatttaacttgcatgccattgctgtttatatacggtctctaacccccaaaggagccaattatagataaaatactgactatcaattttgcaaatttggtggtgtgaatagttgtaaaggctgtacattgcgtaaaaaaacttagggtaaaataaaaaagcatcacatagttattttaaaaaggccaaacacacctttaaaaaggataactctttacacctttatcccacaccccatttccttgtgagaaagaaactatgcatgcgggaatataacaatacggctttgcttctcaatacaacgacataaaaactctctttataagactctcacacacacatatgttgatatgtataatacacgtctctaaatttgtgtatctatctacattacaatatatatagtttgatatcaatctacaattgaaagcatatatatataagtatgtttcttgcttcagttcttcaccaaaaacttgtgttcttaatcttggtttatcacgatgaaattgttgtcgatgatgatgatgatggaagctattgtcctggctaactcaccttgaggtcctcgattccattgatgacgctaaatggggaataagcattcctggtccgatccatttcatgtcacttaaatcttattatttcgtataataatcaaattcaatgttgttcaagtttgtattcgatgttttaatcacttacgtatgtattttctcatggaatgtatcgtcgaactaattattcaaaacgacctttattttgaaaggaatgcttttttattaattggaaattacaaacgaaaacaaacaatttgtgtccccaactatattttttggaccaattaactaatcactaaaggtctcatgtggagacttaataaaccttaaatgtaattgtcattatgagtttgaatgacgttatgctgagttcaatgagaaaatatggttggtaattggtagttgtgtgtcataactcgtaattaaatcacgccacaaataattaactcgatgctaattaagaataaaacctcttttcaaaataaacaaaattaaaagctttccatgtcaaagttgcttcctttggcttcttcctacacacttgcttcacatgtctactacactgactgactgacacaacgataaagtacacttatcgtgtttcttggtctcatcataagttcaatggcggacaatcgaagaagaagaagcctattcgacttcctacttttctccgtgtttctaggactcgcatgtctctgtttatctccgattccggcaacagctcaacgtcggaaactcaggttcagtgttaacggcgagttcaagatactacaagtggcggatatgcattttgctaacggcgctaagacgcagtgtcaaaatgttcttcctagccagagagctcattgctcagacctcaacaccaccatcttcatgtcgcgagtcatcgccgccgagaagcctgatcttatcgtcttcaccggtaagacccccaaattgaacaaaaccctaacttttcttctcgtgatttgaaaaatcttaactttcaggatgtttacataaaccctaattgtgaaatttcgaatctttttggggttttgtttcgtttcaggtgataacatatttgggtttgatgtaaaagacgctttgaaatccataaacgctgcgtttgctccagcgattgcgtctaaaatcccatgggttgctattttgggaaaccatgaccaagaatctacatttacaagacaacaagttatgaatcacattgtgaagcttcccaacactttgtctcaagtgaatcctcctgaagctgctcattacattgatggttttggtaattacaatctccaaatccatggagctgctgattcgaaactacagaacaaatctgttcttaatctttattttctcgatagtggagattattctagtgttccttacatggaaggttatgattggatcaaaacttctcagcagttttggttcgaccgcacttcaaaacgtctcaaggtacatcaatgatgaacatgatcaatcttgttttttgatcatgacattgttgttttaaccctggttttgatgatattgcagagggagtacaacgcaaagcctaatcctcaagaaggtatagctccaggactagcttacttccacattccattaccggagtttttgagttttgactcaaagaacgctacaaaaggagtgagacaagaaggtacatccgcggcttctacaaactcgggtttcttcacaacattgatagctagaggagatgtgaaatctgtgtttgtgggtcacgaccatgtcaacgacttctgcggtgaacttaaaggtttgaatctatgttatggtggtggatttgggtatcatgcttatggtaaagctggatgggaaagaagagcgagagttgtggttgttgatttgaataagaagagaaaaggaaagtggggagctgtgaaatcgattaagacatggaagaggcttgatgataagcatctctctgttattgactctcaagttctttggaacaattctgcaaacaaattagttgttcgttgatattgattccatgtgttgttgttttgatctgtctactaaatgttctgttttagttggttttgggtttcatagaaactgtttaagtgtttatcattgagttagttttaaactccatttgatgtaattttgtttggtttaagactttaaggcaagaaagtgaaaaactaaactttcaaacacattagagatgtgagtagtattatattttaaccgttctttaaacttttgattaatcgttttaccattttgtgttaccaatccgatccaataattaaaacgttttgtctatactttataaatttggctacataacgtttgattttggtgttttacagtaacacctaatcagtttataacaaaaatttgatttgtttggtaatacatgatttataaaataaccttgaaagaataatcaagtagcccgtatagctcagtggtagagcgtcagtcttgtaaactgaaggtccgtagttcgatcctgcgtgtgggcacctttttgtttttttttcccattttcatttcctttcattatcattgcgaaacggcgacgttaataagtttcaacccgtcgtcattttcactcgtgtttgacgagcttttggtttcttagggtttttgatctctgcaatggcgaatctaattcctagattcctcaggaacaagtcttgcttcaattcaatccaaaggcttactactactccttctctcttcacttaccagaagccctacttcaacaacaacaacaacatcgactctgttattgagaaacccgatccagtttcttttactaatcctttgattacactctccgggaatgaatccaatcaacctatgcggttttaccctagtttctccatggggttatgcttgaatcccaaaatgattcaaggtctggatctagctgaaacagcgtcgttggaggaggaggaagaggatacgaaggagattgtgatttacgctgatagtgtgaagaagaagaggaagaagaagatgaacaagcacaagtataggaaactcaggaaacagcttggtcgcaagtcatagattttttttactattccggtgagaagtttgctcctttcatgtcttctgaattactgggattcaaaggatgaaccttttttattgaatcagaacaaaaaatttctaaattccattgcattgtcattagtctgtgttcatcgtttgtcttgacaacacatttctaataaaacgtttgctcaattcacacactggtgcagtatgtctttatgattttgaattctataggatttgccaatttgctgtcttgagttttcttgctagttggatgctccaagtttgtttctttcctctatgcactaagctagcatgaattcttcatttcattatcagttcttagtgattgtataaacgttatcagtgtgtacttttcatgtgtcatttgcttggagacccgctaagggtatttaacctggtttgattgtagagttaggtgtcgcaatgagattacttctttaagctttaactggtgtactctggatcacatggaaccttagatgatatcttagggtaaagttccattgttatccaggtactgattcacaatcgcttttagaaattcaatgtttattgcagttgatgcggatggttggtatcttcagattgttatcaacttctatgtcttgagttagtcagttagatgaagaggatactgatgttctatttagttgtaaagctagaaatggttgtaacaattatcaaagctcaaaaatgcagaatttgcagacatagttagtgtgagtcatactagtctctctgtgttggcattcaaagacttgcactataaacttgtagtaatctacatcagaagagtgacattaatcttttccaagtttgattactagtattaatagattttattatcattcttctctgcttcaatagcgttgttgttccaagttccaactcttgagttttaattgcattggttttggacattcttgtttttttgtgattcgttcatttgctaaggctgtgtaccttagagaataatgggttatgatcttgaatctactagcaactgttcgttgcttttggatcatatcagttctttttctttctcaatgaaacagagcatttcttctgatttttagaccaagatgatggtgtttatgtagcttaaaggatttatatgattagttcatgtgtgacaacgttagtgattcatgtctactaacattcacacccgattactctgtttttttcttttctattgcattgcatatcttagttgaatttaatatatcaaataatgggaaaaaatctacatttgctataaatatctctttattggtactaagtactaacaaagtaataatacaacaaaatgtcgagaaacgtcagaagatcagagataaatatcttattcagtgctaacacctaaaactgaatgttaaagttagagctatgaatctctttcattccttaaccacaagaaccgatacactgtttacacaagagagcctctagaacatctctaggtcatataattctcaatcacaggaacacatcgtcgctcacaagtcaaaatatcaaacaatgcataattaatcgtatcactcccatgactctttacctccacggaacctgcaggatgcttccaagtctttgcttactccagctcatccaagtctttggttaaatctttagtcaccactcacttattctgtgtcattactcctgataagaatcttttttgtcgttcgtatgtaaacattcttttctttaattcatacgtggtcgaatctttagtcacctctatcgtcatgataagaatcattgttgtcgttagtattaaaacatcggtgactgcattgctccactactcagaaagctttacgggttgatattgtcatcttcttttttgttttttttcttcaaaatatgtaaaaataacaatttagaataagtttcatgttgaaactttagtgaatgaacttgctcgagttgtttaacctttttatgtcaaaactcgtgttataacatgaaaatattcatttccatttcaaaagaacaattcttgtatttgattttttttttattaagtgcattcatctggtagttaagaagtatgaactgaaatgtaagagtaattgacatccgacacgaaaccacattgcgtggttcatctgtcccccacgcgtctttcctttttccagtcgaacccaagtatgaatgaagaatttaataaaaatatctctgttttaactaattataagcacatgtttttttctaataatttgccttgtttgcttttgaatcctcaatcatgatcaaccttccactataccagtgactaagaccggttggtcaattttgatctccaatattgaatttctattatttccatcaaaattctcctttgtatcatgcatggttgaagctattgtgattgattagaccgatccaacttgaatctcatttagattttttgtgattcatatgcaaccaggtctagtcatataatttggcatgaccaatcaactacaaagagaataattattttgtttccatcttgtcacattactttagattcagtaatccttttgcgtttgacgttagctagtttaaaccggatcaatctgtatactttttgccacaaagtctccaaaaaccctaataccattttataaccaataatacatttctatataattcgaccgaccaaacaaaacgacagattcaaagggttactcattgacaagtttaacccaatcaaccagtccgagagacaaataacaaacaaataaaccttccgactcaagtaattaatggcttctaacaatcgctcactatataatctaataaaaacacatatattgtatattcacattaacttgttccggattctgatcaaatcttctgcttcttctttaaataacacttcactttttttcttctttgattgagacaacgaagacatggctttagcagacgctactcttctcaccagaaccttccacttcgtgtcctcaaccattttcttgtccttttcacctctattcttatattgcctactccaatcaccaaaacaaataaaaagttgacaacgagatcagattctcatttcttaaaatatcttttaataattctaccaaacaaaatatttccagccgtccgatcacgactcatcatctaataagtaggctaccaccacaaaaagataattattattggcgccgaaagttaaaaaaaaatcaaatgagatctactatcgaaaagtgaaaaacttttatcattagaaacatttaaaatgtggttttgattattctaaaatgtcggatttttacctgcaaagagggacacggcaagattcagattggtcacaaatcgaagaatggagtctaaggagttgaatcattctcttgcatcggacacaacctttgccatcgactcttttcttgcatactgcaaagtgacgtataagaagttgaagtccgtaacaagtcgaaaacgcactgcatggaccgggttttgcttgacatgttgacttgttgtctaagttagacgatggtccgaccagtgtgcaaccttcggtgcatatgtgttctatacattccatggcttcactcagctgcaaatacagattctgttctcgtctgtgtctccttcttcttttcttcctctgcaagaaattgacccaaaagaaacctaattcaataaaacagagttttcttgaagaaccaaaaaaaaagaaaacaaaaaagtgtggtttgagttaattaccgattctgcatcgtcgatgaattggagaatgtcaagttcaagaaaaggatcgtgttcttgaagaaacttccatccttctgtctgttcaacggtcttgaacttgtagtgaatgaatcgcatacacttgagacagaggtcaggtgcgtcgcagagacgagccagctggagaatatcgacaacgttttcggcggttactctctcaccgacgcctttagtgcaccgttgctttaactgagtcaccatatacacgtgtgataaagccagtagatggattccgtatttttccatctcattctccgtgacactaaacaaaagatacatataggggtattctagtcattttgcatactaagggtaaaatttgccgttgatttattcaaatttgatgttggtactagtttcgtgttccttgtgttgtgtttcacacgtttttgaatatgaaacaagtctaaatcaatcgcaatctggttgtagtgattttaatgtatgattaaaacgttggaaaagtcgagtttggtaaagatctttaagatgatgtatttaatcaagcattctttttagtatgatttgtatttttgaagtaataaatctacggattaaaaaaaaaaatctgacgatcaagaagatatgaaaaagagagaaagacgaacctcggagaatagaggaatctgacgaagactgaaacggcgtcgcatggaacaccgagaatcttaataactttcttcgatgatccgccgtgaatcttcctcggcttctcgatgatgttcgtcagtaccggtgagaccgaagcctgcatttaacaattttaaacaaacaaaaaagataagcaccaaaataaaaaaatattcgatcatacaaagaaagtaagaagaaaagaaacttacgaggatgccggagtgtgccggaatactacgacgaccggaggtgatgatctcaacatcagtttccacaagatcatacgaaatcttattggcgtttagtgaaacgccgtcgttttgagtggcggttatagccatcgttttaagttttcagagagaaagagaaagagagagtgttggtaaattttgttgttggaggctggagggttttaatttgatgatggagaagcttgagggcattgcttctctggattttatagacacagctcaacgaagtctggtcctttttgattacttgttaataacacgtggcatttttttatgataaatatcttgtttttgtttctgttttaccctacgcgcctttgtagatgcgtgtatgtcaattaatctctgtttttttggtaaccagaataattggaaataaaagtagtgaactgtatattcaggagttttggggtctcagatctgtatttctctgagataagttatgattcattgataaataatttgcggttgtctttaacaccaacccaaatgcaagtaattggctatggtttttccgttttgataaatagataatcgtatatatagacactaagacacagatacaattagttgtatcttaatctatacacagataacacccagtatttgagtctactttaaaagcatatagttacatgttgttataaatttttataaactaaaatgaaacagaacttcttgcttacaaaatttgaagcagaaaaactgaaaatatactactgtttgacagaaaaaaagaactaacaaatgtgaacaaacccaacaacaaaaagcctatgtgtacttatctcatttatgtttatattggactaataaatatacaaagcacaatttaaaaaaaaaaaaatctccagaagataagttcaattttattttcctagtttgaatagtttgaaaatttaagtctgcatatcatttttggacccgaatgacatattttatttaattagataaatatattttctccattcagagctcatatcatatgttaaaatctatgatcagttacattcatcttactacgcttagatatgtataaaggatttggtgatgcagcttattataaacttccctaggactaatatgcctcaaacattgtcaaatagccgcagtgccccctaacacaacatattctataatacattgtataacaaaagtattttcttattcccaacctgatataccaacaggatctaacctatagatcattacaatatattatgtttttaaatggacctttcgatacaccaatgtcgactatattttattcccaacattacacacatatattaatactttccactgaaagtatctagaaataatattgcctttggccctttgtaatgtttgggatgacaataaaacaagtaatgtattttacttttggtaccatgtaggatgtttgtccccatgattcatgaagtcacgaatgtttatctttttttattgatcctacgtgggaaaagtgataaaaccggtcaagaaatttgcctttgtgatgtagaaaaagtgctgatagtagtattattctaagtttgagaaagggtggttattgaagtaaaccgacccttgcctcttcccaagagcccacctcctcgtctacgtggcttgttgatcctcatccactctcaagccctcttgtctatccacttgtcattctctcatttatccatttctgccactggcctttgttaattgtggtttaagaatgcctgaacatcataggatgttgaagaacttatcgaagaatgaaataaatttcgccgcatatattacacgtggcaaatctggtagtctaggccaatatggcagtcaagcttaaccattaacatcatgacacgtgtcaaataagagctttatgttgcgcatcaagctcttaaacgaagtacttaaacgaattcagaatcagttccaagaaatttcaatatccgtgttgacatttaacaactagtgtagacatctcataaggccatataactattctaagtttctaactattggaaaattaatgtgttaaggtttcagagtagtagtttatgtacactttttagttttataacattttattataagatgtcgggggtgttttcctttcattaactctacaagtatatgtatattcgatatattaatcatgttgttgttataactttaagtattcacaaatggctctttaagaaaacgaaacatcaaaatccaaaacttgtggataagtttcgacggaagagaaaagtgaaaagtgttaataaactaatggatttgatgatttcatgtaagattcttcccaacacatttaagggtttagaaattaaaatattactgaacactttctattctaaaattgtttgtattccacttgaactctgaagcactggagattgatgtgcatgtttatactccgatcttatcctttgagtttggactttggatatatattgcccatttatataatgcaagtagccaagtatgaagtatcatgaatcagcgatgtacttataaaaactgaaaacagtagatttttaatgtttttaattgtgtgtatagtctagttggagaaagatgtatattagtgtatatttccatatacattctccaataaataatttttatggtttgacataaaagtctaacacgaaaaaataacatgctcaacacattcagtttaaatatctagtttttttattattattattgttcatcaaatatgttaccaagattaaaattttaatttttacaataaatggttgactaactcaaaaatcgggatgaccgttgacctgaccagcttcccatggtcttcggagccaaccctaaccacacgttgacgaggcgctgactcggaatatttagaaacttatcttcttcattttttttccttctaaacatttatgctaattgcctaattggaaataagtttgtattttctatttggaacacaacaaagtaaataaattaaagtagaacaaaataaaacagatctttgtgcggctcacaaattctcaatgtggcgtggcgggtagttttgtttggtgctagtctagccttttaaaataatctttgaacttggtcaaactataaacaaatttgtgggcttcatgttgattttatagaagctgtgtgcagtttctaagtaagctcagaaacaattgggtctaaaacctttcaaaagggcccaaaaatagaagaaaagatttaagggcagtacgacctggaaacaacgattgtgtatgtacatggaggcactatatattgaggtgttttaatatataaatagttaagatgtattcattgataagataatcataagcaacatgttacacttacaagaataatatatcttttatatacacataaatagaataatcgtcgaatagacaaagacacccaaatcaagcgaagctttgttgaatttgttggataatcggaggaataattgtctgataagctttctccgatggatgtgcaatgtcccaaaacacataacgagacgcatccaagcacggtatgggagccgccggagcacaacaacaaggtctagttggcgagataaatccttaaaaaaaaccaaaaatatgatcatgaaaaattgattcacaagaattgaaaattttatagcagtaaagattttggtgatttagactttacctgatcttagagggtttttgacaagttcgaggagaggattatacatgtcgacgtatatcgaacgagaacctgggagcatcgagttgaggttgttgacttcatccgctaacttcctattaaagagtctagccactgcgtttgcgggttctagacataaacctccaagagcattgcttgctcccggcaagcaacccaatggtaatgttcccataatcgcgaattttcttgctcccaaattatataattcctatatcaatattgttttgtccataatggaatttaaaattttaagtcagagtatgtaactttggaattaactttgaaaagtattatacctttatgaatgattgagtccatgaaaccatcaagtcagtgtatgaaaagatagtgtatcgagtgtttcttatcggatttgtgaaatatgtgatggcaatatcgttattcccagcggaaatgacaaaaactgcattcgatatgattgatcttgttttctcttcgtctcctgtgatgctattcagctttgctatgtaagctttgaagtcatttaactggtctggtacccaaataactccctatattttttttttaacaaatatgaaattatattagtcatttttaattgttagatgaaagaaattcaaagcacattatcttaagtttaataaccgtacctgaattctggcggtcattggatctaaaccggaaccaccagaagcaaaactaacaccggttaagatatcattgggttcaaggaatggactacgataagctggtacaatattctttattcccaaaccttcggctgcattcatttttcaccccaccaaaaaaaatagaatgatgaattcactttttaataacaaaaaaaaaacgtgaaaatgattataactcttaaagaaattaccaatcaaatctgtaggaattcttccattgccaaatcttcctgtggctcttcgagttacaaaatctcttccatagggatagaaattaaccttagttagagtcatgagataattgttgttgcctgtatcgagaattgaatctccgaacgctataaccgcgggaatatttccggcatgaacgatagaaactgatataacagagactaatactattgtggtttgaataactagagaattcatttcaaaaggcattgatatattcgtttttcactcaattcaagatgttttaccattagagtaaaatgagattaaaggtgcttcattatttatagacccgacgaaacatagctgttatggttagtttttgctgttactgaataactatttttaagaggtccatcgaatcgaatttatccattgataggtttttatcgctcatcttgattttttagagaattatgttatcctgttaaccattagctgtgtttgatacgttactatagttctgtttagactgaatgctaaaaatgatacctttcccagtacgtacacttaattctatatgtattaagtataatatggagatatatgttacatgcttatatatagatgtacaaaaaatataacatgcgtatatacatgtgataatgtgagttaataacaagtcatttaataaccctcatctgttttatgataagtgtcattttggcttatttcacatatacagtattcagatttttctcaatatacaaacatatctctgtttgacatatcactaattaaatcatatactaataaatgcaaatgttattagttttaaacaacgggtaaaactggaatttggtttgaaaagtcagcatcaaaaatattacattcagacatgaacgacttcctttttgaagtggagatttttgaatatgtcaaatgagtcaaaatgacaaattttttataaaacatatgaagtatttaaaatgactagctaattatatatatgctacatatttctattatgtttatacatatagaatcaagtgtacattagggatcaaaaggtatcgtttttagagttatagttgtaattaagttttaaaccgagtgaaataactctgccgacacaacgacaagataaaatgtaataaactcttcttcactttcccatcaagattattacattagctttcaagtgctagtttcattatattatatgtatatacacacatgcgcacacatacacgttgatgggctatgatcaacaatgagaaccccttttgcagctgagtgcacccgaggctatagttatctcaccaacatgagaggacggtctcgcggctagactcgaagcttttgaatagcttgatgatttagctggtccagcaccagaataggtgaagaatgcaccattaagcagtagatctccttcagatctccaattccaatttctccattcgtcttccggcgcatcctcgtgctttgttacctatttccccccaaaaaagacataaggatacaatccaagaactttgaataaaattaagtgaaataatttgacacatagaatttggttaaaattgaagaaaaaaaaaaagtttgtgaacctctttgctagatgagtcatcaggagcaagaaaacggttgccttgagagttgatggtaggattagcacttcctccaattgcatacatttcccaatgtgtatagtcattgttcaccacatggaaatatccatgtctacacctatatttatataatttttcatttaggttgttaaaatcaattttcatgttctacttgtagaattcatctctctgaattgatctacatctaaaaataagatattaacaaaatgttagctcaactaaccaactattattttttcagttgatttagacatagctagcatacttatttcggttgatccatcttagatttattaaagaacgaaacgtattaaagtttagagcagtaattgtatcttggctttgttattttattttaagaatatgtccaaccgacaatatacttgacttttatagttggtgacacatatatccacaaatataggtatactaaataaaaaattctgttttgataaaataccttggcattctttggacgaggccttctccaaaatggttaaaagcgatagtgacttgcatgttcttgtcttgttcgtacgtatcactgtgtcccaataacataaccttattatgatgcgtcaaataattgttcgagatcgttatagccgttgatccacgaattgcatcaattaacccgtcgttgcaattcgatagcgagcaatgatcaacccacacgtggcttccaccgaatattgacacaccgtcaccgtcggataccgttctatatccgtaatgctctggtgagtcacgtacgtaagtattcccaccttgcttgcagtcatgtatgtgtaaaccatggatgatgatgttggttacatattgtatggttatacatggcccaccggagatgtgtacggaggctcctcgtccgtctagggttttgaaagaattcatgatgagttcttcttttagttggatcgtcatgtctcgcttaaaaatgatccatagcggttcatcttgaatgactgcgtatcttagtgttcccggtctagggtttactggatcatcgtttcctggatccgtgaccacatagatttcaccatcacgaccgccaatagcgttcttgccaaaaccgataccacagtctgctaaccgttttcggtttttctcccaatccttgtcgcatcgccaacaatcatcgattggattaccactcccgcacgagaagaaccctagcttccttcttgatatggactcgtttatttttctaatgcattaaccaacagacaatatattagcattaattaatcttgacgtacgtaattaggcgtactcataagtcatagctattaatgcagcaatagtaacaagtgagtttgtgatcaagatcaaaattagccttggatagaaagaacttggaagcaatatctaataccaaacatttgactatttgagtgtatgtaaaatgcttttacatttttgttagaacatatacctgtgtacttcctcgacaacaagctcagggtcggaaacgggcaaagacgaagcgagagcggagaacaaaatgcagcagaaaaagataagtgcgaaggatagatatgaagaatttagcattgtgtttctttggctttttgttgttgataaatttgaaggtattaaaagagaattgggacgaaacatatgagtgaagagagaaagacaaagcaaagcgatagactatatagcatatgaacacttcgggtgatttattgcgcatgcaacttgacgttaattggacccaccttgcttaacctttttcctcttcttgtgaaattattttggtgtgtgagaatggaatcaacccaagtcattttagagaagaagaaataatgcaaaatgtttcctaagattcaaatttcatgatacctgataaaaagtgtttggctgaactaaaaagtgttgttcagaaatgtaattctgatcaagctaaacggagctggttatgatttaaaaacggaaggagtaatatcagccatcattacaaatataattggctcaacagttctaataattaagattatcaaaccgatagcacttaatactgtattcaacattcaggtaacgctaggaatgagtcacgtggcttaaagaaaaaaaacacagaactcgtaattaaaatctcaacgaacttaaagctgaatgttggtgaaacactaagtacggtgcaccaaaagtcaacactgtgttagtaatgtactttagtactaatatttaatattacggtttaatttttgtacctttatcattacttttacgttttaacggttgaatattatcaatagcatagcagttagctcaatttaactgattttttttttttcctttttttttttttttgttaaagctcatatagtaaagtattacatttcgagatactttagtgtttctgctatctactaaaccatattttgataactaaacgtatatggattgtaattgtaagaatacgatatttgatacactttgaattgtttgataagttggttttagagtgtttgttattattattatctttatacaaaatgaatttcttttggtgtctcaaagagatattgcttgcaggaaaagagaaaagaatagacccaccaaaagcaatagaataggagaactgagccgacactggcccatagaggtttgattttgggaccaccgaaccatgtgctcgagtccaatctttcaataaattctacacatataattttcttaaattcatataacgtttttagaatagtagtgtattcattcatatctaacaatcagaccctatgttgaaattttggctggtacaaaatgtgttgacaatcaatgcacatgggaagtatttgcatcatcactctatatcctcctcctcctccacactttaaaaagaacaatgtctttaaaaacttaatcaactattcgattacaagtctcgccgacatttttctttttgctagagccattcatgttgatgaattttcacttcgggcaaaaatatggatcatgagtttaagtctagttttttttttttaaattactgttagtagcaaattattttatacattaagcaaattgtgtattctggtacataaactgcagaaaacaattaaatgacatttctcactacattttagacagttttggacattcattcgattagtaaatgatttcgttctcgtacgtgatgaaacacgagaaccgatcgacattaatgttcctttttcagaatattctcaacgctcaaaagctaatctatatacatttttcactactttttacatgattcatagaatacaaaaataattgaacgcatttgaataagtaactaaatatagagtatgataatatctaattcaaccattttaattattgactacattggcttatcaaactgaaacttgatcatttggataagcaaacttaacaaattaatgttttgaacaaatgctcaactttacaagttttttttgtcttctatacgaaatcaattcaagtttcatgacattgtcttgtgaaaaaaaaacaagaaaaaatgtagagaattgacctttctataaagaaatagagtcgttagattggatttaaggtggtagatataaagaaaaccgtcggatcagaaaatagagacaaaagggcatgtgaccggtttttgcttgaaaactacttgctaacttcttctctactcatttatcagtgttataatttttttgttttttttatacacatagtacgttcactaaaataacaatttaaaatgaatattgatataatttagtcataataatttgaaaaatataaaatacaatatccatatctgttttaaaactataaacatgatggccatgatctaataatatgattccatgaagcataaaacttttattaacgtagtcaaccattggatattgtccagcccaaaatatctaattcaatgggccgaacctacccaatacagcccattgttttggattaaaatctttaaaaaaattggaggctaaattaaaaaaagaaggaaatattctaagccctccacgtattacgttgatgacgtgtaccatcgtatataaacaaatgcacaaaactttattatattgttgtaaagtagtacttttattggcgatcctcatccatttcctctctcgtcgttgtctgggaatcggtgacttttgaatctttgcgactctcttgtagtgataaattgatcgttatctactttgatactctccggtcgtttttctccggtgctggagatccgattccttatcttttctgtcttggctcgagatccgagccaagcagtaaagaagacgactttgtttcacgatttggaatttgattcctgcgatcacaggtatgacaggttagattttgttttgtatagttgtatacatacttctttgtgatgttttgtttacttaatcgaatttttggagtgttttaaggtctctcgtttagaaatcgtggaaaatatcactgtgtgtgtgttcttatgattcacagtgtttatgggtttcatgttctttgttttatcattgaatgggaagaaatttcgttgggatacaaatttctcatgttcttactgatcgttattaggagtttggggaaaaaggaagagtttttttggttggttcgagtgattatgaggttatttctgtatttgatttatgagttaatggtcgttttaatgttgtagatggcatcgggtgagggaattttgacggatggacagtggaaaaagcttgaaatagcaactcataattctggaagtttgtcatcatcgcctaaatctcatactctctttgctgatctgaacattaagtctcccactggtggcaaaggaccagttgctgggattcctaataggcatgtgcgacgtactcactcagggaagcatattcgtgttaagaagggtattaaactttcttcaaccttttgtgcttgttatttggctaatagatccttttagggagtgatatgactctttattagttcctttcaaatttgctttagtgaaaagacttaagttttcagtagaagagttcaagtgtgtaggtgatatatggtttacttatgtggcaatgatatctgcagagggtgctggtggcaaaggaacttggggaaagcttcttgacactgatgatggtgactcctgtattgataagaatgatcccaattacgatagtggagaggtactttcatatttgcgccttttgttttgtgttggatacttttccttgtttctttagtgtatctaacatcccttgattttatcttttattagtagtttgcttttttcattcatatactcaatttaacaggacgcatatgatggacttgttgattcaccggtatcagacccgttgaatgattacaaaaagtcagtagtttccatcattgacgaatactttagcaccggggatgtgaaagtggcggcatctgacctcagggaacttggttcaagcgaatatcatccttacttcaccaagcgacttgtttctatggccatggacagacacgataaggagaaggaaatggcttcagtgctactctctgcattgtatgctgatgttattttacctgatcaaattagggatggatttataagacttctcagatctgttgatgaccttgcggtggacatccttgatgctgttaatgtccttgcattgtttattgcacgggccatcgttgacgaaattctccctccggtttttctggttagatctaagaagattcttccagaatcttgcaaagggtttcaggttattgtaactgcagaaaagagctatctctcagctcctcaccatgcagaactagtggagaagaaatggggaggtagtactcacactacagtagaagaaacgaagaaaaagatatctgaaatcttgaaggaatacgtggaaaacggagacacttacgaagcttgtagatgcatcagggaattaggtgtctcgtttttccatcatgaggttgtgaagagggctttggttctggcgatggattctccaaccgctgagtcacttgtactaaagctgttgaaggaaactgctgaagaaggactgatcagttcgagtcaaatggtgaagggattcttccgagtagcagagagtctcgatgaccttgctctagatatcccatctgccaaaaagctgtttgattcgatagttccaaaggctatttctggaggctggctcgatgattcatttaagataacctctgatcaagatggagaaaaatcgagtcaagacggaaagctaagacagtacaagaaggatacagtgaacataattcaggaatatttcttatcagatgacattcctgagctaatccgcagtcttcaagatttaggggcacctgaatataacccggtgtttctgaagaggctcataactcttgctctagacaggaaaaacagagaaaaggaaatggcttcggttcttctttctgctcttcacatggagctattctcaactgaagatttcataaacggtttcattatgctcctggaatcggcagaagacacagctttagatatcatggacgcatcaaacgaacttgctctgtttttagctagagctgtgattgacgacgtcttagctccacttaaccttgaagatatctcaaccaagctgcctccaaaatcaaccggaaccgaaacagtccgctcagccaggtctcttatctccgccagacacgcaggagagagactcctaagaagctggggaggtggaaccggctggatagtggaagatgcaaaggacaaaatctcgaaactcctagaagaatacgaaacaggaggagtaacatcagaagcttgtcaatgtatccgcgatctagggatgccttttttcaaccacgaagtagtgaagaaagctttggtgatggcaatggagaagcagaatgatcggttactgaatctgcttgaggagtgttttggtgaaggattgattacaactaaccaaatgacgaaagggtttggtcgtgttaacgacagcctcgatgacttgtcgcttgatataccgaacgcgaaagagaagtttgagctgtatgctagtcatgccatggacaatggttggatccttcccgagtttgggatttctgcaactcagtgattagtggttctcttatcagtttcttgtgtttgtgcttacgatactttcctcactatctacatatatgtatggattcagttagtagataaacatgagatgtttatatgttcatgtgtttctgtctggttgttgtgttttgtctttgtactgatatcttttagtgtgttctaatttctgatggatttttgttacattgaaaataagttattagcatggttaatttgtgttaacttattactcttgtgatattttatgaaaattatttataaatatagaaaatatggtaattaaattataaaaagataaataaaaatatatttgttcggtcggtgagataattatgactccggttccgggatagagcaaacaaaaggatagaccaatactcgttgccaaacagctttatcctcgtttttatatttgttttgattctttcttcttctgctcaactttactgtccggcgtactcagcaccatcaatggaccgcccggagacgatcgccgtcaaatgcgaacccatgaccgttgactctccttctcgacctctaaagcttgtagttttagctgaccttaatttcaatcctcctgagactgatgatcttgactcatccattccaatccctactcctcctcccatcactaggtacttctacatacgtagttgtgtgtgtttcagctaattaacctatttctttctgttgctttcgactaactttcttttgctgagatttttttttcctctgttcggaagaaacatatgtttgaagtgacatttttgttacggggttgaatatattgatgtcttcttatgccgcaaaatctaaaaatcgagactttggatatctttcagcaagagtctaaaaatggggaattttttttttgataagtagagtttgattcttactgctttgggggataggagaagcttcatgattcttaacttaaatacatttttgtgtgttttaggttgagtaacgaggaaagtcatcaagagggaggtatattaacatgcaaggaggtggaaccaggagaagtagaagccaaaaagatcagcaaggtgggaaaatgccgctccagaagtaagattgagtcttcctctgattgtggagttgatgcagatggtgatctggctaatcaaggggtccctgcatcccgggaagaaaaaatcagtaacctcaaaatggtgagtttattgactcatagtatcgtagaaagtgtgcttggtcatattggggctaggatttcataaagttgccaagaatgcattcatcgttaaacatttggagaaagaatgatgatggtcctcttatattcataatgctcttcgcagttgattattggtctaattttcatgatgatgatgctctatataaattctgattttccttctctgcttatagggtttgattcatgttgcaaggaagatgcccaaaaatgctcatgcccattttatacttggtcttatgtttcaacgattgggccaatctcaaaaggtacgcttgagctgagggtactctgatgtatcttagaataattatcatcttagtgattttaactgctaggaggttttaggcgataccagaatatgagaaagctgaagagatcttactgggttgtgagccagaaattgctcggccagaacttctcttattagttcaaattcaccatggacaggtgatgatctttgtgtctgaaccaaatttcatatttgaagttcttgtattcgagagctccttagtttattgacaattcactcgaaggttttaacattgtacacttgaaaacattttagtgtcttcttttggatggttttggggatactgactctgttaaagagcttgagggagaagagcttgaagaaattctttcaaaattaaaggattctataaagttagatgttagacaggcagccgtgtggaatacccttggtttaatgcttctcaaagctggttgtttgatggtaaatttcctcaccatgttggttgattatcaatgtcattccttttgttatatagttttgctttgttaatttgtagagtgccatatcagttttgtcatccttgttggctcttgttcctgacaattatgattgccttgcaaaccttggagttgcttatcttcaaaggtgaggagttttcttcccctctatttctaactattatcgtgatacttcactctaatgaacaagtcttccagtggcgatatggagctttcagcaaaatgttttcaagatttggtactgaaagaccataaccatcctgccgctttgataaattatgctgccgagcttctctgcaaacacagttcaactgttgctggtttgtttcttatcaaagaacctctaaattgtttgctcctctcaatctgcctaagcaaagtacacatgaaaaaagtagagggaaatctatcttatgtaaactgtattttcacttgtaacatgtgaatgtattttcaattgatgtcaggtgccggggctaatggtggtgctgatgcttctgaagatcagaaggcacctatgaatgtcgcaaaggaatgtctcttggctgctctaagatcagatccaaagtctgcccatgcgtgggtgaatcttgctaattcatactatatgatgggtgatcacagaagctcgagcaaatgtttggagaaggtgctcttggctcacttctttgttttgaggttgttcattgttttccttatattagacagaagggtttctattacttgatttccttttcaccttttctcgaggcatatttggtacttggtgaaaaaagtaatgcaaaataagtatgaggagtcctgcatatcctgcccattcttcatattttaacttgggatgataaggatggacgctgttcctctgaatgggttgggggtatcaaccacttatctgatattggaccgactttctctcttttaccaaacattttacttgtggttttgtgtccatgtttcagtctctattgcaataggcataggttcaattaaaaatgcatatgagaaagagactcgtgtagcttaattataccctgtccaaatgatccattcgaccttgatggtggctgttcaaaatgtaaccctggttctgtgataataagattctggctgtaaactctttggcttatactgcagtcttggtatggttgactgacttgacctttttttgattcaggcagccaagcttgatcccaactgtatggctactagatttgctgttgctgtccaacgaatcaaagatgcagaaaggtctcaggatgcaagcgaccagctttcatgggctggcaacgagatggcttcagtgataagagaaggagaatctgttccaattgaccctcccattgcttgggcagggcttgccatggctcacaaggctcagcatgaaattgcagctgcttttgttgctgaccgaaatgaattgacagagatggaagagcgggctgtgtacagcttaaagcaggtatgccgtttctgcgatttgatgcttaagaagttagtttcagatgttgcattcagataataactagttgggtagaataggaagaaagctgaagactgatttccttaaataagtcattggcacgtcttctggtatggtcacaagtacagacacacatagataatgaagagatattttcgcatcgaaaatgttttcatctcattatcctctttttattcacgttaggcagtaacagaggatcctgaagatgctgtccggtggcatcagctcggtcttcatagtctctgctctcaacaatataaactctcccaaaaatacctaaaggcagcagttggtcgttctagagagtgtagttatgcatggtcaaatctcggtaacatcctcttcgaatcaatgcttgcagattaacctaattgctcaaactgcgaggagaaaattgatgattccacaatcttaagttcgttgcatgactcatgttagattcatttgttggctttaggtatttcgctgcagttatcagatgaacattcagaagctgaggaagtatacaagcgagccttgaccgtgtcaaaagaggatcaagctcacgcgatattgtctaacctggggaacctctacagacagaaaaagcagtacgaagtctcaaaggcaatgttctcaaaggcgttggaactcaaacctggttatgcacccgcatacaacaaccttggactcgtgtttgtggctgaacgcagatgggaagaagcgaagtcttgtttcgagaaatcccttgaagctgattcattgctagatgcagcacagtctaacttgcttaaagccacaaccatgtcaaggctctgtacttgcttctcttcttcaactgttgtccgagattcttgatgctctgtaatacttcttgtttcgttttgtggtttcacaactctcacattatgtgccttgaatagtattaagtacaaagaccataatatcgcgagaggctttgaaaactttgaatctagagaaacatttgcttcctcgacacaaattgaagtttaatttgtatctatcctgaattaatatagtaaagacaaacaaatgtaaaatgttacaaagaacaaaactgtttcacccacttgaggaaaagagaaataacttatgatctggagaattccccagagctatccattattagtacgttgccaaatacaaatcagaaaggaaaaccaaaaaaagaactcactcttcaaactccttcctcagcccatcatctacacagtttcaatggttacttcaagatatgagatatatgcagatcatgtatatatagcgatttaatttaccttgaagatgtctccaaacattccttgcaaaggattcttacgctgcacaccataaaacctctctgcaatctcgtccagcaacttcaaaatgtaacaaattttccgggttgtcatcagaagtgaaaaagaaacatattgaataaacaaggaacaaaacatgcagagaccaaacaaaaaggttgcatattgttgaagaaactagggaccagtaactagcaactgtatacctcgttaagcagctgatctctatctatgcttgacttatattttactcttaacatattgaaaagaggtaatgcatccctctgcaacctgtattgggcaagaaatttcttaaggtaaacaacaacgagcagaaaagactacaggaaaaagaatatctaagtaggtaactaacgtttccagaagatatgagataaattggataaggtccgattctgaaagctcaggattttttgtctctgcttgtttcttaatctcatccatcataaagtttgcatctttcatgttacccatggataaatacctatcatgcaaaaaaagaaaaatcaacctctttggttcctttcaaactctgctatctctgtatccaattataaaacatgaacttacatgagaactgctcgtgcaattgcgaggtcatcttctccgggataacactgtaaggttgtattcaagtaagaaaccccatatttttggccacgagaggttaaattgaaatccagacatttcttgaaattctatcccagtggaaaaactactctacactaaaacttaggaataatagaaaatcaaagatgagacaacttgaaacaaagagactgacccttcccataaagttgaccagcatagatgcaaatttctcggggtcctcagctctaacaaaatgtcgggatatccggaccatatcctgcgagaaatatataaataatgaagaaagataaaacgtataactttataatcaaaaatggccacaagaggattacaagttcaggacactcagtgtagagataatcacccagcatagcatgcaactcaggatagccagtacgtgggcctccaaattctgcagaccatctaaaagaaagaagaaacagcactatgaaatacctacctgacatgttcacacaaaaactatggaaaataccagttgaataagtgaaataatacacatgctctggcttacttgatagcagctctcaagaacgaagtcaagttttctactcgtgatctggcttccccaagagattcttgaagattttgaacatcttcatcgtcactcacatctaccaaatgaggtggtacaggaacccgaggaaacaatttgaaaatacacctgatacgatctgacggaaatatctcagtataaccgaaaactgcaataagtcaaagcgattatatgcaaatttgaactaaccaagagtttcatcgttgcaaggagatttggctttaactagtgtgtcaacaaacaaaatagctaggtccgccccacaattcacctgagaatttgcagttttaataagaaattagctctactaaactgaacaaaagtgcacaagaagaaacaaagaaggaaagagaacaaaccaggccgtgttctagttcaatgcaagcccctgaaaagaggatatcaagagcttcagagaatctttgagcggtgacatatctgcaaaccaaaaaaggccaatcctttatcaatccaaacatatctatgaaccaaataatctgccaatccataatcaaaaatccaatttttacaaccaataccagaattcaaaaaaaagggtcaatgcagaatgaagcaacaagcaaaaggattataagagaatggagctaacgaaccttgcactgatagatttatacatctgcaaagctccatagtaattgccttcctctatcactttccgcaatttatcaatatgctttaagaatttgtcaaatttgaaggatctgtgttatctcttatcgagtgaaattaacgaaatttgagaagaagaagaaggaaaggagatgcgagtagtagtacctcttgaacaggaggtaattcacgtttgatcctctctctcgacatggatctcaaggatttgttgttttcttcttcaaatctttctttggtttattttctgcacaagattgataaattatcccaagtacggaaactaaacagaaaatttgtcagcttcgtgcgttttgcagatttaacctaattttaaaaaaataataagaaattacccaaatttaagtttaaaaatggaaaattcaaataattaaagtaaaagttgatgccaaagaccaaaaaaaaaaaaaaaaaaaagttacgaagaacttcacctaaaagttttccaatttatatatttttaagctccaatatgttgatgagttttgaatatattgttcaattcataagaagaaggttgtttttttaactagtcaattcaatgcataggaaactagtagtatatatgttgttccaattattaactcgtatgtaaaagttaatcgaagaaactcgatcatgtattctaataagtagtaatccgttgcatattggcgtaatatataagttgtaacaaaaaaaaaaccttgatctagtaattagattacagtttatgtagccagattataaacaaactaaaaaaaaattacaataactttcttgtgaagattggaaaaatttacgatgtcagagatgagtccatataataaatttgtacgaatacagtttcttcttaattggcgtcaatttatctattagctagtccctctagtagtattggtttgtcatgcttgacatgtttcaacaataattgacattattccacaaccatctcaaattctcatgccttaataatcacattacaataatatatatcagatcactacgagcattgaacatccattatattgaaatatctttagtttggggatacaacatccgaatattataaaaaacaaaagctatccggaaattaataattagtacgtaacgcaatccataaacatacttatttttaagtgtagtagatacatgaaccattacttgggtcgatgaaaacaaaacaaccagtacggccgaacctacaagcatcttcgatacgaccatggctttgataatatgcgttcatggcaaacgacgcatggtctaataacgtgttaggttcatagcaagttccacctggttggatcggtgtacaatcaacattctggctacaagcataatcaatattagcttgtaattgttctcctgtggcattcggcatggccatgcaccattgtctgctagtcacgacagggatcgcaacagcagatagaagaagaaagagcgttaaaagctgcgatgacattgaatgagaaatcaagaaatcttaatgtgtttgtaagaatcttaggttatgtatatcatgtaatgtgattttcattgttcttatatagagatacaatggagaataatctagagttatgaccaaagatttcaagggatgtgattatggaagcacttatgatatggaaactacgtattgagaaagtttcttttaatttgttgctcacgttatcgcagttacatggaaactatacaaaaagactttgaaagtacatggatcatatacaaaaagacttttccaaacaatagtgattctctctcgctacttttgtgcttatttgggaaaggacttaacgagagagaactagaagatttattaaacgaatgggagtttctgtttacaaaactaaaaatccgaattcaagtattctgtttccaatttgtaaattctatatttttttttatcattataaagtagaagttgatgtccagaaaaaagttagaagttctgaagaagttccctgcaccaaattttttccatgaattgaccaatttgttgatgagttgtatacttgtatatattgtgcaattcctaggaacgtagttatagaaatttaccataagtttgtattgtagtcccatgacctgaaatcgaagacaatcatcgcacaaattttcataggcaatttatttttattaaattataatttagtttgggtattactgtatacaataacacaaaataaaatccatattagatataaacaatcaatagcacaatcttaatacagtcgcaaagagttttctttatttaagtatagtagacacatgagtctttacttgggtcgacaacaacaaaacaaccactacggttgaacctacacgcatcttcgacacggccatggctatgataataagcgttcatgacatacgatgcatggtcaaataaagtattagggttgtaacaattcccaccgggttggatcggtgtacaatcgacgccgttgctgcaagcaaaatcaatgttggcttgtaactgctcatctgaggtattaggcattggcgtacaccattgtctgcaagtcacgacggggatagagacagttgatatgagaagaagaagtgttaaaagttgcaacgacgacattggaagtggtgaaggattcaatagttttgatgtgttatctttttgtgcaagtacatgtatatatatactagctagggagagatagttagaggaagtaataaataaataaaaatactctaaaggtattccattaaaaaaattatgatatatttcttcttataatatttggtagattttttgatatatcataattaacttagatatctaccaaaaaaataattaacttagatatctttcatttatggctatatttttttaaaaaaattaatgagttaataactatatacaactaactcaaatatttattattaattaaaaaagtaaagagttattagctacttttaaaagttttagttattgatttgaacaagattaaaaatgtaataaatgcttatatgaaacctataatttttttggagaaaaaagacacctatgaatgtattaagtgagtaacatttagtgaatgatggtgacgaaagacgctttggtgcttacacaaagaccaaagtgtataaaggtgtatgatatttgatgctgaattcttgatgaaatactaagaaccctaagtaagcgagagagataaggaggtttggcgatgattaaatactcttgagctaataacttcagtatatatttagcgatgtaaaagtgaatatactcttgagcgatgtttttgtcttttaattagagttgttaccatctcatatctctagtctacctgccacatagaaaattgcaatttcacgagaacattaagacattaattgttttcgtcactatataatctcttttaatggacgtttgtaacatctatgttcagattgacataacgacaaacagagccggccgagagtttcacaatgttacaagtgagagaaaattaaaaactggccacataatttttacctatttaattattttgttgttaaagagaatatgtttaagctattttcaaggttcaaattcatgtaaaggtgacaaaacccctgaggttttaagcactagactgcaagaacttttttttgtaacattggccaaagaaaaccatatactactattagcggccgcaagccttgcttttgccggtttggtcttttggccggcaaaattagacatttgtaagatgaaatgaactgatataatctgaggttagagaaacttttggtatatagtttttttttcaacttatttaactggagtttaggcttaacaagttcccacataaaagcggaattagaattctaataagatacgaaaatacacgagccatggcttgggtcggtagaaacttcaatgccagtgttatggaaattgcattgttccttggtggcaccaaggttctggtaatacaagttcattgcgaacgacgcgtgatctcttaccgtgtttggttcaaagcaaggtccaccggaattgagcgctccacagtcacggaatcctccttcgtcgctgcaaacccaatctatattcgcttgcagttgcttatctgtcgctttgtcacccgctatgcaccatactcctttgttttcagcagcctgcgagaggtttcttggtgtcgagttcacggatacggtagatacgaggaggacgaagatgagcgtcaatgatagagacatcagttttgtgaccattatattattgcttatagattgatatttgttcacagactaaacattttatgtgtttgtgtcaatttatacgctaaatcaaaaggtgataagaagaaaagaaggtttggtcataatttatgcaaaaatgtgtaacttctcacttgtttgtttttcctcgtcatatatatatatattattaaaatttatttcttttgttatattataagtaaaatttaaaaggtataaaggaaaattcaatatagtttaatgcatcatttaagaaaatcacattttctagcaacgtaactgaaattttcaactttcttgactctttttttgtcacatccacgtaactgcaatgtaatccaactttcagtccacttgtctctaatcgataagccacagcatgtgctcctttccaatgtaatactctcgtgctaaagattccataccttctttttcataggattaatcgaaattttagcctatttttttttttgttacgagtccagcaagaaaaacctttcctattagcatcaggtttaatgtatattatcacctcaaaaaacttgaaatgctctttcaagatacataaagtcattttatgagttggatcttgcgtttatgaagtctttagccatcaatacaagtattgatctgatcatgtactaaaaatgattaattcatcaacaacatttgagaaatatgaagatgttctataagttgagaatatactccaatatatagttacatataaacttatacagagattagagatatttgatcaatatatagcattttcaacttatttggagattcggcttaaaaatctaccacacatacattaatcataagatatgaaaatacacgcgtcatggcttgggtctttagtaacttcagagccagaaccgttgaaagtgcattggtctttggttctaccaaggttctggtaatataagttcattacgtacgacgcgtggtctcgtagagtatttggttcatagcaaactccaccgggattgatctgtgtacaatcacggaatcctccttcgtagctgcaacaccaatctatattcgcttgtagctgctcatctgttgcttttttattcgctacacaccaatatcctttgttttcagctgccggtgaaaggttttctagtgttgaggtcacggagacggtagaaacaaggatgaagaggaggagtgtcaatgatagagacattgtttttgtttttgtgaccataattgcttgtatatgatttgttgtttgattgatattgttcaagagtaaatattctggatatgtgcttgtgtttatatatatactaagtcaaatggtgacaaactaaaaaataaggcaaaaggttttgtaaaaatttctatcattaaaaattaattttattttgttatatatattataaataaaaatctgaaagatagattaatactccctctatttcattaattatatttgtagtttaaggttttttcatacatattaaaaaaacacaaaaatctcatttagtttctctattttctataaaaacatcattaactacacctaattcaaccaataaaaaactatcctgtaaaatataattggccaaaatttattaaatgcatttaatttttgcatagataatgaaaacaacacttattttgtaaaaagtaaaaaagtccttaaactacatataatcagaaacagaggaaatatctaataaagtttaataaaccatttatgaatctgacccttcttttattttattttataaatacgatcttatcttatcttgataaaataagaaacatgataagtgttgtttgacacatcagatctattatgatgatgactttccgaccgatttccgatgaattctattcactggaaatcttcgactgattcaacgaattcaaatttcaacaagaatcagtcgaaatatcataacagaataatgacaaatgcgtaatcatcagacaaaaagtcgcaaattgacatttaagttaacttcatacacatagttgaagatccaaagatttgaagtttgaatgcgataaaaagaattgagtcttaaaactcttaatttgacattctacgttttaaacatgaatgatatttagttatttaccctcggtcaagatttgctaactatttgtaaaaatttcaaacttaagaatcgaacatcattcaaaattatataatgtgttacgagagatgcgagtggagagacaacttcagggtctaaattgcaaattttaataagtatattgctttttgaaactaaactatcaattattacacttttgagacacagtttctttctgattctcacttgtgtcgcttttataaaaaagataaaacgcaaattgatttcttcttattctgcttcggtcttcgtttttctttacccttttgatttgatcttctcttctcggttgaaattagggatttctgtaaaattgtaatgtgtttctgagtaaatcatgagcaagcccgaagaaacttccgacccgaacccaaccggacccgatccgtctcgatcttcctccgatgaggtcaccgtcaccgtcgccgatcgggctccgtctgatctcaatcacgtttctgaggagctaagtgatcaattgaggaatgtgggtttggatgattctgcgaaagagctgagtgttccgattagtgtccctcaaggtaatgtagaaacggattcgagggcattattcggcagcgatcaaaaggaggaagaagaagggagcgagaagagaatgatgatggtgtatccagtgagacctgattcagaggattgttcgttttatatgagaactggaagctgcaaatacggatcaagttgcaagttcaatcaccctgttcgcaggaaacttcaagtacttctcttctatcgatcatctttgcatgtttaaattttcaatttgtgaccgaaagttttagtctttttgctctcttgacattgatgttgattgttaattggggttttgtcaattgaacttagggttaaaggttgatttttcatggtaaataaaaaaataaatagaaatattgtgtatcagtcattcagtcttatgtttatttcatttgtgtacttcagagttgaaccaaaaggggaaagcttgatttagaatttatgttttacttttgagttttcttcgtttcctattgctctactgttttggtttaggatttgaagtttttagggagtatgagaacgagaaatggaaaagaatatgttaatttaaacgaagatgatatttttatatcctttttttgttattctaatgtttcggtttatggaagattggtagggagagagtaagggaaagagacgaggatgtggagaacccaaagctgatggagtgtaaggttaaatgtccttcctttcctctgtattggcttagcaagattacattattttctttccgtgtagcccttatgtttatattcctcacagttcgttcaaacatctaacacttgtatgctagtcgggtcatgttattctctgccagacagtgaacaatgaagttttctggtgtggttgttcttttatacatggcaaattatttgatgatttataggtgcttggtttgtaaaggtggatgattagtagtcgccttttcatgtctgaagattgctgttatcttgaattgaatttatttatcacggcttacgatatagacatatcagtctctaattttcaatgggaagtgcactatttaacctcttcttttttgtgttgtatgtgtttgttctctcctgttattcctctttttcttttgaaagtctgtctactgatatcctacatatgccccctaattccgaggtttgcagtactactttaggactggagggtgcaaatatggagagtcttgtagattcagccacatgaaagaacataattctccggcctcagtaccagagcttaacttccttggccttcctatcagaccggtattccattaattggtttagacagttctagcattctgtttacaacagccttatggaaaagctataatagtataagctattgacagggagagaaagaatgcccgttctacatgcgcaatggctcctgcaagtttggatcagactgcaaatttaatcatcctgatcctacagctatcggaggagttgattctcccttgtaccgtggtaataacggtggatccttttccccaaaggccccatcccaagcaagttcaacttcttggtcttcaacgagacatatgaatggtactggtactgctccttttattccatccatgttcccccatagtcgtggagttacacctcaagcttcagactggaatgggtatcaggtactaattttgttccattttttcttttatgctgataaaactatagtactttacttttgaagtttctcatttttattggtgtaggcgtcttctgcctatccaccagaaaggagtccacttgctccttcctcataccaggtgaacaattcattggctgaaactagttcattctcacaataccaacaccagatgtctgttgaggaattcccagaacgcccggatcaaccagagtgcacttattatcttaaaactggggactgtaagttcaaatataaatgcaaataccatcatccgaaaaatagattgccgaagcaagctgcattctctttcaatgacaagggcttgcccctaagacctgtgagtttttttcccatgctgttcttttgtgctagcattaggaagccactgagaaattttgtttgtagtgctacagaacttgatatttctggtgaatttgattcaggacaaaaattatgatcaatcacacacttctccgattcacacttaaaactcattttcctttattttgttatactttcaggatcagagcatgtgcacacactacagccgatatggcatctgcaaatttggtccagcttgtagatttgatcattccataccgcccacattctcgcccagcagctcccaaaccgtagaagctcgtcaagttggcgctaacggaaatgaagatgacagctggcattgacatcacatgttgagaagcctgcgtaagggatactttttttctttaccatgataggcttttcagttcttaggaccaaactcttcttttggctttggaatttatgaaaacacatttaggtaaattatagtctccaaactacatctatctggcaagtcaatgcttgtttacaggattctcacctaataactactgttatgccgctttaactgtaactatctactctttcactaaggttcactctaatggaagcatgtcctgtttatgctttgttcttcttccgttggtgactctcctctgataaaaatttccttgatttctgcctagttttgttcatatctgaatctcaaaagaattgctagaacggagaaccaaacaacgacactatatgtacatagattgttttgcatacttctatgtcaggactcaggacacatgtttctgctatgattgtctggtgctgtgtggttaccctcttacaaggagttcacttttctgaaatcgaagccctaaacatggcctcgggttctttcagatagatggtgggatcaaatcttgtgatcccagtttcagcagactctgtttcaacatctttttgcccgacagattcttcttcaggtgtcagcaatctagccttatagagttaaagctcgcgacttcctcccagtaaaatcgaatgttaatttggttagggtttagagaggttgaagctattggaacgatgtacagaaagccatgtcgatatgaataatagctaatagcattatgtctgcgaaggacaattactcaaaatcttatttccatagttcttagatggagagtcaaaagatacaaattatatccattgtgcgcaaaatgttggcaaacaaaaagaaaggaacaaaaagtatactgaacaagtataatatcagcagaagagagaagaagaagaaagctgagatatatgggtctttaagcgttaacccttttgtttcactttgtttgagacctctctgcaaaactgcttcagcttccctacccctcggattcttcagaagatggcaggatttaacggaagcaaaaccatttgttctgcgcagaaagcataaatcaggtgagcaaatctatgttcttggataaagagctaagaagttgaatgtaatgagaaaaagaaaacaaccttagctttagggttttgggaactatggttattgttttgatcggagttttggtttctctgaggtgaaaccagactattagggccagcgccggatgctttcttggtcttcttctcgtcactagctttgctgaaaatgactgtgaatccttcggctgatgccggattgttcacatcccattccccaaactttggcaatggtttccctttgttttcctgcaccaaagaaacagagattcatcaaacatcaagaaagctatagagactttttctgaaactgatcatcgtggtgatgatgaaaggagagagacttgatgaagacgttgtttgttcttaccgccattgttgttgagatcaaagcaaaatgaaatatcaaagatctattgagagagagagagggaggtgggaggagagagaagggaaatgcagttgtaatatagagagaggaaggagaaacataagagggaaacacgtcgtcgtcgtcgttgacaacagcattaaccaaatcaaacaacattattacacctcttcttctttcccgcgtaaatccctaaccgtactacctaacaaataattttaaaacaaaacatgattaaaaaaagtgtcaagcatcccttaatacattttcctctagaacgtgcgttataaacgtgctattgagaaagtcttttaaagcagatttgcttattaatatgcttaggtcaattgatttttcaaaagacagaactgttttttttttaagatttgcaagaagtgtttgttaaaaatagtaaaaaatttatgttttaaaaagataaaacacaatcgtttaacttaaacatgttaattgttaagagtataaaaaacaatcaatcgctaacggttaattaagacaaatatatcacaaaagttccaataatatcaaaaagaaattccaacttatcagttttatttatttagcaatcattttcaaatatataacgtagaattactataattttattttatcgtttataactcgcacatgcacagtaccgaatttaaatctagattaccgtactatatcactagtacaaatcattgtattatataacctcaatcacatatacccagtcatttatcaatcattcaatcccaaaacaatgaaaaaacaaatttgatacagcttagttacttactactagtagccaaaagtagtagctcgagcacaataatttatgagaaaaggaaaagtatttcatcactaaatatgcatgtagtttatttactctggaaagttgtgagagcccagcccaagatagttttgtaagtagagtgattgggcctagcccagcccaataaagttttgtaactatattaggcagagagagttggacctagaataatgtctcaaaatccatctgtttggatgcagtgatatctccattcccaattgcctaaacccaaattagaaattttgcagaaatcaaattttgtcgctaaaatccccacacagttcgatgggaagactttgggaatcactgcccgtgattcttctactcttagttcttcttcttcatcaatcagtctctcaggtatttgaagatcttacgtgctctatcatctatattcatgatttaccgattcgttgtttttcttcttcttcttcttctattgatctataatcaatgaattttcatgtttttgctctctctgtaggggtttgaagaatctgaatctactaggtgaatctctagcaactccacttgattaaactcgtgtctttgtactcaaaacaaaaactttaaattagtttgtgtaagattattctcaatttcagctaaacatgtctgatttatattgatttgtcttgtcctgaaatatagattggttaacgaagaagtagaagttagtaatgctccagaaatacattgttcccgagaaagaagtcgagcagcttggcagattatacaagatgtaagtagagactattcaaaaactgaatatgtttcctttaatttgtgaatttgtttggtattagatggtaaggagtagatttttgattgtttttgttatttggatttttttctgcagtatttgacgccatttgtggaacgggaaagatatgaaattccaaaaaattgtaggctgcatcctgataatgatttatacagagatcaggaacatcataaggttcatgttgatgtcttcgaatggaaatgtggttactgcaagaaaagtttcaatgatgagaaatttcttgacaagcatttcagtactagacattataatcttttaaatacggtatgtcttatatgtttctcatcttgaggataatgaaattctgttatttagtgatattttgcttgttttcagactgatacaaagtgtttagccgacctgtgtggtgcattgcattgtgactttgtattgagctctaagaaacccaagagcaagtgcaaccctcctgctgttgccaaaaaccgtcatctctgcgaggtttctttctttgattctcttttcattattatttgctttttccagctctggttccatgacttgttattattatctttcgatactaattttacttgtttattcacttagagcgttgccaatagttgtttcccagtgagtcaaggtccctcagctagtcgtcttcatggtatgattccttactaagaaaccttccaagtgaatagttgctcattgagatgattcttaaatagttccttgaagtgtgctcaaatcactgtctttgatttttatttttcatgatcgaagaacactttttgcgccaattctgtgatgctcatacctgcactggaaatgataaaccctttcctagaggaggcaaggtatgatctcttaaaccgtcgcagttacttatgcatgctaaatgaagttgttaattattttttaaagcaactctgtttgcatatgcttcttctatgctatctgtttcttgtgaaaaccaatataagggaatatgtcagtcttctgttaacatctttgtctatactaatttgtgcagaagaaatcgggtgtcttctacctcgccatttcaatattgaccttgatgctactcccactcttttatcttctagtcttcttacatcaaaggtaccgtatggtgttacttgtttttattttccatcattgccttatcttcagaaatctttggtcacattgctgtttctactgtctttaacagagaaaagagaagcggaacacaagatttgcgtcgtattataaaatctggaaaaaaaacaaaaccgtcataagatggtaatcctctcaagcattggattattgaatgtgtacacaattcattctctagacattttatatcgaatcgttttcagctcctaaagtcactcttgtttaacattttatacaggtaagcttcaaactgctcttgagatacaggatgttcaaatccgatattggtttggtgaatcacaaatcttcctcattacttctccatctcagacctttcctcatttggtgtttctcaaaccagagacttatggattccaaacgagagtatttctatgtggttatgaagctagttgctatggatatcagatggattacatagacaaatgatttttctgtaagcttgtaaaaacagatgattccttccacaaaataggaatagtgattagatttttctctgtaattttatcgaatcttcatacatatcaatgataacatcaaggttgaaacacaatctataacagtaagagtataaaacaatctttcttgttagtagctttaaggtttaaggagctaccacgccaaacgatagagatatcaactcattagagaggagaaaaccatctggatctttcagtctaaggtacctcacatgatcctcaatcttcacttcatcatttgcaactaaggttttgaattcatcaatcatcacttcgcttctcatatcatccaaacaaacaatgtgcccactctccacataaggctcataaactttacagattgatttcactacctcactgccaaaagcttctccaaactccttaagttcaagccctttagatgttctgaaagatagcattaagatgtctgttgcaacatccttaagatcaacatcaccatttccacaccagtttgctgcgccattctccaagtcagcgacatagtttgtgtattcctttagcctccttggccttgaaaacctcaaccctccaacataactcgctgaacctaaaccgaaagcatagaatggcttgttcttccagtatatcaagttgtgtttgcacttgaaaccgtctctcgagtaactgctgacttcataatgttcataacctgcaccacggagcatcgatgatgctgttttataaaactctgcagactgtgtttctgaaggaagaggggactgtcctggagtgtacctacacaagttcatgaacccaattcgtttctgttcagattacattcaagttcttaagcatcagtaagcaaacttgaactacgtacacttacaaatttccaaactttgtgccttgttcgacttgcagatcatatacagaaacatgattgggctgtgattcgatagctaatctcaaactctcttcccacatctccaaagtctggtgaggcagagaagaaataagatccatactccaattctcaactccacattctttaacaaactctattgcttcatacacttgagagacaccatgagctcttccacaagctttcaaaagctcatcttgaaaagcttgaactcctaaagacactctgttaactcccaatttcatcaaatccttcagcttctgaccatcaaacgtgcctggatccatctccattgatatctcagcatctggactcagcccgaaattcaaactcaatgtttccagaatcaaagaaacaagcttcggaggaacaagagaaggcgtcccaccaccgaaaaacaccgtttctagattcgggttcgtatcaaaatccgtccttgtcgcttttatctctctaacaagcaaattcacatagttcgtgattctcgggtcatcttcttttccttcctcgtagacattagacggtctggctgaagaagaagacatgcctagagctaagataggaaagtcacaataatgacagcgtttgcgacaaaacggaagatgaacgtaggctgaggttggtggacctttgtgtaacgtagtaagattggttgacgcatttcgtcgagcacttggtggagtatcttgtagaacaaccttactaaaagctcgaaaaaacaacttcgatgagcacttgggtttacctgtaaacgatgagaaaattggagaaatcgttgttttcagcataattaccaaataaaacgagagaaaaagaaagagagccagagagacgaagagagaaagctttcaaagatcaaagttcactggtctcgttttatatgcttcaacgtcgtcgttttagtcagaaagtagactcactaaagacttgaccatctaattaacacactaattacaattgaaaaatattataataagaatgaaacgattattcacttattcagacggaaaaaaaaatggcgctagaatcgatagtctctctctcggagcttctctcttcccttctctcgtcgaaaccaccgtctccgtcgagtctgaaacctatcacgcttccgtcttccgtatccgcgagaacgtcacagcatttgtcgatgacgacgaagattttaacggccgagcacgatgacgtcatcaatcgagtggcgtatccttcgctggcgaacgcgaatctcgtattcttcaagtccagttactacaacgtcgaggtggtgcctaaagacggcgaatcggaggagcagctggttaacgatttcaagaggtcgtgtttcagagcgggtgtgttgcaggaatctcgaagacgacgcttcttcgagagctctctggagaagaagacgcggaagaccaaagaagctgcgaagaagtatcggaaaaggtcagatttttttttcactttttcttctttctttcgaaaaacacttggagaagttgagtcaatagattttgattttacaggagaccaaaccctaaaccaaaaccactatcaacttcagagatccgcaagcacaacagaaatgcatccagagaagacgaacaagacgatcactgggaacttcctcctgaggacattgagattccatataccaaccggtcttagaagtaaaccggaatgatattccggtacactgatctgagcaatcttaatcacgcagcatctgcgttttgtaaagccactcttttgtatgttcttttagcttgagattagaaaattttcattgctcggtgtagagtgaagatgaatgattttggaggtgtctgtaacgtagaaccaaatgcagatgaatctgtaactagttttgattacatgacaagtgatcacagatatgagaagaatcaagccatagattggcagttatattatattgccgcccaaaatcaggaacaaaacaccaaagctcatcatcggtaacaagaaaacaagtaaggacaccattataattgactctgtcttctcaaggatcactcccttagccatgtagctagagccgaatcccacttgcatagctcgccctctttgaaccacagacctatgccacaaccacaagagccaaaatgtcagcaaatgaaaactaaaagtttagcatactaaggaatgagagtgattggtcaaactaagtaaatgaagaagtgatagtaatggtttaaaacagatatattgaacctaacaatttcagtaatcaagtatgatctaatctagttatgttatcaagttaatttgaagcagtttgaaccacgttgatttgcccctaaactggacatagtcaatgtctcaacaatgaaagatgggtgaatgatttgaacaaaaaacaagaaatctcaccaatctcacgcttgccgttttcagggctgtcactaccatgcacaatgttcctgcaaattgcataatttaaaaatatcaaaccatgagaattattttaagtgcttacttccaacaattttaaagatgatagaagtccaaccttccggtttgcacagcaagatctcctcttatagtaccaggttcagcttgaagcggatctgttttccctattagcttcctggctgaagcaacaacaccaacaccttcccaagcctttaccaggtttaaaacatcacatgcaattaactcatctaattacaacttgaaaacaagtaaaaatcaaattagagcatagttatacccataccatacacacaactggacctgaagtgatgtactcaatcaggttaggaaagaatgatttagcactaagatccttataatgctcctggcaattgagataaacacacaagaatattaattatgtcaatcgaatatgaaaaaaaaatgaggcagcgtcatcttacgcaaatgtagcgaataagtgaaatatgcaagtcatgatc

SEQ ID NO: 952 - DNA, 15319 bp, Arabidopsis thaliana
aggcttcaatttctcgatacttgtcaatgatttattagttatatcacattaagaagcaatctaaagttatcaaactactgatgtaatgagtgagtgtcaaacctcagccaattcttttgggcactgaaacatcttgagcccaataagtttaaacccctttttctcaaagcgagaaatgatttctcctacctaagaacatcaaatgaatcatacattcataatttaagccaagatagtgtaatgaaataacattcaaagctccatagagttccaagatacataatttaacctcaaaatcagaagaagaaaaaaaatgaaaagcaaaaacgcttacaaggcctcgttgtatgccatcaggtttcaccataatgtaagtctcctcaacgtcctcctgaaacaatacagaaaacaacgtaagaacaatcaaaaggtcactaaattgcattgagattcatcaaattagaatatatccaaactaatttgaatcctaaattcctgatttcggagtttaatcaatgtaagtactaagaaaacaaagtaattcgcataaatggaggggaagcacacaaaccatagaagctacaaggtgaggaaggaagattcccgattcggcggagctggaagcgcgaagacggcggcgagacgcggaattgcgagagaaaagacggaactgaggacgaaatgcggccaacgctgttctaaaattaaccctggctggagaacagtgtggattgagacttgccgagtttctctccggcggcgaagccacacataggggagtccatttactaactacagtcgctcccaccattttctgcgctttgtcttagcttctctcagtgtcttcgcatcatcatcttataagaacaaagttaattgacataaataccctttatccagaagcgaagataatttgggtttagttgatcaatcaaaaagtatcagtgctcagaagtaatttaaaaagtgatctcgagtacaaagagtgtctcgtttaaatggaggaaacagactctttctctttccctgtacagtttactcttctaaaagattaaaaaaaacaaaagtctgcacatttcaacagtcgcacaatttgctgctttaataccaaaccaaaccatctttcttgtagcaaaattgtttttttctttttcttttttcgtcgatttagaatcattgtcaacagagtcacgttgaaaaataggcaatacagactcatcgtcttgtcttctagatgtatctggctttgcctttcttttgcttgctttagccatttcacgccacatcaaatttacattttgtgcatagaagaatcaatgcgtaaacatccccaactttttcttttcatcttgttgcttttaacaagacccggaaaaaagacttcatcaatcaatttctacatctatatcttcctctccctggtcaacaaggtcagttttttgccctgccttgtccacaacttcggtttctacctttccattgccatcaactacagtttcgtttcctcccttgtccgaaacttcagttccttgcactccctcaccattgtcaacagcttcattttcttctacccccttttcgacaacttcgcttttttgctctcccaagtcgacaactccagtttcttgttcttctttttcagtaactctactttcttgctctggcacattcgccaattgttcttctccttcaattttattgatggatttttcatcttcttggttcccattatcttgtgtcttttggcttaccagttcttcgtttccacaatcgagttggttctctccctcttctctgtgaggactaagtgtttgtccttcacttttgtcaagggaaagttcttttcctactccgacaacttcagtttcttgctctcctgtatcatcatctctactactttcttgctctagcacattctccaattgttcttctctctcgctttgattgattttttcatctctttggttctcataatcttgtgccttttcgcttaccgattcttcattaccgctagcacgtgggtcctctctctcttttctgtgaggactgagtgtacgcccttcacttcggtcaaggggatgtacttcttccactcccatatcaacaacttcattttcttgctttctcatatcgacaacttcagtttcttgctcttccttgtcaccaactccactttcttgctctggcatattctccagttgtcgttctatttcatttgggtttatgggttttccatcttcttggtccccattatcatgtgcctcttggctcaccggctcttcatttccgctaacgagttgatcctctccttctactctgtgaggactatgttcctgtttttcacttctgtcaaagggattgtcttctacttttctctggctaaagtgtggcgggtcttcttcttcatcctcatcctcatccattttcatatacagacctagatgttctaatggattactgttgctttccatcttgaaactacccaaacccaacatatcctcactaaacttgggactcatcacttccatggaagtcggtaattgatcaccttctgtacctgtagctctaagcatctggaggtcttccataaaccgtatgccctcgtttatctccactgtcttttccatctgcaacagaccagaaagtcatttatcatgattgtacaccatggtagggctctgaataatagaagagaaactcgaaaagtcttttataccttttgtaaagcttgacgtgcagcttctctctcttgctctctttccctcctcgctttttctgcggcttctgctttggcttttctccgagcctcctcagctgctttggcctcggcttgtaaccgttctttttctaatcaaacggaaatcgcaagaattaaaaataaaagtatttagttaggaattatgggtacataagcacactcgaatgcactacaatccaaccttcccgtagccgtttttcaaactcctctctttctatcctcaatttttcaggatcccctttttcaccctgaaatttgatgcattaaattttttgattaaaacaatccacaagttcaggcgagctttttcgtcaacacagtagatcggacacttaaaaattcaaccttggtaaaagccttctctcgagctttcataatggtatcagcaaaacgattcttcaagaaagccgcgcggtaacgcttatctggggaatctggggaaatttgcctctcaggtggagcagtctcctctataataccaaagcatgacaggtaaactcatgatctgaaaataaacatctattaccatctccaaccttccttaactttcatttcttaccatctggaacgagaactactgcatccatggtggttgacttttccccaacagtatgctcaagttgatccaattcattcaaagaatctacagagaacaaagaatgagtgtcgggaagacttctatatccgagcactccaacttgcatacatcaattataaagagactaaccatttacaactatcttctcactgttgctatcatcctcttttttgtctataccaactcctggttgctttttttcctaaattaaagaggagactatacttatttttctgtagtaatttcacttttatgattgcaaatagtccatggaaatattggtgagtaaatgaaaaatcttgcagaaattagagcaacatccaaacacagagactccataacataagttattccactgttagatatacctctctacttgtgggttttgaagctttaatagaatctgtttcactcccagaggaactacaagaatcagaatctgaaagataatcacagaacacatcagtataaaaagcacttcctatgagtaaaaataaagcaaaggaatcaattctacagtttgccaaaccacaatgtaagaacttaattcattcgtcataaacgataaccacagaaactaactataatatcctctatagcaagggaataaccacacttactagagcagagaaaaagcatcgaaaagataatatgggacacgacgtaggctcaaattacaaaacaagactcaggagtccaatactaatcatttcaatagaaaagttactttatttccaatcttaactattcttacaaactgtacaaatcaatgcactatttaagagaaacaaaatgattattctaaggaaatagaagaaggctcgcataaacacgaaccactagatgaagagcctgattcactactagagctactcgaactgctgctttcattatttctacatgcagcatctttttctatcttaagaggaggatggcttgagaccgaggggtcattcccaccaactatgtcaacatcctcgtcaatttgcagatcacctgtgattatgagtacatcagatactcagattactgaaggaaatcattttcgacatcaaattaaatagcaaaaacatacctttactaggctgcaaaggggaattactgaatccagagtcatgaacaatctgtaaaagaaaagttaaaaccaaaagtcaaatgtcaacatttccaagtgcacacaaacgattactaaaaataatcagagaggttctttacctccatctcacaaggttcgctcttttccatggatttctttttctcccttaaatagtcatccaggagtttccgaaccatgaacaagatttcatcagaaagcgcttctatatctatctcaatctcaccttctccagattgaccatcactgccactttgctctctcaggagatcagcaatcttttgagggaaatcttcttctaatgccatcagatcttggcctaattttttcttctcaccatctgtcatgaccaacttagcaggttccaccctcagcttgttatcgttcattgcagcttccttctttctcatcggtgctacttcgaaagggatttcagactccagagaagcagaactggttaggggaataactggtggtttagacataggtatttttttctctatacttttccatcccgattcaaaatatttactgataccctgagccatagtatggaactgatttcctggtggattgtaagctatagaatttgaaaatgtaagacgcacatctgctgcaaagtccaaaggactagagtattcacctttacacagcctgcttcgtatcgttccaagatccattggatgtttaatcacattaaaatagtctggaatattcaacatcactggatcaactggagtacgaaatggccaccccgacttatgtgaccataaacgattgagtaacgtctcacactccttcatcactgaagcaacagtataacttgttgggacatttaatcgagatggacctttcttattccgctgcttatcactgcgcacaggagggcgctttttgccctgtgacccaacaaatgtagcaaagttttctggtggcggcctcctaggcccatcactgcagctatgatcattgtatggcgacaacagaacagtgtctgaactgaaagatgcaatcttcttactaaggtccctgacctgttgaagctccatcttcaacttgtgaactaaattctttctctcagacctcgacatctttgacagagacaaaacctctttagaaacgccattgttatctccattcaaaccaaaacgtctccttttcagtggaggagacgcctcagaattcatcctctctgagtaaacaaattcatcaggctcaacagcttgcatgtaatcaggaacaaagcctgatggtctccctctagagtgtttccgcgctttacccatcgtttgctataaaccagaaacccaacagttcattcgcttttcagagttaatcgtcttcacaccatcaaattagaatataaaacaaactaaaaaaaaaaatcaagcaagtaatgcttttatgcctttgctccaaaaatcttgcagatatcttcaacaatgaatctatagacaccattcatcgttatcgagccaaaacacaattccccgaaaaaatatcacaagaatgcgattaccaaatcaatccgatgatgaattcctatgaattgcacgttgacttaccaaactgagaatcccaattggtctaagcttcttgcttctccctcaggtcaaaatcaaatcaaattcaccgaagaagtatcttcctcaacggcaattggcaaaaaagctaatcgaaaccctagaaaaaccctcgactgagtcaaaaaaaaggtaccaaaatcgatttggaaaaccctagatcgagagcttctggatatcttttcgaatggaaaactaaaaaaaaattcgaaaaaacgaaagaggtgagaggagagagagagacttacgaagaataacgaacaatttgcttctctacttatagatccgaagagatgagcagcccgccgcctttaatcgaatctaagccgttaaattccagccaaccaaatctagacggctacaattatcctttcgatatgtaccgtcgatatttagatctaacggctgtgaaggctacggtgcaatctagtgaatctggatctctaattgttttgagaaaagatcttggagcgcgtgagtattaatactccaaatcgcaagaattaatagattacacgtgttactatagcgcgtgtaatagacgcggataccgaccgacattgtctccactattttgactattttatccactaaacgcgccctgtaaatagcgcgattgaattacacgtgcctatgaatcttttgattttcaggcccattagtgaatatcatgaggctacccattagtaaactatttatttttctacgtaatgctcttgtatgggcttgggaagactgtttattatgttaacacctttgcaaacgaatgttgacaatttcatcttcaagcttaaatgacatgaaaacgaacaatgtgaaaaagaaaaactttaatgattgtaaaaggcatacatatatacaactttcttgaaatttttaagcaaaacaaaaaaaaacataaatttgagattagcaatttagagaaaacagcattttataaacaaaatactaactaaagaagaaagcaaactaaaaaataaaacacagaaacatatgttcaaggtgaaaattaaataaccaaagtttatcacttgctatatttttagttctacgaagggccatgtgtgatacgatacgatcgggaccattcatcattttcaccattgtaaatccaacggtggcgaatgaaagaacgtcacagacacaaagctgccttaacgtcaagcctccacgcaaaaccaccgccgtccattctccacacgtcacaaggcaccgtgacggatcctctttctcgatcttgacacgtgtactgtaatctcactctgcatgtgaaagctgggtacgttagcatcggcctctccttcatcactaaccgtacgttcacgtgaaaattatcgtaactaatatcctccggtacaccttcctccatcggaatattaatatcttctctagccatcttcttatacgcctcattggtccacgtgactctccctacaccgtccgatataaaaccaggacacgtgtcttccactagattcatcttcctctcctgatttgtctcccctaatccataaccgtcgatccaagcgtcagtcacacgctcaaccgtcacacacgacgaaaccaccaccgtccttcgtgatatctccgccgttttgtacggcgttaaaatctcaccaccgccgttgaaactcagccataaaggaccgtttcgcttctgcttctccaccggaaaagcattcagatctggaaaaactcgtttctcaggcgtctctggtaaaagagacaatgtaaccgccgtggtagtagcagtgtctccacttagatctctcttcttcttattgcaccttcgggagttcccaccggaacaatctttttgatactttctctttcctctcccagatttacctgagagatcggagcttccaccacttgtagttgtggtggagccgctcttcccggtgagagagacacttccaccgtcgctggccggtttaggagcaatgggacgaaaacgaagcatgattcgatctgctttggagagaccgtagcgaccaccgtaaccaccatatctggctatgcaacaacctcccctaccgtccatgatctctctctgtatatatctttctctcttaataggttttagtgggagctttgaagaataatgaagagaggtgtgtgtgaaggggtttatatagggactctgaagatgacaagtgttgggttgatacgcgtgtctttgtctagaatacgcttatcaccgttgcacttgcacatgctctttttccttctgtaatggacatgaaaaatgaatcgaatttatgtttaaaactattttctaaaacgacaaaaaaaactattcaaaaatggcatgacatagaaatataattaaacttgtactattttttttttatcacaaattaagcagtacttattgtaatttaatgttttaaaaatggtcggtgttttgttattggaaaattcgaagttctcagtatattggtctaattaatatttgacatgaaggtatatatttgattcttatattcggttgttcaatcaaagcgcggatgaaaaaaatatgatgttagcattcgagatttttataattagacgtatacataaggaacggaattgagaacctaatctggtctaatagtatataattaattagtaggtcccgtggttagctaataatcactttgacccttgtgtttactactttagtacctgaatagtatactaatttgtttggcctaaaaacagataatcatgaataaatgccaaaattaggttaaaatatagtacatcgaaatgaaaaaaaaaaggtaatgttaggcatggtccaagagatgagggttcatacattatcattgaccgattctgaatttaatttagtggaatataatcttaatcaactaaaggtgatcgtgactctagatctcaaatctttattaacgggacaaggtcgatgatctcatgtccaaagaggaattttgtgccaatgaagttaggccacctcttttatgaaagggaaagaaggaacattggatggcgtataaataaaaatcatgagggagtgacggtatcatggagccatcttaaatataatcatacaattgattcggaaaaagtatatatggacatgagagtcaaaatcttattaaaaatccaatatagtaacatagaaataaagtagattcggaaggcagttcgagatggcatcaagaaaaatctgatgggtttgtgttgcgttgtacgttgcacgcaagaggacacgtagagatatgtaattagcttatcaacttacaactataatttacacaaacaatctcattatttaattaaccaaggcttaataattagtccatatatatttatacattcatgaatgtggacgaaactgatgactgatgttgagacttgagagttaggtttgattctttaacattcgatatctcatcttccatttttcgttattacatattttgttgcaaggaaaacacgatataccgtatagagttgatgtagctaaagttttaattcaacaatgtaatcttgatcattaaagtatagatgattttagtggttctacttgacgtccctacagatagtaaatgcaattatcaaaaacatgtcatagttactaaaagaagaaggatgcacaaatacaatctttttgggttggatcagatcaaattatatttggcttaaagacattgattactacgtatatattaaacaaatgaataaaattgactacctttgctctcaccctcacctgctgattctatacctaattaattatataatacgatagccaacagtttcaacataaaaccaccatcgaaacatactactgatataatatgcatatgggacaaatgaaaaatgaaaaatataacggatgaataacgaaaaatgaaaaatatcattaatgatataatatgcatatgggacaaagcaatcttatccgttacggactatataacatatcatttcttaatcatatattatatacgtatatatataatcgtatatcatcagtaatatatttgttgtaagaaaaacacatactgtatatacatgaccaaaaacatttcgctttatgcattgatgtaaaaaaattaaaactatacataaacacatcaaaaattacagacacttaacagatgtaccatgtttttttaagaatcaatagttacaaaatttgagaaaaaggtgatattttgtcatttcgttggatatgaaggaaccaatgataaaacatcgttagttactaattcaaacaacaaaaaaaagaaccccgaatttaaatgctcaccatcgacaaaccttggctatttattttataaatataagacaagtactaaatcctatcaacactaaacaataaaatcgaacatgttcacccaattataatctgacagctgaagaagataaggaaatactaaatatagagaggttcgatgacagagagaaaaaggtagactgaatcaccatcaaaaccacgcccaagaaccctaattggggaaagtggccaaatgaattctcgccacgtgtggatctgatggtgtcagagtcggtaaagtttaaaaaaggtaatgtgtgatgtctcgataagggcttttaaactggtcgttttgtctgggacacttgtacagttttggaaaggaggacccatgactagggcattctttagttaattttaaacttgataaatcagtatttcgtttctatatatttgtttatgaaattctgtatcattagagaaatcagatgatgtggcaatcattatctgttctctttaatcgaccaaaggttcgaacaaaatatcattgttggttatctgatatagagaaaactaatttagaaacctcgttttgaaaaattccaactacaatatgagatttgattctacaggagtttggaatatgggaaagggaatttacaaaagtgattgttgaaacattaccgattgttaaatggtaatagacagctgaagctgcacaatgacatatggtaaggagctgggagcaaaagactaaggaccgaaacgatgcagatcatctcgcaaaagaagcttttcctcatattgatcactgttgtgtgttgtgtaatatcctttctgtttatggcctcgtcaaaggtaatgctgattctagtttattcgttattgaaatgaacttgatttagcttagctgtttacagaagttaaaaagaaaggaggacaaagggttatagtgttgaagacaaacttattttagcttctttctatatagctttttatcccaaatcccttaattctcggattaacatgaaaaaaaccactgccatacctcctatgtccacagaaactcatcatgaatcatctttttctcactgccaacagaccaaatacgagcacctcaaagacaaagggacgtcgaacaacaaaccaacattgataacagagcgtggtaaataagtaatcaaaataaacttactgatgtcaacttccattctcacgtttgtgataaactctttgcgtttacctcgtgaataaaaacaatgcacagaagaaatatgaggacataaacaataaccatcccaacccaattactagagagagaaagtgaatactgagatctcttccattaaagcatgtgagtcaatagtgtgtacaactcttgatagcaataacattagggtcctaacgaaaagagagaaacacacctttcagttttacggaccactcatatttacacatgaatccgaataaatggtacactagaatgccctgaatctccaggcaacaaagcaacgcaactgagttaagaatagatgaaagcaagtcttttgagtaaaaaggaaaataccaaaatacgaccagtcgacttccctgtgtatttgttgacatcctctcgtccaaatgatagcacgttttttctcagttaccgctttggaggatatgtcggcatgaaatctttggattttggtaacgggacttcatggaaccaaccatggttgagagcatcttccactgttagacgtttctcagggtccaaagttagtagactgttcagcaaatcaaatccacgttcagaaagaatttgaccacctacaaatgaaatagctggaaacttcttacgtaacatattgtaaggctgtgtaggaaacttggctttagcattcggaaatgatgagaacccaggccatattgcttcgtttggtgttccaaggaccgcaaagatcttctgaagttggtcaagctcactcttacccgggaacaaaggcttttgagacaacagttcagccataatgcaacccactgaccacatatcaactgctgtagagtactcttttgctcctagaagaagttcaggtggcctgtaccactgggtaataaccatctgggtgtaaggcttgatagggctcccatactggcgcgccatcccaaaatcacatatttttaactccccacaattgttcatcagaagattagatggcttcagatccctgtggataatccaatttgtgtggaggtatttcaaaccatccaacagctgcatcatcaagcacttgacttcgctagtgctaaaaggttccttccttctatccattactcccctcaggtcgtgttctaagtgttccatgaccatataaacatcattatcgtttttccctccaaccacaacctccttcacgttcacaatcgcagggtgattgcatgacaaaagtatgttaatttccctcaatgatgtcaaagggaatccatactcttcttcgaacctatcttccttcatcttgatctttttgagcgcaacaatctcttttgttttctcatcccttgctttgtaaacaattccatatgttccttcatttatcttgtttagcttctgaaattcattcacagacctgctcccaaacatcatgttcatctctcccggagttaaagaatcttgatcttcatgttctaactcatcatgatcagaactataatactcacgaccagaatttccatctgcactaagcttctctacgctgagatgtccactgccagatccagacgaatagcactgctgttcttcagacaccattacttcctcgcactccggtgtcaaactgctcctgttccatctattagtcttggaaacgttaacagatattaactcctcctttggggaagtcaaacctgtcccccacctagatgtctttatatttggttcctgcatcacttgttcttcctccaacagaccctcctttacatcctcctgcatcacctgttcttcctccaactgaccctcctccaaatcatcaacaggatgtttcacagccagcagggcttctgaaggctgcactggagcaagataactaggttctggcgacatcaaggcattcacttgatcgtttgaagtagtcttaccagcaacagcctgattggatatcacagttgtagtcggaacagggaaaggagacttggtcttctccctagatggagctctacccactttttctgcattccacacgatgggtgaaaacttcctccttttctcagagggtctctgaacctctgcttcctcccgtagttcccctttctcatatgccaaccgtgatcggtgacgcccatcattcctcctgagatcatggtcactaggccttttgatttgacgcctctcgtcatctctaccactctgtcgaacatacacatcacgagaaccattcctgtaaaagtcgtagtcttttttgacagcaacggaacttctggaaacatcaacaccccctgctgccatcgtattcttctcaatgagaaattgatcttatagaaataaaaaaggataaaacaaacaaacccctcgaaaaaaaccaatcaacgaaacccagaatcaaatcacgagaagcagatttcaatagatgttcaattacttttcaacaattgaactagaaagacgatcaatcaaccaattaagaaaaacacccttgacgaaatcagaatcagaataattcagaaaaaaacgaaaccctagaaattcaatttccaggaacgcgataatttttctccttcctcttctccgattcacaagtaccggaaggtcttaccggacggtgaatacgaaaacggaagattggatggaggaggagatcgatctacgagcccgatgcgatcgcgagaagcttttctctaaattttcctctcggagacgcgtttttcaattttgtcaagtggctctattattactttaccctttgttttataatcgtaataggtcggctgctccaataattcccttttctatttcacagatttatctaatgtttgcgggtgtaccaaaagaacgtgagctacgtattacagccgttggatctaattaatgaacacgaaactagtcgtttattgtttggacggtgacggtgacgaatgacgatgctataaataataatactcacgttgttaatcgaacggtcaatattacattaaatcttgtgtagtaagaatgtaagctacatttcgtctgaaccggtaattagatcccattttcactgaaaaccgacacaataatatatgaaccagccggttatctcaaagttttgatgcattgccatccacagcgattttagtaagctcccgacgcagaatcttgccagcaggattttttgggattgcatttataaaagcaactcgtcttaccttcttgtacggagtaacctacacacaaatagttacataagcaaaccaaaacatcaaatctaattgttctgtctacttgtactaaaaattaatataaccaacattctagagcaatgagcattacttgtttagctacgaaatcaatgatttgcgcttcgttgagattgcttcctggttttctcactatgaaagccattggaatctctcctgcatcctcgtcagggaaccttgaattcatgatccatgtcagtatcagaaacacatttcaagaagttacaaatttgagtttaaaagactcacggaacaactgcagcatcaatcacatctggattcgagtgaagaatctgctccaactctaccggtggaacctataagatgacgcttttgattaatattaaactctaaagactatatcttcttcttctgactcgtaaaatttacctgataagccttgtatttgattagctcctttagccgatcaacaatatatagaaaatcttccgaatcaaaataacagagatcaccagtctttaaccacccttctttgtctactgtctccgcactcgctttctcgtttcccacataacctgtgcccattaatcacaggtttatagtcacatcaatgatcaaaatcttgatgaagacattagacttcaag

SEQ ID NO: 953 - DNA, 58527 bp, Arabidopsis thaliana
gatcatgaaatccgactgagtcctagatttcttcttatatgctaagtcatttagtgaaagctcttgaatgttcctcaaactattgcatttgttacacagtcctagattcttctatgcaaagtcacaagtctcgatttaatttgacacagtcctagattcttatatgcaaagtcacattaatggtcaaagtcttgatataatttgacagtcctagattcttatatgcaaagtcatttagtttacaccagctcagcacattgcatgttcctcaactattgcatatgttttatgatacctttcatgatgactggtcctcggagccagagttcaccagtttttcccggtggcaaggattctccggtggatggatcaacaattttggcttccatattctcagagatacgaccaactgagccatattttaccatctcttcaggtccaaacgttgaggcagctggtcccgagctctctgtcaagccatagccctgtaagccatcaccaaaccagaaagttaaaagtcatataaatgattcaaaatcttgatgaaaaccaagtatcatgaaactggacacagtcctatatacaaagtcatattttgacactaactgtcttatcagttattacctgtacaatatctacatctgggaatttctgcttaaacctctctgcgatgtctttgccgagtggagctcctccgcagccaagggaacgcaacgaccggagatcgtacttcttcgtgagctccgatttgaccaacgctacaatcaacggaggagatacaggcataccagtaaccttatatttctccaccgccttaaacatcgcctcgagttcaaatctccctaaaagcaccaatgtctctccaagcgagatggctcgaatcatcatcatgaaaccaaacacgtggaagagcggaagcgagaacagtccaacgcgatcgtaattaaccggatcttggagagtccgttggtgagatacggcggtcgaggcgattaggttacggtgagtgagcaaaacgcctttgacccgcccggttgttccagaggaaaagaggatagcggcagggtccgattggttgacctgaacctgaaatggattaaccgatgaagaatccgatcgatttaaccaggagagaaactcagtcgagtccatcagaacagttccgagaggcaaagaagaggattgaagcttcttaaccgtctgcgatgtcgcgaacgcaattactggttcactgacttcgacttgatgactcacctccgattcagatccgattgggttcgccggtgaaacaacaacaccgatcgacatcaaagctaagtaaagcactggtatgtccaacgaagaaggagagaggataaaagcgacatttctggaggcaagagaaggaaatcgctcccggagagatacagcaagagaacgaactctacgaagaagctctccataagtgaggttatcaccagagctcgagttaactaggtaggttaaggcttcaatgtttttcccggcggtggcaggtggtgaggatttgagtaggagagaaagcgcgaattcggcggcggagagaggttgatctataggaggtagagaaagagagggacgaagactgtgatagattcctgtccgttgatcgaagccggagctccggtcaatcaaacggctgtcgttggttttcgtcagcattctggaagacgattagagatacagtaatcttttcgtcggcggtgaacatgcgcgcctgcgagaagatatgaactcacataaattaatgcatacgtggcaatccctaaaccaatcaatgttttttttttttttttaacggcaaatcgattttattatattgttttttgtttacaaaactactaaacaaaataactaaaaaggctgtcaagtatcaacgttctttcgtcaaagatctgtgggccataaatctttttacacgtgtctcattcttattagttagagctcagtgatttgtacgaatgatgaaattttgtacgcaaaacatggaaaggaatctgtacatttacagtagatttatatgtacacgtgtctaacgccgattggttgcagctggactagtattgctttgaggagcaaggcaaccgagctataccaatagaccagcgtttgtgacaatcgctgccttgagaagcaatgagcctgacctagaagaaacctacagacctgtgttttctatgtcgacacatacactccgggacaggataagctatcacgtcacgatctctccgccctctccgtgactcaggatagccttgggacttacggtgaagcttccgagttagaaaactgagctcggcatctgaaacagaagaattctccattaaaggaagcatcgctctcttattaggcattataaacttcctgtgtcctacataagctctatttccctgagagaaaaacagagtttaagaaagaaactttggaaaatctcaaaagactattcttctgtgttacctgcatagcttttgccatgtttccaccatgggaaggaataaaaacatcgctgctaagtgatacaatgtagtcaatagctgctaaagctgaagatctattggtgtaaggcaagagctcgcctttatgagccaatgtctcctttgtcaccaaattagagaactctttagcgagaggctctaatgctcgtgagccaccaaatggttcacctcctgcaatatatatcgacgcattactaggtgctcccaaagccttcaacaacctttgatccaaaaaaaaaaagactcgagcattaagtttcctcaaaccatgtatacaaatggtcaaagctctgtttcatgtcaattttcttccttttaagttaccttgcaatctcatatacattgagaggacaaaaaccagcaagtctacgctctgtataggtcaagtttagtctaccagtgaggtatcgaggctgagacgttctggtttctgctatgatccgatcgaattctgagcctaatccagtgagacaaccggttcttacccaaacatctttctctagccttaaatggagagcaatatatggaccttctatccacattcttctcgtgagtttgttcccgagattctcaattggtgccgcgaatctcagtgcatggaaagcaacctacaaaccaacaaattaaaccttcctctagagactggaaaacaaagggttgattgaaaaatcttaccttgcatcgaagtttctgcagatccggcggtagattcttggctaactttgagtccaatcctttcaacaccaaaagtccttcctcattcaactacaacgtagttaacattcaaaattcaagaatcgatcagagaaaacataaaccctaaactagtaaacaatagaatcaaacctgcttgaagtatttagcacggatccaaaccggagaaacatcccaaggaatctgattctcaattgtttgtctagacataagatgcgttgacggtagagaagaaacgatacgaacatcagatctcagcgttttcttgaaatgctctacatcgaaaagatctgagaattcactgagaaaacacaacaagagatcatcagtaactcgaatcataaacccagaaaagagagatgatcaagttgtgtttttgttacctttcgtctccccagactcgattcacttgcaaaacaggaacaacaagagcagcttcaagaatcatagcgattacaacagcatcaacgatttgattccgttgttgattaagtccaccagagacaacaacaacaaggaatcgtttcttctctttagaaacactagctgatttcttcttgtactccaaactaaaatccaaacaaggcttgtatccttcaccattgggttgtttccaaaactctttctcttcctccgtcatattcccggaatgtcctcctctcgccggtaacggaaacaacgtggaagctccggatacagcaagggaggttaagatctgacggtgatcgacatcggagatgaagaatttgagagaggaagcggaagatgtggagacgcaagttgacgatccagtgtctaaagaaaatgtgagaaatgaaattcccgagaaaacgagagaaagagagatgagaagaaggaaaaactgtggaggtgggcatcgagtttggtgatggtggtttaggtatcggggacttgatttcttcaggggagtgaagaagaggagagagagatggaagaatggagatggcggatgcgaagtaaagaatggatttttgatagttctcatcgatttcgccattgaagcagcttctttcgatcgttgaagaaagtttctcagttggttctctgtgcaaagagagagatatgtgagattcagttacagagacttctgatattcttgttttcccgggaaaataagaagccaagtacgaagtactaacgaaccgagaaacttcaaattgccccctggttttatatcttcttatgaataaggaccgtaatttaattttattataagtttagccccgaatcggtgattagatgtttagaataaaagagttacatttaacatcacgtttacaaattgtgactttatgttgcgaaccagttgtcgtttcggttaaggcttgcccggttcgtatgttcattagcttagctctgtataaagaaagagactacactcatctcctatcttctgtttaaaccttgttaaattaccctcttattattatcagattccgagtaaaaaaacgatgagacaagttacttatttggtaaagagactgcgacagtagataatattcaggagtaaaaactcttctccatattttgaatattagtcgaagaaggaaaagcgcaaggactaaaagaaaaaactgtcattccgcagatgagtggattatatagatgtgtctctctcttgtagtaaggaaaagaatggattctaaccagaggagatgatttgcttgaggagtctttgatcatgacaatgcttttttaacctctgatgtaacttcttggggagccttctcggcctggatgtttgtgagaacggccttctttgcgtagtaatcaatcacctgtggaaagggggagaacatcaacatgtttgcaaaagatacagattttcattttaataagcctggagatatatgaaactggaatcaataccggttgagtttgactgtggaaagctgcaagcctcgactttagaacatcagcgttatcatctttacgttggatcagaggctctccagtaatcttcaataccaaataatgtagagattcagatttatgggagggcatttgaaataaacagacgaaatatattaatagttactgtaagtcttacatcatcaactccaggggttttgggaggagcaaatttggtgtggtaactcctgccactcgatgggtggatccatcgcccggttattctttcctccaagattgcgtcatcaatagcaaagttgagaactttgtcaatttcagttcctcgcctcttaagcatctcatcgagctgcaaacaaaagacagaccaccatggttagaagttaattacaatcaaaaccaaaagaaccaaaaggagaccgaatcaacagtgagtttttctattgagcatcaccttctctgcctgagtaacagtcctggggaacccatcaaggataaatcctttttgacattttggcttgttcatggcttcatcaattataccaacaaccaaatcatcagagacgagctctccctgaaataaaaaaacaatcacaaagaataaaaaatctaataacagaaaggaacaaataatagaatctctctcaaagaaagacaaaagaagctgactttttccatagcttctttagccttgacaccaagaggggtcttagaagcaacagcagctcttaacatgtctccagtggataagtgacacaagcaatactcatccttcactactggagattgagtacctttccctgaccctggaggtcctgcaaattcaccaaaaacaaagcattatcaacattccatccaagcattcacacgcaggtgtgcaccttgaaagattcacactttcaaaacaaaacacaagaaccctaaatttcaccagtaatatgccaagtatctttgcttagatcgaaaaagtctgtgttcttaaaatcaaacagaacaaaattgagaagaatctcttataaattccaataatacgaaacacaactcaagttcaagctcactgatacaacctctcagatctaaaatgacgcacccaaaagtttcgattttcaccataaatacagtaaattgaacacataaaacaatgaaaattctggatccaacgatactaaaacgaagcgtgtgcgaatttagtcgtatccgagaaataaaaaaagaggaccgatttagtgagattaccaatgaagatgaggcgtttgtcgggcttctgagaacacttgaggcggcggaggagctccgacatgagatccaccgtctgaacatcttccaaatccgccgcagcaccaccggtcgccatagctgatctagtttagctcagaaaacttcgtttttctcgaaaaagagtttttattctcattagtcaaagggatgtagcaatgaccgggtcgggtttcataaactcgggtctcttaatttgggtcggagcttttttgatctcgtggacaaactttaccctgaaacttacattaatttacatttattgccactcactttttgggattaagtaaaggagttaatgttattaatttccatttttcccaatcgttacataaataacaggggattttcgtacacacacattacacgaatctttaaagcattaaaaagttcgtttgaattttttactaagagaagaagaagctatgaatatattaacactggtcaccatcagaagcagcttgcaactgagaagcatactgtaaattccacaagatatcttcgaaggacggtcggcttaaagattcaggtgaaacacatttgttcatcagagttatcactcttatcagtgatccgtttcgacaagtggcttgtactgtcggattcaccattcttctcctcccttcttcgctctccaacgatgcctgattatataagaaaaacacttttaataagtacaatgatttaactctggtttgtgaatgtgatattgccaaagccgtaccagttcgtctcgtagaaatgcttcttctcttgcggatacagatggtccaacgattgattgtagaagaatcaatccaaagctgtaaacatcgtcttctagccttgacatttgccatgattttgcgatttcctgatacaaaagtgtaactatgagtgtttgagctggctttgacattgttagtcaatgttaggatcagaatcatcggacacacacaatgtagctataagtctatgtttctgtctaagcactttaaaaacgtttatgaaaacaatgctatatcatgtgaaacagaaacagaacattaaagaaacgagcttaactgtgttatgtctggttgcttcagagacaatggacaaaccataatcactcagcttcgcaaaccgatgttggttaagcaaaacgttgttagtcttgagtctattgctgaagaatccaggaataactccagtgtgaagaaaatgaacagcttttgcaacacctgtgagaacattaagcctctctgaccaattcatacccttacctgaactattatctgcgcaaaaccaaaaaccgcacgaaagaaggattttagtattcttcagatatattttgtagaaaaaactgcaaagatttgagctttaaacaagatttaacctgagagacaagattggaagtttccatttggaatgtactcataaatcaaaaagactttctcaacgctgtaatcatcttttcctccacaatctatgcaatgacccaacaagcagacaagattcgggtgtctaagctttgcgagcaaatccaaccgcagtttaagattccttatcgagtatttcttcgatgaaggtaagcatcttattgccacttttgttccattctcaagatttcctttgtaaagctgaaagatgttaagcaaatgtcagaatctctttaaaggagatgatgatgctgaaaagtgaaaacacaaatggttttcatgaactttaccgtgccatataaggagctttcaccgagtatcatagtcttatcgaagttctttgtagctttaactatctcttctaagctaaactgtctacataccggtaaatcctctgaaccaaacttggatgtttcagaaatgtaccctaaatcacaatcacacaaaaaaaggataatagtaagtcgatctttttcacaatatttaagacttgcggtttttttaggaaaaaagtcttacttgcgtttgagagtatctcggaagaaaatccagtagttggatgattatcttggacagtattatggtggacatgcttctttgttactccttttcttctgagcaagataaatacacagcagactaaaaccaataccgacattgatataccaacgattaagccgattaaagctcctttcttccattttctttttcctgattcatttgcagcctctgcttctgcttttgcttcagctttagccgcagcgcgaacttctttaacacaaaaagattctggatgttgctgtttctctagagataaacagtttccattgaatctcaacgcaatatcttgcttgctgcttaagcaacgaggaagttttccggttaacttattgtcggaaatgtcgataaaccagagtttgcttccacatttcagatcatccggaagtgaaccactcagagaattcgctctcaaatcgatatactcgattgttgacaacgagagtaatgaagaatgtagctctcctgatagcttattacttttaaagctaagaactttgagataccaatacgaatcaaaccagctaggtaatgtgccattgaagaagttatgatcaaatctgaaagtttcaagctttaccattgtagacaacttaggtggtactgaaccaaacagaaagttattgctcaaatccaaatactcaagtgaagataaacgatgaagtttctcagggagacgaccccaaatccctagagaagccagagtaagaaccctaagagattttagccttgacagtgtagtgacaaatgattcaatggagaatccatcagataaagtaacattagagatagcaaaaccatcaaagcttttggctttttctgatgacttatcaccgaagatgtttagctctgagactgaattagagaaacaagtgatgttcatcgatggtgttgcttgtaagtagcagaaattggttctgtgatcataccaagattctagctgttgtggatattctaagtgttttttcagctgaagaagaacttgtgcttgtgaagcttgtagctgagatgagcctaaactgtagaaactccatagaagagataacaagaagatgaatttaaacaaacccatttatcagatttcagcttaatttctcagacaagatctgagtatttgatgaacctgcaataaaaaaaaaagaaaaagagacgagacacttcagtacaaaaaaaaacagagtaatcttgagaacaaaagcagagtagtacaagagcagatcaatatgcagaacaagagcagagtagtaccttaaattacaaaagtttcaaacaccgtttttctttaaaacatatcgataaatcagaggcaaaagagaacagatggtttcagtcaccgacacatatcagtggtcgtgtaaggaaggagaagaaagaaaatcaagaatcttcaacgcgtgaaagatagaaaaaagaagagttttttttggtttgttcagagtttgttagtgagaataggtaagtgagagagtaacagtagtgttatgttatatacaagaatctttctttttgatatgcatgagttaaaaatttgtggggttaaatcactcattcctatagaaagtgactttgttttatgcttattatctttataaaaagaagacaaagctttttgcataatgtttacaattattaaacaagcacttataatagttattttctttttttattcggtatacattattgtctgggcatacataagcttttctagttgtatgtatataaactgggaccaagtgataccggaagaaaccaaaggagaagatgttaaatgtggtgtcgtaataattatagtcatttgtagttgaatagtaatgacagtctcatcgtgatttaactactatggacacaaataaaacaataacgatggaaagatatataacaaactaactagagaaatttgttaactaaaaatagtagtggtgaattttagatcggcttaacatgctctaaaaaattatgtatgtctagttttttgtttgtgtaacacttctttttttttttttgacaatcatgtaaaatgtaattctatgattctattgtatgggcatattattatttatatataggcatataatcttgtcatttactaataattctttagtaacaaccataaagcttattgagaggttgaaagtggtggaccggtgggtgaagttataaatgcaaatggttgaggcctagggaattgagttactaactgtgtacccaacattaagtcacagcctgtcctttctatatcgagtgtgaaaggtcaaagatgcgtacctttgtttactcttcaattcacactttatatacgactactactagtactacttgaactcaaataataacaagaaattggagtgagattatatgattttcaattatttgtacgtagttcagatgtggtgtgtgtgtgataagtctttgatttgtagtgtataagaaaatagcgattacagcagtgtggtttgaaaatgttcgatactatgcgttgtcattgaattaatttgacaatggagttatggagcagagagactctctcctttaaaaattaatttcccaaacaatgaattctgatagaataaatttatgcacatttattttatactatagtactatgtgggggacaaaaaaatactatataatcaacgttattttcatactatttaataaaatacgtatataaatatcgaataagatggtttttgtttgcgtatgaattaggtagatgtgataactcgctgtctttgatttttcataataagccgtcaatatccatttatcactagttggaacttggaagtgtatatatatatatatgatttctttttaagttctgataaagcaaaaaagaatatgttgacttggtcaagtggtccaatgaatccaatcttccagcgggccatttataaagagactatcaaactaaaaagtggtttacgagtataaactaagttgataaaaggttttttgttttgttaaaaggaaaattatgttttgcagaatgatttatcttacgagtataatgatcaatgatgtattcttaaaagcatgggaagattgacttcggtttaaaaatatatccagtttcaagtctctcacgttaagtgtaatagtaatataagatttgacaatctttatcatcgttgactttgaccaacaaaaatagtcaaatattggatatttggatattttctaatttattcagacaatgcaaaattgcaggttcagtatcaatgtatcatattcatgggatttcagattttgtgatgactattttagaacactactttgtgattatctgaaatgttatatttaggaataaaaatcttagctaaacttttttttttttttacattcgtgctatttgaaagaaaaaaaaaacttatagttgctatgaatgagaaaccatcttcctatgtatgttgacctgataatcacttgctatgaatgagacatttttatataaaaaaaccgctatgaacgagacatttaaaaccatcacgttgacagcaaactgcatataaattaagttaccgaatggtttaatgggcctagtaatgggccaaacagtctttctcctttatttcagattgatatagtggccactacaaatgcaggacctgtcccgttgaggaataaccggttttcaattcaattgagagaaggtttattgtattcgtcgtctcccatccgataagagagaaagatagtttacagtcacagagatacttttctcactcatctctctctctctttcccgcttccctccttaaaccccaattcttctcctgctcacaaaaaccctatcttttgggttttgttatacagtgatgatgaaacctgcttctttgcaaggtttctcctcacatgcgtcctcctctatctactccgatgttcgcaggccagctactactccttcgaaaatggcagcttttagtgccctctcgctttgtccctatactttcaccttccgccaaagctctcgaattaagtctaccgtttcctgttccgtcacttctgctcctgcttctggtctgttgtttttctttctctcctcgtcttttcctattgggttcctcggaaattaagttattgattgagtaaatgtgctccactactgtaatgggtttggagtattttgaattagcatagaaaaaaattgaaactttataagatttttggttgatagtggccgatagtttggacagagtttctatggagattctcactctgattctgttgatacttgatagtatgagtagaatctttgaaatttggttgttttatgtgtcgtgaatggaccataggagactgactagtcgagtgtttttatttgtgtgtgtattgactctatttgttgattctggtgttatgtatcaggtacatcttcatcctctaagacgccacgtagaagatcaggtcgactagaaggagttggaaaaagcatggaggattcggtgaaacgtaaaatggaacagttttatgaaggaaccgatggaccacctctccgtattcttcccataggaggccttggtgaaattggaatgaactgtatgcttgttggaaactatgatcgttacattctaatcgacgctggtataatgttccctgagtaagtccggagatacattcatcttgttaatattggcgagaagtcattatctttgtgtgcgtggtgctaactctccgtggaaaacattgctgtataatgttacagttatgatgagcctgggatccagaaaataatgccagacacaggatttatcagacgatggaaacacaaaattgaagctgttgttataacgcatggtcatgaagatcacattggtgcgttgccttgggtaaggtcttcttctactccttgaaaaatccataatgagccatagacttttggagatttctagatagagtctagcttttatttttcaattaacagctgcggctcgtgtgtataatgcagttcttttcctcagtccattgctggtttctgttctttttttgaccgatacccttttacatgagcaggttatcccagcattggaccctaatacaccaatattcgcatcatccttcaccatggaggtgatttacaccttgattcttgacttttacttttctgtttcaataagtcctatttttcttatttatattaacagctactagcttagatatatagcttcagttcaaaatgtatgtacctcagcttgcgttcatatcagtcagaattgtcatgtacaggcagttagttgcctatatcctatcacgcttaatcttctctcattattatttttttgtttttctgtgcaatagcttataaagaagcgcttgaaggagcatggaatcttcgttcaatctagacttaagacattcagcactcgaaggagatttatggctggaccatttgagatagagcccattacagttacccattctattcctgattgtagtggtttattcctccgttgcgctgatggtaatattcttcacactggtgattggaaggtagagtaacccctcataaattatttcatgtcccttaaatagccctcaagctccatgagataatttggttgataacagattgatgaagcaccattggatggaaaagtctttgatcgtgaagctttagaagaactctcaaaggaaggagtcacattggtaatgattctgtgcagagtcatacttttgttaaatgttgaaagcaatataaactacggttgaaatggttatactgactactataggtgataaattaaaacaatttttccatctcttacacagatgatgagtgactcaacaaatgtgttgtcacctggaaggacaattagtgaaaaggtggtagcagatgctctggtaaggaatgtaatggcggccaagggaagagtaatcacaactcagtttgcctctaatatacaccgtttgggaagtataaaagctgctgctgatataactggtcgaaagttggtatgtctttccccccaatttttagctcgggctatgttttgcctattttccatcaagattgtagataatcctccaactcctgctagcgttttttccatatattccaccatttattgcatgtcgccaagtgtttctcaaattatgaagcaaaagtttcatttaggaagttaaagaacaaaggttcatttgtttttgtatccaggtctttgttggcatgtcgttgcggacatacctagaggcagcttggagggatggaaaggctccaattgacccgtcaagtctggtataagacctttctcttatacaatgaatttgaagagaaacttttcgacgttagcatatgctccaattaacttatacgataaatgcataaagtttgtttttaaataaaaaagcgccaacacctgccatatgttagtttgatgattcaaacaagttctggtttctgatttcacctaattgtttatccttctctaatgtttacgaagataaaagtcgaagacattgaagcatatgctcctaaggacttactgattgtcacaactggatcacaagtaagttaatcttgtcaacttgtggagtggtgatttcaattcgactttcctagctaatttatttgttactcttatttgacaataactctaatcaggcagaaccacgcgctgccctgaatcttgcatcatatgggagtagtcacgcattcaaacttacgaaggaagacataattctttactctgccaaggtgtatatatgaaaatctacatacataggcttaagagcatctaataagttagtggctgtgatcgctgatatctatttcggtctaatgttttaatccaggtaatcccaggcaatgaatcacgagtaatgaaaatgatgaatcggatagcagatatcgggccaaatattatcatgggtaagaatgaaatgctccacacatctggtcatgcctaccgtggagaattggtaagctgctgcttctcttaagactgttgataccttcagaagttttgttgccagctttcctttctgtttcttttcacttcatcaatcttaggcttttagcgcatatgtaaaggtgtaaaggcaatagttccctgtttgcaaactgatgaatatctaagggaaaattttgtttctaatgattgtaactattccctattttgaaggaagaggtccttaaaatagtgaagccgcaacattttcttcccatacatggagaacttttgtttcttaaggagcatgagttgctcgggaagtctactgggattagacacactactgtaagtctctcaccaaagacatatgaactcatggtagataaatagcatacaacataggaaaataccgattgtgaagattttttctaaaagttctgcaacatgtttatgagtttgatgaaatagatgcaaatttcatctggtcacaaagtgcctcaaccgtgaaaacagaatttctgagacatgttcaatttaatacaaaaatttcatggaaggatccctttattatctctcggagatataaaataaagaaacccttgtttgtctggtattaaaacctaggtcaactagctgaatgtttcactttttttttttttcattttctccaacttcaggttataaagaacggagaaatgctaggagtttctcacctgagaaatagaagggttttgtctaatggatttagctctcttggcagggagaatttgcaggttgatttgattgtcactgttgtgttctgtttatcttgtgtaaatgactagattaggatattgaataatcctagcgttgctgcagttaatgtatagtgatggtgataaagcatttggcacatcaagcgaactatgcattgacgaacgacttagaatttcttctgatggcattatagttctgaggtaaatctgaattgtaacattcctgtgccagtgcattttgttagtcgtatttaataatttgttggcttccttgtatgattttctataatccagcatggagatcatgcgtccaggggtctcagaaaacactttgaaaggaaaaataagaatcacaacgcggtgcatgtggcttgacaaaggaagacttttagatgcacttcacaaagcagctcatgctgctctatcaagttgtcctgtgacatgtcccttgtctcacatggaaagaacagtctccgaagtcctgaggaagattgtaaggaagtacagtggtaaaaggcctgaagtcatcgctatagccactgagaatccaatggctgtccgagctgatgaggtcagtgcgagactgtctggtgatccaagtgttggttctggagttgcagctttaaggaaagttgttgaaggaaatgacaaaagaagtcgggcgaagaaagcaccttcacaagaagcttcccccaaagaagtagatcgcactttggaaggtctggtcttactttcacatttgtaggtctatattcgggatgtaatctaacatgtttcagtcatgcagatgatatcattgatagtgcaagactactggctgaagaagaaactgcggcatcaacatacacggaagaagttgatacgcccgttgggagttcttcagaagagtcagacgatttttggaaatcattcatcaatccatcatcgtcaccttcaccgagtgaaacagaaaatatgaataaggtagctgatacggagcctaaagcagagggtaaggaaaacagcagagacgacgatgaattagctgatgcttcagattctgaaaccaagtcatcaccaaaacgtgtgaggaagaacaaatggaaaccggaggagataaagaaggtaatcagaatgcgaggagagctgcacagtagatttcaagtggtgaaaggtagaatggcattgtgggaagagatctcttcaaatctatcagctgaaggaatcaatcgaagcccgggacaatgcaaatctctctgggcatcacttattcagaaatacgaggttcgtctctgaacatatgaatctgtagccgtagatttgaagttcatgattacaagatcaaaagctcttaagttagcaaccaagatttgatgtaatacatttttgtgcaggagagcaaggctgatgagagaagcaagacgagttggccacattttgaggatatgaacaacattttgtcagagctaggcacacctgcgtcttaagtaatgtgatttagatgacattatcttcccaaaagaatcatctccagattttcttaaattgaacaaaaacagaaaagcattaattatattatgtatgtaaccagctgtaagatgatttttgtctgtagaactagaagctatcaacgcagaatccaaatcccaagggacaagaaagccatgactagttttttcggtttggtttaagattcgctttggcttcaaacacatgactaaccggaattattcaattttgatgttcatgtggttttcttattggttttcgttgattttatataccaccaatcactaatttttttaattaaatccggtttagatgctgttgtacattgaaccaacagttaaagtgagaaatgacggtttcacccttaaagcagcgtagcccgtctggtattccaccgtcgatcgccgccgtggcaattttggtaatttattattattttaaaaacaatgtgaaagagattaatgcaaagttgagagctgagtttccgacaaatttattggattgacgaactttgaagaagaagaagagagatgccgaagagaacgacacacacgtactcgagcgaggacgccgcgccggatggacccgactctgatctcttcgtatactactgcaaacactgtggttctcatgtccttatcactggttcgtttctccaatttcaccttttgattccgagtttggggtttagttgcgttaaattagagtgaaacccttttacttgcgagattgctctttggtttccagatacattgattgggaattatgattgaaagtttcaatctttgatttactttgaacatcaggtcatagtagtttatagtttttaagtggtggataacttcttgctttgaatttagattaacaacaaactactttttaggtccaagcacagatttttacatgatttcgatttagattcttggggttttgttactctggtaatgttgatattcgtttgtgaactaaaaagttggaatgtgttaagacttgtagctcattgcatgtttccagtaattctgtagatttacttatgtcctgaatctttctcattggcttggttactccttgagaacttaaaagctaagattttaagtggtgaaatatgtcgtttatccgattaagagtgtaacatgcaaagttatggtatccttgtatattgcttgtatactaatttagatcctttacaagatacccagttgcagaagatgccaaaaaggaagaccgacaggtcgaatgtacttgacaagaagacgcaccttgctaggttgaatgtcagcgagggaggaaaagttttattgaaacggtaagttttggtctagagctactgagccagtgtttggatttaaccatcgatttatctaaaagtttgtttctttatgtttggtttgttaccagtggcgaaggaaaaatggagagacagtttagaatgaactgtatcggttgtgagctttttgtttgttatcgtgctgaagagaatctggaaacagcgtctttcatttacattgttgatggagcacttagtgctgttgctgcagaaaccaacccacaggtacaattggtttcttataatcttttcaattccaagatcaaaaactagatcactaatctgttgtggcggcacacaggatgcaccagtacctccctgcatttcacaactcgacggtggacttgttcaggttgcaatagaagtggaagaccgtgcacaacgttcagcaatcacaagtaaaacatagtattatggcacaaaatctattttcttactcacttgacatggatcttcgattaaacaattgccatactcttttttctctctgcaggggtaaatgctgatgatgttcgtgtgactgttgctgcaccagcagcccgtggggaagctaacaacgagcttctggaattcatgggaagggtaccaaatcaatccgttattaatcactttttaagatttatactctagtcacggcgtttcatattttgtatgtgaaaatgaggttttttgaccaacgcgacacgacctctgtgtttttactctttcaggttcttggtttaaggttgagccagatgactctccaaagaggttggaatagcaaatcaaaactcctcgtggtacgttgatccttcctttgagtctcttgagaagactttgtgaagattcatctctaaaaactcttattgtttttcttagctctagatgataaggttttggcttttatactaatggcacaaggacctctaatagtggtgatcaaaaataggttgtcgcattgaatgaataacccattctgatttttgttcccctgaaccaggtcgaggatttatcagctagacaagtgtatgagaagcttctcgaggccgttgtaccgtaaaaactgcggtttgtggttggtgaacgacattagctgaaatctctgcaactccttagttaacaccctttattggtatgaagaacgagttttcgtattttacttgagaaagatagctataaacaaattgctttcttctttgttttcatgcttatgcgacaactaactctttttatacaatcccctattgttaaaagttataataatcgtctatactctttagattccttcaaaactgatttatctatttcggaccattcgaaattgaagtcatatgaaaaaaagtttgaaaatctttatatatatgtctgcactaatttcaaaaacctgttattaaaaacaaattttcagtgtataatctgcagaataaaacgatcactattgcactaattaagcttaagaataagatatatttgtgtagtccaaaggtgactgtactgtgacatgtttcacatgtttcagttctatttcatcgctgtatcggaccaatcgtcacagacacagttagctagtttgtaattatatatatctgccccaatctctatttattaatattagagacatacatatacttccagaaagtgtttaatgcgtgacctatgtctatcaaactgattaatatattgcatccacttcgataagacgacatactgatttatatttaatttttctattcacaagtaaactgtgaatcccacacatatataatatatttatttgatttaatttataaaccacacattttacatattagttggatattctacaaggacatgacttgattaatcaattaattaaatatacatcgaatcacattgctctctcctcttgatcttcacctttagcccaccagccatgtgagcggttagaagaggaacaaagaccggccggttattgcaaaccggtataatcttaaaccgactcaaaactgaaccaaccacgtatttcatttgtgtaaaagccatttctttacctatgcaaacccttggtccggcttggaaaaccggaaacttgaacgaactcacacttttcaaaaccggttttgtaccgtaactcggttcttcctcaaaccaccggtttggtttaaactcgtcccaatctttaccccacaccttctccatccttcccataccgtaagggaaataagtgactttgtctccctttttgagaggtgttccatctggcaaaatgtcgtcgtttgctgcatgctttgagtcccaagccactggtgggtaaagcctcattgcttcacacagacaagcttttgtgtaactcatctctctcaaatcctcaaaccctaaccctaaagaccctttgtttctcaattcgtcgagtatcttcgtctccacgtcatcattttgactcaacaaccaaaacagccacgtcatcgctgccgacgttgtatcccttcccgccataataaagctgattacactatccctcacggcttcttccccgtggccagcggcgagaaacctcgacagcaggtcctgcttgtccgacacgtcaccaccgatatcgaggcttttctttttggcccggatgatctcagacacagacaagtgtacggtcttgatggcttctctcaacctcttctcgctccctacgttcaagaaacgctttactttccacacggcgtaaaccggctccgtggcgcggcgagcgctgatctccgccgctacatcaaaagccttaacaagttctggaacgggtcgggtcaaatccaaacaatccggatcccaacccaacgacactttgcatacaacatcgaaagcaaagcgcttcaaaacctcctgaaaatcaaccgtctctccacagtccacggcggaggaaagcaccggaatgaggcggttttggacttcttcacggaggatttcgaaagtgaattccctaagagaacgcattgtaaactcgtggctcgcgagtttacgctgtgagctccataactcgccgtcagaattaaagattccgccgccgagtagatctcctaggaggtcggtgaaaggtttgcctttagggaagttataaaaatttgttttgagaatgtgctcaacgttttcagggtttgcagtgatgatagtccgacgaccgaagaggagatcgacggtgatggtttgagacggagagagacggaggagatctgtgtaccattggagaagacggtggcggtttttgttgaaggagagaatagagccgatgagttggtacgatgtcggattagagggtgatgcggttttggcttttagggtttttgttgggaatgagaagattaatacaaaccctatgattggaaataggatgagaattattgcgttgagcatttccattttggattcttgggtttcttgtttgggtaagttaattatgttgttttgatttgtgttcttgatctgtagaggaactattatatatataggagaataaaaacagaataaaagttgtggctccgaccatatcacttcggtacagaacacgacataattaataaagctttctttcatttctttattgaaacttgattagtattttgagcgataaagctttttcatttaagaaggtttaccttaattagtattgtctcaagtcggatcccaaccctaattttgatttataaaaaacaagttgttttgacttttgagtaaaatgaacaaacaccttcattcattttttttaacaaaatggagaaaatgtcatcgtcaaaagattaaaaaattaaaatggaaaatgtgtaagctcgtttttcttttgtcaaacatataagctacttttgtaaagaactattgtatagatacatatacattggacttggccattataaattggaattgttaaggattttggctatattaataagaaaatttggtatcctctttgatatgatcaaattaataaaagttacacgtgatcaacaagtttatttgcttaaacagttggaagaaataatcaagctaattaaaacgtttttgaaacatattttcagtaaatgtcgacgcaacatggcaatcacacagggaccaaagaaatgaagattgatgtataattaagttgatttggacaagccactaccaccgaaccggtggccaagtctcccgccaaaactaataataagagacatagacacggttcaaacgctgaaaaggttaaacattttcatcaacgaaacaattataaatatattttatactgtatttagttaagtggtctctcatcagaacttataaatgttgcttgtattaaaactttttgccccttcctggaatagtaacagaatctttcacttaaacaacaaactctagtagtattagttattctaatcattaattatgtccagcccgtgatgacataagtgatgatctgacaaataatgaactttgatacttaggagatctttttgaatcaagggaatcatcaaataatatataatactcaattactcagcatttgcaataaatattatcttcgtttcttaaggagttgatccgcatatatgcccaaagaccaaagtaagtaaccaaaacacattggaatctctttgcaagacgaaattcgaattcggacataaaatttgatttgtttttaatctgtgtatctttctaaacaatatttaaatttggattacaactagaacaatatccttacaatcggttgagctaccaacatttttgttgctatatctagtgtcgataagttagtgaactattgaaatcaagattactgtatctcactagcatatatgtttgttctaatattaatttaatcacagttctaaattaaataagtgtaatttctttgcgtgcagacgaataattcattacatgaggacgacaaagtattggttggagaatccgccaataccagacatgtgtcggataagatcgaacacgttgataaaattcttcagccgaaatttgaaacaattgaatgcacgattattattaacgttatgtatgtagaacaacaaataaaaatacactttttgtgactactagttcagtggatctttatcagttttcgtgcacgtggttcacgtggtttgaaaatcgagtttctttcatagagcaaaaaagtcggaactagttccattgacttatttttaagctcgtgttggctgaaaatcatccacattttaaaaaataatacaatcttacctctttgtctcatctatactttatttcgttttagatatttcatatttatttgcctactcattaaaaaaatatctatctagtaatcttttttaactaactcatttcattaaaatagacgagaaaggtatagtggtttatgtatattgattataaaataaacaaaatgatgcatacatttcttttgtagtccggcgttaataattgatgatatgcggagtgaaaaaacgaaaaccaatggttaattaattagttcatatgcaaaatatggtgaaaatatgtaagattggtgtgagcctgtcacgttgtgaccagaaaacggcgccgttcggagaactggctccattaagtacaagagctctgaaccaaaagcatcgcaacgagtttctacttatttattagaaaatgtccacaagtgtcccattctttgctttgatttgacacacaattatttgtcataacgacatctacaaaaaaagaaagaaagagaagaattgcccttctttgaaagtactttctctttcatttttcgttctcacaacttcattttcaccgtccaagagactcgtggttttgactcgcactaatttttatgatgcttttgttttcatttttgaaagggagaaaagagaggtactatatcaaatagacatcattttactatcaagaataagaaattatttcaatttttttaaaaaattaataaataatttagaaattcaacactagcttttcacggttaaatactaaagtctaatccataaaactaaaattttagccccatttattttcttttttcgttttatctcctaataaccaaaaatatacaacggttgtgtttgtaattttttcatcaaatccgccacaaaaggattttggtttcactttttggtaggtgaacaggaattgaaaatttgcatgtctcacttgcgggtcaaatgttgttttgccttataattcttctttgattttaaactattgaccatagtgttgtacttaatatagccagccccaaagcaattccatcacatttttaattaaccaagaccgcctggtttggtttggtttgctttatcaaaagatgaaatccatattacaaatgtcaccaaaccggattcataaactaaagtagcctaattcctgataacaaattctccagatgagatcaaaaggatttgtatttgatcaagaacaacaacaattctctcctatttgggaaacctctaaagatacatatattcaccagagcacccttctcaacttcatttcagttggcactcttcagacgcgcaatgagctcatcctgcaaaaccagtcaagttccataatcaatcagtggaacaagagccacgataaacaaagaactggaagcaaccccatacgacagattctttaagatactattgagagtacaagactgagaagctgtaaacaattttaacagagttttcaaaaagaacagtagcatatattgtgacttgcctttcttccttttgttggaaggcccttctccttgagcatggcgcggagcttctcaacggtcaaagactgaaagtctctttcgcctgtgcgactgcttgatccttctgtgcagaagaaattcattgtttaaagtccaagtgacatacgatcttgaaaattaaatcaaatagaattaaaggtataaagagataaccttgtctagatgcattagcagctcttttagctgagcttctgtcgtccagagctctatttgcagccctacgaataagaaaaagtaatagatgaacacaccatttatgtaggcaataagaaagattagtgattttcagtcagtaagattagtcacgcaagggaggaaagaactaatcacgtgtcgtagttacctctttttaggaccatcttcagcagttccttttgagtctttagaactagattcgcctttttgcttctttaacaagagagatctgattagtatattttgctggtttgttttgataagctgtccttctggatatatgacaaacaaaataagttaggagttgttagtaagacaaaattctacaggaaacaaagacttattactgaaacgcagcttattctgaaactgataatcctgagactcccaattacttttccagtgtagccaattctcacccagagagaaaatgaaaaggaattgttttatgagattgctacaagaaactgtctctaagaaaacaactcgtggaacaaaacgaaaaaagaaaagaattacctgggggagatgtgtcatgctcacaaatgtagacccgcaagcttccctgaaatcttacacaaaagaaagttactaaaatgtatgattaagctttaacaaagaagctattactacacagatagatgaaacaacttcaaaaggaaagaaacactctgagatcctgccagtctgccacattcacaggaaaactagaactgaatgatcttataagaaaataaattgtaataaaactccaatatgattggaaataagagctacgcattactaaatccagcttttgacagcaacacatggattcaaagcagtcgcttgccaacgttactaaagtaattaacaagatcaattgtcatgaactgaagcagtatattataagtgaactcttgtaattatcattacacaatttgatcacaaatctcaaagcttcaagcatttatagtaaatggtaaaattcaaagtaaaaagcagaaactttgagcctataggcacaaagtgtggaacctaaacctaaaatcaaaattacaattcagacaagattttctctgatttaattctacccaaatttcaacgatctggaactacaatcaagatcactttgaagaattgaagacgcatacaaaaagctaatcactttgaaaaacccaaaatttcaaaattcggaatccataatagaccttagaaaacaaaaaaggcgggaatgggttagaaaagttaccggattggaagagacgacggtagaagacaagaaacctcgagacgggaggtcagaaaggaacttggaagcagtttgatcagaagaatcggatggttgagatgatgaagcctccattgacaaaccactgataaaccctagccgaggaagacgaacccagaagagcaagagagggcgagagagcaaagagagaacagacagaaaatcgtttaggaacaaagcggcacagagatggtcaccgtccgattgcgtctattggagaaagatatgggccttattaggccttaagatgattaagtaagaagttaatatatgggccttaatataatttatatatacatgttaaaacgtggtctattcaaagctaatatataggccttatcaggccttaagatgattaagtaagaagttattataagagacagagaactcaaagctactacaagccatgaaatacaaactcaatatgccatacataagctctgatcattactagattaggagcaagaatcaacaaaaatacaaagcatagattagaatctgcacatttagattaatatatagttaagcaagtctgcagttttgctgcaataacttataagttaacaggaaaaatgaaaaagagcttttttgttttgttttgtttgatctctctctctctctcgagtaagtcattcgaatcatagacatataagaatcagacacttgcagggtcgaaatgatgattaaatctctaagcttctggttccatagctcaactgcacaacattgtacaaataatcaaaggtgtgagtcaaatcaaataatggatatcaaaattgtgtattttacaaagttttgtttatgaatctaaagaaatgagccagatgatactgtaaattgagcttctttgatattatcaatttttagcttatttgatgagaatcaatgaagatgacacagagcagcaaattcctctaagactaatcaaagcaagctcatgaagaatctcaataaccatagataatcaattgcaacaagctacattgctgaatattactagaattcacttacccttggctatcgagattaccatggccgctacttcctccacttccataagacacatcatcaccaccaccagctgaattctgccaaacgctttgccatgcctgagaaggaggctgagcataaacaccgctaggatccatcgccggtcttccaatcatcatccctccaggaaccgccggttgtcccatcggtggataataataaggaacaccgctcgcggcgggagcaaccatacctcctccaccaagagccgatgctgcatcttcctcttccttgatctcttccctaggaacaatatcaacaaggaaatcgaagatatcggttctagtaatcgcagcagcgatatcgtttttctgaagcgtacgacgtttgttctcttcagcgtgaagccaagatctaatcgtaagttcgagaatgaaaagctcacaagctttcgcgaagagaatcggtgcttcggcggagatcatacgcacatcttcatcagctttcatgatttttttgatacgagctagagggagctgatggtttttgaaatcgtttacctgttcgatctcttgtctctggtatgtccagaacatttgaagctgttgctgttgttgctggaggaggtggtggtatgtcgctcctcctccggtgactattgatgcagatccagatggtggaggagggattacggttgtgacggcggagccaggtggatagacggaggttggtggtggttgctggttgttgttgttgttgttattgtccattggatctttgccttgtgattggatcaaaagatcaaactaacgttttagatagtttttgtcatatggattggagtaatagtggataaggtagacagcgatgtagctgatttctttctatttttatttatctataaaaactatattattgatatatatattatatagtttgattaaaacgacatcgtattaatagtttagtcaaccgacgccgtgataaagtgtgttcacggtgatgctgcagaaacaggtctcgacgacgacgacgatgacgacacaggagctagcgatggaaggagagaagcaattggaagaaactattgaagcggcgtttcagataatttcagccatgaatgatgagctttgtaatccgtctttgtggtctacttcagctaccccgagttccgccgcgacgacgacgggttctaatggttcggctctcgtttccgccgatgcggctgcgattgatggaacatcgcatcattcggaatctgctggtggtggcgggggcggaggaagtggaaatagtgttttggatgaggcgagtcttcggtataagaactcagtgacttcgcttcgtgctgttcttgctgcgattccaaattcgcagaaggtattgaacataatgtgatgttactaactatttcgagaagtgttttgttctgagttgtttctggactgaggaaattttgaattcctagggtgttttgagatcttagattaggaaatcttcgaatcgatagagagtttagatgaaggatctaatgcttgttgagtgtcttgttcttcacttgtagtgaacttgcttaattttaaatgagagcttttttgaggtttcataaatttgaatttgttcatctattacaggcaaaagcatctgaaatgcaaaatggtttaggatctcctgaaagtgaagacgagatcgaaaaattggaggagcaagccttaagtctcagaatggtaaagctttctgcaatttctacatctctttgttttcaatctgatgttactacattgatacactattcagtctcgaattctctgtacatttcaactcacatagcattgaatttgattcatattttcttgtataaagtgttctttcccactgtctagtgtaagtgtttgtatcattatagcttaagcggttctagaaccatggaaatgttgataattttttgaatacatttcagccatctggtcattttgatttctatgttaataaccttatgggaagtgattatattgttcttctctgttggcattaataaacggaagcttttgttcatgcaggagattgcaaagaagaatgttcatgttaaagaacttatagataaacttcgggaacttatagcagatatctctacatggcaaagcccttgttctgtttgagttttatttttttgacaatagtgagatcagtttagacaaagattctaagccttgttcttgaattactccatgtattagttttagatatttgttattttgatatcatgaagccaaaaaaataatcaaaaatgacttttgtatataaaaatatttcagacaaaaccttcaaaccctgtgtctgtttttcttttttgtttgtattgatctgttaaagaaacacttcttgtagtgtttctgaggaatcaatgaccgaattttctgagaaaagccataaaaccaagaccagctactaatgctgcaccagccgcaactccactataagcagcagcccaagcgtctgtctctacatactccattgattctgctgatcctgatgctcttctccttcttcttcctttgccttctcttgaatcatccaaatgtaatctcagactctgcaatttataatgatcaaatcaattcagaaagcaaaaggggtttatgggcaatctcatgaaggtttcatcttcgactttggttcttgttgcttatcaaccaaaagtttaaagcaggaggaaatcgttctttttaccttccagccaattgattttgcatgctctatggctgcttgaaggtcactatctgaagccaacaacactttatcgtggtcttcatcttcatactgcacattataaccatcattttaacaattcagggggtgacaagagaagaattagataatgattgcatcatagtctttatgtaaaagaaaatatttaccaaaatttgggggaagttatctggatcgatatcatcccctaccctctgaatgatcgcggttatcacctctgtcaaactccgagtgtctgcaaaaagaaccaattcagttaagtaaaagcaagactacaactatttacttgatgaataaaaatcaaaattatttttaccgcttatgaatctgtgtttcctgtgctttttgtcttcaattttgaaagaaaatgtatttgcaaaagggaaagattttcctgtctcagcttcggaagcaaccttcatggagctctcactgaaacaaattgttccccatgttgtcaacaaagtcagcaaaaccaaagctttctttgaaaagaaactcgataaatagtggaacaagtaagactagctaataaccttctcgagtcctcatcgtcctcattaggagacaatgccatagctgaatcccaaaacttttgcatcattgtgtttgtcgcctcattacctattcccgcagtagttccagcctgaacacatcaaaataactacaagattgaaacatgtatctagaaaaaagagaacagtggatgttctaaacgaaaaaatttacagacggttcaagagatgggagttactgtggcaacagcagcgtgagtgacatggattacatcgacaacagcaactacatctccttctgcaatcagaaacccatttatggtttacatgcgtttgcctttttagtttttgtaagactttacaattgaaaaggtttcagaattctcacctttgtcagtaacgggaaggtgtaagaattttccctcgtgcatgatgtgtagagcttcaacaattggtgtgtcaactatcgtagattctggattctgagtcataacctatgcattaatgaatacgaacaaatggttaaattcaggaaaaaggagcaactatcactaagctggaaataagagtctaagatggttgaataatacaagaccctggagactaatcttttaatcttaccgtttccactagagtctcagatggaggaagattttcagccacaacccgcatcagtatatccttggaactagataaatgaaaaaacagaactcttgaaagttagtgataatatattcaaaaagaaagacagaagagtttagccaacgcataatctatctaataagttcgttagaacaaatttcatttggtaaatgtggttctctagaacaaattgacctgttctagttcatgtaagggtctttgcagaagtaaatagtcctatcagtaaactaatattatagtatcagaatgaaatttaggagaaacactttagccgattaatgaggatggatgtaaggctttcaggatctatagggtaaagaagacaaaacttcaaaggctttcagaagggagaactcacgtaaatatccctcgaagcttgtcctcgattatcacgactgcacagcttgattggaattcaaccatcttctttgctacagtcaacactgtgtcagttggtgagactttcaaaaccctgaacaaacagcggtgttaagttaaaacaacaaaagagacaggaaacactcaatcaagattgtaaaaagaatttcattagaaaaataagagattacctactttgtatcatctggtataattgttgataaagaaggtctaaacatccggtctcgtagcgtttcaataaaagtgttgggaactacatgaaaaaatcaacattttggacattcaaaataagaagcaaacaacaaatgagattgcagcagttcctcgcctacctgaagtgtttgtcccccaacttttttcaacaccttcaacagcagcagctattgccttacctttctcagcagccctctccatacgagcaattgcatcatacaaacactttgctatatctaataaagcaataacttcgccattttcaacaaccggcaaatgtctgaattttcctgcagtaggtaaggttaagatatagcctcattaaggatctagacacagcaatcagataaacatcaagtttctctagcttaaaaacaatgagacaaaccttggaccatcttttggagagcttcaacagcaagtgtttctgagagaacaaacattgggttcttcgtcataaccttagatacaggtgtttcctcgacattaagttcctgtgaaatcactcttgtagctatgtcctgaaaatccaaaaaagacacacatacacacagatcaatgaagtctccatttccttcttccaatctgtttctaactttttaactacacttagcgaatagtggcataccttatcagtaagaataccacaaagcatttcattagagtcagtcaacaacaaggcatcaactcgtcgtgaagccatccttttacaagcttcatatatagttgttgttgctggtactgtaagtgctttcgatagccttaaccgtttcacagtccgctcgcctcctgttaaacccctgctccatatacagatgagagaaaaaagttaaaaccaaatcacaatagcttcaatggaaaagaaataaggtaaacctgaggagctagatgttctctatgaattgaatacgagcataaactagggtttatatataagattgagacccagctgagacttacaaaggagaacgagaaacagtaagagatctccggccagtatcgagacctcgttcggccatatccatggatttcttctttccgtgcaatgacgcagtcgtaacggataagctccgtcttggcccgccttggctagccatatctactgtatgatatagaaaaaatcaaacccttgtaatcgtcaacgcttacgaaatgattaccaaaattcgaataaggaaagtttttctggaatcgaaactaaacaaaacgccaaaaaacaaacactaataagaatcagaaaactcgtgaaatcaaagctattaccaggcggattcgtcgggtcaacaaatggattctgggattgaaaaaactgagctacaccaagttgggattagttccgtttcgtagatgctctcttctctcctttctcaaaatgttcgtgagacagataacggcaagagagaaaacgacgatttgtgagacgagaaagattacagagattctcccgggaaagtgacgggaaaatgtaagaaaattagaaagcaagaaatattctgtgatttttctctctgaaaaacacgttttattttgcgattttcacccaatcggattctttgatttcgatgctctgtcgaattggacgatcgctaccttttttttttttggtctttgcttttttttttgggggggcaatatattgatttcttatatctggttattgacacttatatcctcaatatttgagaactatgacaagtggatcaaagatttgtttctcatttggcaaagggttttatcgtcattagctatttatggtcattattacacacgagttgatactttttctggattttattttttatatgttgattattggatttgccttttactctttcttcttagcatttggatttttttttttccttttttttggacaaattggatttcgtctaagacagaaaattcaaactgattttttcttaaaacaggttaatttaattaggatattaaaagttctgtgttctatctggataaaaacgtgtagactaaaaacaaaatgaaaataaaatatccattctgtctcattttcagtttcttacaatgtatttaaggatttgttccatccatggttgtgaaatctgtgtgaaccaaaaaaaaaaaaaaaaacagaaattttaatattcaaactttatattaattgttgaatatttcaatgttaaaaacagtgaaatgaatcaatgtcacaacagttttgaccaaaaggaaaaagaattggtgtcacaacaattttgaccaaaaaaagaaaagaattgaggtcacactcacaacaatagtcaataaccaaagctactttagcttcatggatatggaccaaacataagttatgaattataatactgggccgaaaactcaaagcccatatgtataagattcacgttgttcgaaatcttttcccactaaacaataattttataattaaacctaaagtatgtccacgtggataccatcaattggttcaccacagcattagctttcacatcacacgagaagcttcgtctctaactaaaaccaaaaatactccagctccttcaccactctctatttctctctccaaattcatttcttctctctttaagacaagaagttatggcggattggggcccagtgttgatcgccgtgatcctcttcgtagttctatcgccggggcttcttttccagattccggcgggaggtcgagttgtcgaattcggtaatatgcagacgagtggcgcttcgattctcgttcacgccatcattttctttggtctcatcactatctttaccatcgccataaacgtccacatctattccggttaactgtttagccagacaaaccggtgctgcttggttttatttcaatttgattgtaaggtctggatttgttttgtttgtaacattttcggatttgtgaatataatcaaaatttcaccaaatgatacaacatccagttttgtttttgaatctggtatcaatctgtagagtttgtttgggatctggtttaatttggttttcaaatgctacttgacacctaatgtacatccacctaataagtgaaacgacgacgttttactattattgggcctgtggtccgttaaaaagcccaatatgctgtatctcgtttaatttcaggtgaatctttcgacgaccactctctctcttttcctctttgcaaatccttgaagaaatccaaaatccatagcaatggcgacttcgatagctcgattgtctcggagaggagtcacttctaacctgatccgtcgttgcttcgctgcggaagcggcgttggcgaggaagacagagttacctaaaccgcaattcacggtgtcgccgtcgacggatcgtgtgaaatgggactacagaggccaacgacagatcattcctttgggacagtggcttccgaaggtagccgttgatgcttacgtggcacccaacgttgtgctggctggtcaggtcacagtctgggacggctcgtctgtttggaacggtgccgttttgcgcggcgatctcaacaaaatcactgttggattctgctcgaatgtacaggaacggtgtgttgttcatgccgcctggtcttccccaacaggttattgcttccttccttccattttcaaaaaaaattgtgttctgattatccaattttttgtatggaatcaagacaatgttgattgggatttaggggttttcattgtccattttcagttatgaaaagcttattgaagagtcgagaacttatatggacaattaagtaaattggttctgcataatagtgttctctcgagtacagattttcttgcttgaagaatcgtccagtgaactgtggctgtggctattgttcttactcttttgagcataatgagttttaacttcgccgattatgtgtgtggaaacgtgttgttctttaggtgattagcattacaggaatcaagaaactaactgaagattgagcttaatattgagagttgaatagattagcgtagtaccacacacgatcatcttgtgtagtagtaggaagtttcttagcagaaatttgggaacaatgtctcgataaaaggattttggtttttttaatgacttatgcaaggatttggttttctggtcactcgtgactggaagtgggatgcaatggtgataaagctgtatcacatggatgtgaacttgtttttgctccaaggtttagacaagggaagttttcaagtaaaaacatttgaagagtgaccattctggtttgatagggtctgctgaattttatttgacccggaacagtatctattcaacttgtcacattgatgaaactatttgtttatctttcaaggctaaatttatatcttggttctttttttacatcacaaatttgattctggggtatctattttaaaatttcaggattaccagcagcgacaataatcgacaggtatgtgacagtaggtgcctacagtcttctgagatcatgtaccatcgaaccagagtgcatcatcggtcaacactcaatactaatggaaggctcactggttgagacccggtcaatcttggaagcgggttcagttgtgccgccaggaagaaggatcccatcaggtgaactatggggaggcaatccagcaagattcattagaaccctaaccaacgaagaaaccctagagatcccaaaactcgctgtagccatcaaccacttaagcggagattacttctctgagttcctaccttactcaactgtctacttagaggtagagaagttcaagaagtcccttgggatcgccgtttagaagcttcatctttttcgtgattcactttcatgtgtttatctatcatatgaggtctttctctctgcatattgcaataagtagctgatgaacatcaaaacaagtccggctctcttttttggttctaaaacgtttgtcatttcgttttttgggttctttgtaaaattccatttaaaactgattttggctgaatattgtctgaatgataatggcgacgacttctggttttgttgttgtgagcaattaaacaaaacaaataactaaactaaatggtttttcgttatttgggatcactaaaaggaacattgtgtagaagaattaattatacaggacttgtgacgttttatttgacagaatgaagaacgtaggtcaaactaaaattatgtaatggaatttactcaatatgggttacattttgaaaatctttaaaattcttccgttgcttgtaggttataaacatataactcatgtctaattaattcgtaaatcaacacccttttgttctcactctataaattcaaagttcctgcacataaccaaatcatcaaagtgaaaagaagcaagaaaaataagaaagagataagattaataagagatggaaagcaaagcaagagttattgcctccttagtcctagttgtagttaacttatcattctcttaataagcataaaacaaacagacaccttaatattaagatgtatacgagacaataagatataccgaactataaacgtgaagaaatctttggatgctcacttctttcttttcctctccctcctccaagattaagctgcgtccgatttcaccatcgcagaatataccgccaaacggtaactccgggaagttctctaaaaacggtgagctgtctgcgtttggacaaccaaagaaggaatcaccgcgacagctaccgacgaaagcaaaacctccaacgacttccggtttattcggcttagacttgagatttctaagttgagcagaaacatcatttagtgctgcttcagccactttgagatcagggaggtatacttggaattggtcgccggttttgattccggcaccatcaactaaaagatcctgatcgtcagatctgagtaagcaaaccaaaaaaaaaaaaacttagatgggtcaaaagggacagattcatgttatgatacttgttgatccgatcgttacccattcacttgatgaaatacaagggaggacatgatttttggcttctcctccaaaccaattgagtattttctacgttttattactccgaggtatgaatcattctcccagatatagttttctagctgcaaatttcaagtcagttaagtaaccaaactgatttcaggattagataaaagattggcttcagatgcttacaatattatctatgtcatctagaatttgatcgccatcaagaacctctgcttctcctcttcttttggcagtcagaagcgtcgaaggacaactagggccgaggctaacattgacattagccgccttgtacctcagatcaaccgatgacattccatttgatattgcagtgtcaaactgaattctttcagcctctgcttcatttagttcaacaagttgagtaaaatgaaaagaagagattttaatcggaaacacataaccagcacaacatgaaagaacgatgctgaaatatttaacctagcatagtaaagataaagtgtgtctctcgatgtactgtagttttttaagaaactaatattaaaaccacggaaacttacgagcaggtctgtgtctatctcttgcaaatattaagccagcgagaactctgatatcatctttctgcaactgaacatttcttggttcattaccacgtttatgtaaaaactcgccaatttgaccacccacaataacagtctcagcaggcatggcataatctgcaatgcaaacaagcttcattaacaagttttcaggcaccgtaatttctatatattaccaaaatggtagttatgtttttcagattctagccagagcaaaataagtgaaaataagaggtaggcaacctagacaaccaaccaacaaaataaaaatgtttcaagaaatatttgttttgtcttaatagattttttcacttgtcacgaagtaacattgaaaagatgtaccataaggcagtactcatacccagtttgtgaagaacaggttctgtggcatgagtatcctcctacaaattcaccaatgaagcatgaatagacaagaaaatagtcataaaactgaatatagtccaaaagtaaaacagaaaaggaagccagagaagtagagttcaccgcaaagagtataagacatgctggtgcagcagcatgacctgaaaccatggacatataatttctaatatccatcacaaatttgtcttccatttctgctccagattcctgcaaaaaaaaatagtaacaagctgttcacttaaattgtcttctattatgacctcatttctttaaatgttgtaagcaaatgaatcaaattcactggaaacaaaaacaatctagccagtggacaagcttatgaaagaaaatcaccatcgaaccaaccaactagatagttttataattcagaacattgatgtagtgaattattacccctttagcctgaattacaggaataatgtcgactttcattcctggtaagtagccaatcgtcaacagtatagcaaaatttgcaacatcgaacaattcatcatcacttgtggaatgcagtctgacctgtaaacgtaatataacacgaacataagctaaaaaaacttagagaaacaaaaatccacaatacttaacgataagaaaacaataaaacctctccagccttgtcattgcatgcttcctttcctaagattccagtaacaacagatacaatgataggaacccttgatcccactctttctgttatctacatcatgtgcattacaatgagtgtaaggaacttaaaaatagactctttagaaataataacaaacagatgaaatagaaagaagaaccaaaccagtgtcaaagtttcttccatgttcccacatgtaatgtttgcgatcacaaactgtggtcgaattggctcagacaaaaccttatcaagtacttcttctccagctctctgtttaccaaattcaaaagtttcattctttaggaagaacacatactagacattacaattggccaagccttgtgaagagctctaagaactagcatgaagagaagttttgagtttttttttcgatctggaaaatcaaaattcaactaaacaggaaacttacaagttgatcaggattacgagagaaagcagatatcattttggggcgagagagaattcgattgcagacgctgctccagaatcggttaacacatgaagcgaaagcaaacgattttgccggcaatctcaagagaatgttgtggagaaggtcttcgttcatggcggcgattggaaccatatcagccatatctgtcttcatcttctttgagttctcgctctttccctttgtcgtcatctccttctttgtcagagacacttccgccatgagagttacaaattttcttatttttctcttcggcgaatttatttgggccttttgtttgttaaaaaaataaaagttacattgggctttatcaaaagaataggcccattatcttaaaccgcgtctctcttaaaatgcccagattgatttttttttcatacattccggtcctttaatcggttatctatttgtctgtactgttcgtaaactatgaatttgtagttgaaaattattcggacatcattgacaaaagaaaagaaaagaagaaacccacaaaatttgagataagaaatcttatctttaatatgtcacactgtacttgttttggatatagacacaaagtatcttcttctttttgtttatcatctttaattttattttattttcctgaaaaaacgaagaatctttttccaatctcaacattttgttacattaatgtattattgagtttttcaaaaagagagctacggaaaaggcgaccagcgaccgccctcgttagtacatgttggatggtagtatttcatcgtattattcaacttcatatccggtgacctatgttatgccgtaaaaaaaagatcacgtgtaaaaatatatggtatttaaaaatctatagtttatgccgcgtcactttcaccatgtaataatttacaaatctatgactagaagattagttaacattttaagtttggttatagaactcaaacatacattctttgttattattgtgatttgtgagagatggggtctagtatgcaattagtaaaccacttatgtatatcttgactgttgctgattgattatacgcctattccattggagatttttcttctccttaattgctagaatatacttgtatatatacagagagagagaggagtttggaagaaaaaaaaagactgtttttgatttttgatcacaacgcgaaagacagtagcatataccaaagctttttttcataagttttaactttcaatttttagacatgtagtacggttgagggatcgtaataagaacctaaaacgtaatcgatattcgaggccaatacgttcctttatcggattagaaatataactcgaggagattataccaaaacacatgcatgtatcatgtgtgagcaaattatcgtttatccaatgtatcaggagattatatatctttcttttttttcgcgtaaaagaaacgttttctatgatcatctattttgtaaattgaacatataattcattaaaaatcaccatgtgattgtacagttttcaaaaccgtgaaaccaaattttatttttatttctggaattttttcatatatttagtaaaaaataaaacgcacaaaacaaatatagtaattttaattcatgagtcttcaaaagcaatctaattgtggtgcggtggtacgaatattttcttacaacaaaatccacttttgtttctggcaaaagggtacttatgtaattatagcgctattgaaacaaaaacatctgttagattagactgtttattaacgccaacaacttactccgttaacaacgaggtgggcacaaagcaagaatgacgtgtaaggaggtaaaaaacaaaagccaacaaaaacggccgttacgtcattattactgatgacgtgtcagcgtcagctattggattcgtttgtctctctgccagaaaaaagcatttaatttttaccagatccatcatttatatcactgccattaaaaggagacaaaagatatgaacattgtaacagattgtgtatattttatttatttcatcaaacaggatattaattttgttgagtatatatataccggttctagtcataccaatttaaccatataaattggaaattaatttcacctatcaactagaaattttaaagtttcttccaatgtgggtagaagtaacatggtaaaatgcataataactaaattaaaacatggtgaagacagaaaaaaaaaaaaataactaaatgaacttcgattttactagtatttaccaaaaataattaaagttttcacggatgtgttcagttttgactattgtatcagctttaatcacgaatgtgtttggggtttgactatttaatcagctttaagtatcatcatttgaccttttcactgttttactgctaccaataagattttagcaatttgtaccatatgagagaatcatatgagcacttacttttttattcttttcttttttggtttaaatattagtactcacttacaacagtttctaatttttttagctattgataaatttccataattggattagcaattgttattctctttataatttcatgtgttttagtaatatggagtattatgtgatatgtgagggaaaaaaatcaaaagagggagaggaaaagaaaagaaaagatagatactcttttaatacaaatgtaagtcgagagaaagagaagaatccaagtcggcagttccatgtgtaagcctcgggaacacaaatatttgtcccacagtgcgatcccaaagttcatgccccacacgtgtgaagtcctacttggcgccacgtcagtatttaatgcatgggaaaattgaggtggtaactgatgatgttaatatcctctcgattattgcttgaagatgtctcactcgatagtgaaacttgttgatgtaatatcacagttttttatcttaccagttacgactagccagtgtttcgctcacttgttttggagatgaccaaatttttagaataaaacttacaacaaactcgcttttcttagactagactcaattatatatcttatagtttatccaaaaatgagtttatacatgctgtcaattgtaattaatggtcatattgactaaaacgaaaatacgtttgattaacttttcaagataaccaatcaactatcgtcacttactttcatgtaacggaatttacctaacgtcatttgatttctcatcgttttcaaccaataacacaacctggtccagctaataaactcatttgtttttttttgttgtaactttttctctttagaaactcatcggtctatactcttgatctaagtggtattgttattctaggcaagaaatcaattatattgaacaaacatcttatcacgcacaatccggtcgcgatgaaagaagtttctacttctagttgaggccgtcctaaatcaattcgaatacgtattttagatcaatatttggaatgcaaaaaaaaaaatgacggagggagtataaagaacccatatttaatttgtagactagtctatatatcttcctcatatcttagtgatttgctatgaatctttcaattgtaagaccaaatgtgttcaaaatagtgtttaatctgtatagtatatgtatacattagaaagaaatatacgtacatgtatatatatatatatgcattaaaagatgtgctttatgaattaaggtaaaatatgtgaaattatgtcaacattattcttcccttttagggtgtattttaaaacagaagctcattggtactttaggtttagcataggctataggttttagttgttatcgagaatgccgtgtttacttcatcatgaacatctcatgttaacaacatgcattttaagttcttcaaaaaaaaaaaaaaaaaaaacatatgcattttaagtctttgtaaagagatgtaacattgtttatgttatctttaatcaattaaatacgaagttataatttacatatgaaaggtaaaaataaagaaaggtaaaaatagtaatcaataaaatagagttattttgatcaattatgctgaaatttcatgaaatatgtgagaaatacatctattggacaatccactaactgtcaatctcgagaattagaatcgtgctttgacagttttaactatatatagagaaacacaaatggcgtgagttttaggtttatattttgactgatacattactaaacaaaaatattaaattaagtactaaaataataaatgagtgaagtaatattagattcacgtataagtcatgtctaaaagggaataaaacaaaataatttacatttcttttcagatcttgaggtccacagttccaccttcgtaccaacacccaagtggttctttagagagagagagatttataagcttctctttgggcattacaattttttttgtgaacatagaaacactcaaaacttcaaaccaaaaaaaataaatgggagaggttcaagaaaatcctaaactcttatatcagcttttcaaatctccatgaataatattaacaaatttgttctgatctattttattttatttttggtatcaggaagagaagaaaccagaagcagcagaggaaaagaaaatggaagagaagaaaccagaagagaaaaaagaaggagaagacaagaaagtggatgctgagaaaaaaggagaagattctgacaagaagcctcaagaaggagaatctaacaaagattccaaagaagattctgctccggcggcgcctgaggctccagcaccgcctcctccgccgcaagaggttgttcttaaggtttacatgcactgtgaaggatgtgctagaaaagtccgccgttgtctcaaaggcttcgaaggtatgtattaaaaacagatatgtgtagagaaaaaaaaaagaattaattgatttatataattttgcaattccacacaaatcttttggtttacatttttaaaaatataaaaaattcagttttccatagaatagtttcggaaacaattttttaaagatgattaattatattgtggctttattttaaaaatatacaataaacacaattatcttgtattctttccagcatcctatgtcaattgctgtaactggatatatcttgtttctgtcaactatagtttttttggttaatctcgtatctaagtatagttaatattcgtcatataatttgtgtgtagggccacataaagttttggttatgctttagtattatagcttttgttttttaaaaacactcaaactagaaattctgtttttgggtaaaaatggtaaagctaatggtttataaaaaaaatatataactttggaattttggttgaattaatcaattaggagtggaagatgtgatgactgattgtaaaacggggaaagtggtggtgaaaggtgagaaagctgatccattgaaagtattagctagagttcagaggaagacccaccgtcaagttcagcttctgtctccgattcctcctccgcctccgccgccggagaagaaagcagaggaggataaacccattgtggaagagaagaaagtggaggtaactttgtttttagtggtctaaaagctttcaccttctttattggtaaaaaataaaatcatatttttaatttgttgtgtttactgaatttgacattacaaccaaaaaagaaaagaaaaaggagttttttttcgttgctttttaggatattggtatgaatattcattttattctctattattctatttagggtacgagtcattaattaaattacttattatttaattaaaaagagaatattctctttgcagtgatttcacatggggtgtattggtaggatttggttatatcttatttgatggttttatgaacgtagaacttcttatatttgtgtatgtggaaatttgtgttaaagttatgattttattaattttgcggcgaaaattttggaacagcctccggtggttgtgacggtggttcttaaggttcacatgcactgtgaagcttgtgcgacagagatcaagaaacggatcatgagaatgaaaggttagttttcaccaaactttagattatctttcgttagtagttgcatcaaatttggtccatacaatttcaaatcaggatcatattgcttcgactttaaaatacacgcacacgtgttatttatttattttatacacaaattacattatttattgacagcatatgtaatgtttatatgattttgttccaattatatgtagtggggtcagtgtgtattcggtccttcactttgatagtatactaactgaaattttcttactcattgttgtttgacataaataatttgtaggagtggaatctgctgaatccgacttaaagagttctcaagtgacggtgaaaggagtttttgaaccacaaaagcttgtagaatacgtttataagcgaaccggaaaacatgctgcgatcatgaaaatcgacccaccgcctccaccaccacctgaggaggcggctgcggcagcggaaggagagaagaaggaagaagaaaagggagaaggagaatccaaaggcgaagaagggaaggatgataaggcgaagacggacgaagaaaagaaagaaggggatggtggtaaaggggaaggcgaagcagcggataatggcggtggggaggaagaaggcaaagttgtggaggtgagaaagatagagaatccttattactactactattaccaaccaccgcgtgtggcgattccgcctatggaaatgccgccacacgcttatccgcctcaattgttcagcgacgagaatccaaatgcatgtactgtaatgtaacaaagaaaaacgcaaatgctataaagggtataatggggaatattttgaacaattttgatgaagtgggtacatggcatttgctgtctctcatagcatgtggtttctttctaatgtgtttgtgcagctcttttcttttaactgtaatttacattttaaaaaactcgcaacacgagttatttttaatggctatatataaacaataaaataataaatttactcttacttatcttgtagaatacatagtaaataaataaatcttcataaatagctagaaaatcaaatatttgggagaaggaagagtatggtttgtttttttcatgcactaatttttttaagtttcttatacatatatatttatatctggtcaatatcaacaaaattaaaagtcattgttgagtgttaattactaaagagttagttaagttactcgtgtacttgagttctaagtcaccatttacatgcagtgtttgtttggcacactaaatgcattattaccctttaccaaacttgttcaatatacagatttggaccatcatttggtaatatcaaatcaataacattgttacactccaatgatattaactcaatagctatgtacataggttactgattagttggaaacttgtggagaaacagtaatgtttatatttatagttgttaaaaataaacatgtggagtataacctaccagtataaaccttttacactctaaaactcccaagataaatgaaaaacgttgtttaggtgaattatctatgaaattattactagttaggtgaaacactattttcttgccgctaaaaaaaggctggtccatttattgtgagaataaagttaatgaaaatgctgccttatcttaaaacatgccattggtgtttgtcaattgtgttatgattagtagtttagtactatttttttttcttttttgttggatcaaaagtatatgattattctctctggattaattttatgtccatcatgtgttgttagaaactaaatggtggcacgtagtatcaatcaaatcatgaaaaacaaattaattaagaatcctatgttttcatttttctcattttgatgtttcagacactattaaaaacccacattaacattacaaactactaaactacaaacctaagtaaacaaatcacaaaataaagtttttgaacacaaaacctaataaatactgttttggcataccactatctagtaggtctgatttataatttaaaaaaaataaaaatgaaattcctctgacaatagttcttaaaaaaaacacacacaagatctaaaggttctcaattcgccgcgcgttaaggacacgtgcaaagagctggtgacgtcttggcatcgtaagcgcgagaagaaagaacattctattccagcgaacgtaagtagaccccagaactcacactcgctcagggaagcgcgtggagggtggagtaacagagagagagagccgtgatgtgacggtgttaataacacgtggatcccacgtgatgggtccgtgccatctctgaggacgtacagttttttttttctttttttttgggttatgaatgaatgagagagcccacgtgacccgccaccacttcctctattcctgtgctttcgtactcaacttttgtcgcttctttttttggactcaccgttttttttaataattactcgattcctcttcgaaacaaacaaatttttaaagaaaaaatagtacgttactctctcttttttaaaaaaaatattttttcaatacaataaaagtacattactctttacttttttctttactagagaaacgtaatattactctgttttttttttttttttaataactaggaaaaagaaaagaatatcccgtttttttaactctcttggaacaaactaaatatgaaaacaaggaatacagtagaaagttattattcaataaatgaagacaacaaataaaaagagagaagttaatatccaatgtcggtagctcatttatacgatcaagttgaaatctggcggttactaagatcaaaactattagccagagtaaaaaagtagtcatcaaccaaaacatttggttaagacatgaagtactcaaaattaatcaatcgttatttgatcgcaatggtaaaatcatggcgtgtactctactaatttatattaatgagattgtcatatcattgaatgagtttaatcttgcataacgtatgttatctgacttataatgatcgcaattgtatttttgtttgaaaagatctttaagttggtgcaattatagactgtatagtttagtttcagatttgtagctaaaaattatatgttccagttatcttgtgagtttattaaaattacaccatacacaaattttacttgttaatattttattaacagtcttcttttcatacaaagagaaaaagagagaaaaaagtaaaagagtggatgagttatggtatttattaatttgttggtccattttcttcttctttctgttaacctttgggaccatgcctacaacaatgtcgaaatcatgttgacacgtagagacgcatacatatacgtttcaaataacgtcttgtttgcatgtacgtatacgtataaacgtagagataactaatagttttatgtatacgtaaccgacgcaattgtagttgcatacttgcatataacaaacaaattaatggccaccaggcatgcttcggttgatttctttgagaacacttgttgcatcaacgagataatgtctttaataaaatcgatattcaaaaaagaatcagtaatcgctatattccctagcattcttaacagtgtctatcattcaaaatcttactctttaaatgttagtagtttagtcgattcgaaaaatatgtgtatcatttggaaaaaaagtaacaaatccgttttgaccgctaatccaaatatatctactgacaaaaagttacaattttttctgttgtagaaaaagaatgataataacaacgttgttatcatattgagacacttgaccggttatcattaaactagtttaggtttgattgcgaccgaaccgtatttgaatcgaccatttaacccgatcactaaaagtgttgggaccatcactatctttttgatacatttaccggaatttcataaaactctaaaactagtttatacatcgatccccattaccaataatttgtttcaattattttccgacttttaattttggcgccaactgccaagcaaataatatattctcctctcattgtcaacttatacgtataattcttatcattatttcttcaaatttatcccattctatttggactacgactctggtattatttaatttgttcgcattacattctctatattttgagaataaatatttatatataacgagccattcacgcatcaaaagatctgcacgactgaaccatactgaagattttaatccaaaatctataatgttttagattacaaggttttgaccttagatgataaacttgatggatgcatatatagaacaacttagatagttagattagataaaaaaagccaacctttagatcttgacatttagccgtctcacattttcgagataagatcagaaaatgaaaagtataaagacgtacgtaatcctataaagcattattattattttcctttgtattatctggcttttaattatgtttgcaaactacaaatgaattttgattaatacaatagattttaacatgcaaatgtaaacacaaaaaaaaagaagccgaaaggctaacgtacacacagaaaaagtatgtaggcccataatatagaaaactatagaagatgatgttataccacaatttgtttgttaaagtctactcagttaacgagttcaatatgtgaatactaataaacgcagcagtgcacaataatgcagaaatgtaggtcttgtgacagaagaaaacaaatcatataaatttatctgtcgaaaatgataacatgatttcgatttttatcaagaattttgttgagatttagacatgagccaaaatctttagaacaatcattaatataatacttttgaaataaagaaagtaaactttttctaacaaaagaaattttgataagaaagttctttaaatcccatcacttagtgggtgtaaaggcaaagaagcatagatagatcatatggatggctgaagatgacctagtagtgtgtgctacgatgtagcattacacatagagggcaaatttctttattctttttactcgtttcaactttcaaagtatttattttatgtctaatggcccaaatggtccatatttaaatggcctctttatctcgatgtaacctgacttcggaagaaactagtgtacaacaattagttaggcatcatcaaacgtttggagtagattagtcgaagaataacatgctttttcttgttattctttttaatatttatttcattaaaaatcataaatatggcatttaggcaagaaaaatctttggacatattcatttaccgatttgattaatcgggaccccatatgattttgcctactatatataggaccaatatctaaaatctgaaacgttaatttttagaacagaagaaaaacgaatggatgactttgttgtatttttgtgtcaaaaaaaaaaaaaaaaaggctttactgtattttaaaaggaaactaccgaaagaacattacactgtattttttcctaaccaaacaagactcgagttaaaaattcgatcggccaggaaaaaaaaagaaaaagactcgacaacactcaaatcaaacaaaacttttcaattcccgacccttgtatttttcgacaatcgttgaatatgcgtcatcaaatcaaattgaaaaagatgtataaaaccggaaatctatcggcactaaataaaaaccggaaatacttttacaaactttttaattatatatatcaattattttttaaattggtattattattctttaaaacataaaacgacgtcgtttacaacttaataaaactgttaacgttgacttgaatctgttaaattgacctgtcagttaacttaacaacgtgtcttatttggtcgagtcaataaaaattaaagatttaattggaaaatcaactaaaattgagaatttaattcaccaaacccaaagttgatactttatttcaccatttttagtaaactgatgattttcttgacatttttcttatataataacctttgtttttttatttttctgttcagcaataataacatttgttttattatcttaaaatacaagttcataagaaaactttacaacacctaatctactttttgactttaaaattacttaaaaatgcagaactggaatcaccaaaggtaaaatactcggtttagttgaaccaggaggaagtaatacctaagcaggtatagatgacgttgagtcttcacactgtttcacaagcttttagttgagtactggatcaaggggacagaacaacaactggatttaagcttgaggatgttcttgaagaagatttgattctgtccaagagtaaccgagcatcggttagcgaacatccctgattcatttcgatagctactggatattgcgacgatctgttcatttctaccaccattattccctgcagtaacataaaaatgaacattttgaaaaaaactagtcttccgaagtatggtcttcatatccagtcctaagcctagtttctagattcaacttatgtctgaaagtaacttatgtttgatgtatctgatcatataacaaagacagtctaaaactgatatgttaggaaacacaagttagcaggttttacctcaaagtcagcgagaaacaactggaagcgtttcagtttctctttcatcatggcatttagtgatgttggagctgacgaggaaagagcagctgtgacttccatggatgaatgtcctatccttttttgtacaacctgcagaggggatgacatggacctgatgggtgatcttcattctaatacatcaaattcattgcgaaatgagggatgggactcacgtcgttatggagcaaaatctcacagatgagactaccatcatcaacatagcatagaagctcatacgtagactgttgcttgaactggaatttcttcactccagttagaaagcactgcaaaaaatgaatactttaataacaagagttgaaatcatcattgattgaagactgagagtgctttaattagtggtgttagtagtaccttgatccttccttgaacaaaatgtatggtatctttcataactgcccatttttgagacaactcggctaagtatgtgaaaggtttctctgtatttgtagacagcacagaagggccttccaaatcgacaaccatattactgaattctgctgctacaccgcctgaatctgaaccatatatatgagtcgttgtatcccttacacgaccagtgtcaatatgcatttcttcaacaaatgaagtcacgttagatgtttgatccaatgaatttccgccaacgttgttggcaaaagatcttgcaccactgcaggcaccactgcagctagtaccagtaccagctgtggatgctgctcggtgaatgttactagaagttgaatgtatatcagaaaacgttctttccccgtgcgcagaagcagtatcaatctgcatatgctcaacccttgaaacagtagctcccacattggtagaagcaagaggttcatccatcgcccgtgaactattgtgagttctcgttacatgtacgggtatgcctgccataagtggtttgttcaaaagagagttaatagccactaataatctcaaaagaaagtggtcatctcacgttccagaaagtattcaaggacagacatcattttctcagaaagacaccaaaaacgtttttaatgttgtaactcggctatggtgaagtaagaaaagatcataggaaacacagaacgaaccatgattgtgctctagtatgttataatttatgataataagctaaaaaatgggaatagtctgtttcctttgattcaaaatcttcacttatccactttcctgtgatggaacaaataattactctggttcagggttgacagtaatgaacactttgactagttttgtgaactctacttttgaaacatgcagctactctttttgttgacatgtaattttttctgaacaagaagattaatgtagaaactcccctaccttgattggcttgagtgtgactagcattgcccgaggcagaactatttacatgattaccagtatcatgtacatgattaccagtatcattgccatttagcgaccacgcagctagagttgctctggttgttaaagaaggaaccactcctacccttgttctgcaaaagttaaaatcaaataaaaactttgacaagaagggtaaaatttacaactgcaaatagaaaagacagttagtagtatgtatgttataaactgttttaacgcgataaaatgcaacatctttcaacagaaaccaatccaaatgcagaattcactaaacgagtacattgtcaggcatactccaaaccagtctctattctcaagatcaaagaagctgtagccaaagaaatcggtgaaacacactggttgcaaataatctttccaactgaagagacatacatcatgacacaaatttcgaatatgaagtgagggggagaaacaaaagctggagaaatatcgaattttgaacaatgtaaaccaatctttgaataaatctaacctttttcctcttggaggtttgtttacttcaacaaccagacgctttcgtgcttcttctagttcttcaaccatccctcctaaaacttctacaatctcaggtactagcattaaaagcccatgccgaacttgtacactagatacaacaatctgcatttagctgttctagtcagtacttgtactaaaaacacagacatgtataaataatcttaaaggctgtacaatggccttagaacaaatattcatacaattttcacaactacaatcctcaacaagaaacacacacctttaaaccagcaggagccaagacttgaagatctttaataggcctgtattccataccaaaaacgcgttgaacaccatctgtcatagacagcttaaggcacctcttaagccctgcattagcattctcatacctccctttgagtgggcagccaatgttaacaatctcatcaacctaaatttgaaaaatttaagcaaaaatgttcagccaaaatcacacattgcgcaattatatatacagtgtaaaaaccaaacaatcaaataacctgcagaacaaacggaccagcgagttctatacgattcatagacgcaacgttcggaggaagaacaccacctccgcataaattcatatcgaaaaacataaactgctcgaagcaatgcttagctttagctgcaacatcgaggtaggaaaattgtggaattgaagtttcaagtcctgaaagacaagatacccaccactccctcttcaatttaatccccattcgagaaagaacctcactgatcggcgattcatagtcattgccgctcactgactccgacggataaaccggatacggtgtaggaatactagaatccggcggtgtaggctggggattaccaaaaacgtcgataatctcaacttccgatatagcgattctctcaccgggattagggttagaattcgacgatactgaggtttccggttgtatagatgaagcaataccaaagctctgaacagaatcaccaactccgcttgttccagtttcatcttcttcttcttcgtcggaggagtaccggagttgcaggcgccgtctacgcatttcttcgccggcgaaatttagggaattttattggttttccctccaaaatcaattttctattttgcttttttttttgaaaaagtttgtttagaagccagaacgcaattgggctcattaggaggaaaatggggcctgttataaaattgggccgagttttgttgtatgtatgtatatgtgtatgtatataaatttgggtttagttttgccgcgagctgaatttggtgaaaatatttgggggtgacgaaaagagcccgcctttgtgttctaatttttggtaccagaatttttgaaaatccccaaatttttttgtttctcttcttcataatcgttgaattagggttttacaatttcgagtttccccaaatctgaaatttgagtttttttttttcttgacttttcacgttttgattcgcctgttgtttgggtttgaaatggcgactgaaaccctagatgagaagacaccggaagtgaattctccggcgaaggaggaaattgatgttgttccgaaggaggagaaggaggtagagaaagaaaaagtggattcgccgagaattggcgaagcggaggaggagaagaaggaagatgaagaagagggtgaagcgaaagaaggagaattgggtgagaaagataaagaagacgatgtagaaagtgaggaggaagaagaagaagaagaaggaagtggaagtaagaaatcgtcggagaaggaaacggtgactccgactagtgagagaccaacgagggagagaaagaaggttgagcgtttctcgttgtcgactcctatgcgggctccaccgagcaagtccgtttcaattgaaaaggtagcttgatggaacttttgtttgtctttcttatttgtctttatgagaattggatcaattagttatggttttttgttgtagggtcgtggaacacctctcagagaaattccaaatggtatgtatgagaatcaatttcgatttgtggttgttttgattgaagtcttgtgaatttgtgatgtgtagatctaattgttgttaatcagaacgatgaacaatcttggctggttggcacatcttagatctagaagatgagatagctattgtgagatttttcctgtctgtgttggcatgattatagatagaaccatttcattagaaaagcttgggcttttggtctacttggatactattacttctaccaatttgatacctatagtctgactttctgatggaatatcactattagtctattaacttgctgtctgtgatttgcttaattttgctgtggagaaatactcatactctgcactgttgttgataagaagatgagattttttttttctttctttctttctcttgtttgtttgtttagcttgagggtgaaaattttagttattttgataaagacttgtttacatttatttttgattagaaagttgtctgataatttttgctgtttcagtggctcataaactatcgaagagaaaagctgatgacaacctgatgttactacacaccattctttttgggaagaaagcaaaggtgcgctaaaagttgctcttatattccacatatggtagttatgtttcacttgcaagcttctgtctctgttagtatggatgtcgtctcggaattttcattgtttctttgccagagtgcatagctacttaaaaagcgttttgtgaaaatttctctacaggcacagatggttaagagaaacattggtcaattttctggctttgcctggtcagagaaagaggtataacccatttcaagtttattttgttacagggatgtgtatgctgttgtccctggtgttgaaacttttatttaaatgtttcttaggaggagaagcagagagcacgaataaaagagaagattgacaaatgcgtaaaagaaaaattgattgttttttgtgatgtgcttgatatccctataagcagaagtaacgtgaaaaaagtaagtgataagaagatgtagtctatctatttattgcaccttgttctatattctaagaaatcctctatcctgatactgccaggaagaactagctgtcaaagtgcttgaatttttggaatctcccaaggaaactagagatgttataattgctgatcaagaaaaggtattattggaatcagtacattattgttctacatgttcattctcaatgggagcactgaattcatttttagcaggcgaaaaagcgcaagagtacaccaaaaagggggaaatctggagaatcttcggacacccctgccaaggtttgtactttgttattatctcaattctcttatttgcattcattgcctgctactggcgcctttatagcttgtttttcttttattttcctcatatgactggtgtgaattttgattttaaatgtttggttggattaccgtcattcgcatgaattattatatgctttctcatctatgtgacttgatttattagttgttgaccatgggttgtacaaatatccctgttttgttactacgcagaggaaaaggcaaactaaaaagcga

SEQ ID NO: 954 - DNA, 89779 bp, Arabidopsis thaliana
gatcttccatctgacacggaagaaggcaaggatgagggagatgctgactctgaaggaactaatgatcctcatgaagaagatgatgcagcgccagaggaagaaagtgaccatgaaaagactgacactgacgatgagaaagatgaagtagaggttgagaaaccatccaagaagaaaagctcatcgaaaaagactgtagaggagagttcagggtccaaaggtaaggataagcaaccttctgccaaaggttctgcaagatctggggaaaagtcctccaaacaaattgctaagtcaacttcatccccagctaagaagcaaaaagttgatcacgttgagtcttctaaagagaaaagcaagaaacagccgagtaagccacaggctaagggatctaaagagaaaggttagaaccattctcagctgcttctgaggcttagcctcgttcgatttatgttttatatgaaatcatcctatttgtttttgaagctgattatttatatttgttctcctctatcatggattggaaacaggaaaagccactaagaaaggcaaagccaaagcagagcccaccagaaaagagatgcttgaagtggtgtccaaaattctgaaggaagtagacttcaatacggtaagatggtttgattttcccaagtccaaatacaatgtaatggtttaaaaaacttgaatagatgttctcatacactttttttttcttaataacaggcaacactatcagatattctgcagaagctaagtatgttattggattttgcttttattatctatttcgcaattcaaatgtacaaggagctttttggtaacatatgctgtttgtgataacgtcaggtgaccattttggtgtcgagctgtcgcatagaaaaccagaggtgaaggatgttatcacagaggccataaatgcaatgactgatgatgaagaagaagatgaagaggaagaagctgaggcaggaagtgacaaagaaaaggaagaagtaaaaggagaggaagaagaggaaaaagctgaggctgaaagtgacaaagagaaggaaaaagaagagccaaaggattgaggttaagagtttcgttttccttcgttcaaaatctaatgtgaaggaaagcaaaactgacacaacttttgtgtgaaccagagcaagtgaaagtgtgtcgaatctgtacttttgtactgtgtaatctctatagtctgactctcattatgtagttttaagtgtcttttacttgtgtagctgttacctgttacctgttaggttttctaatccttgttttatttgatagccagatactttagggaattttacttcttcttttcttgggtttaatttaagacatattcgtatatttcatttaattctgttatctgatttgtgagatcatgaaaacgaatgttgaacttgaaacttgagtgggttcagaaaaactactctgtattaaaaatcccagtgtcacatgataatgatccttcagtaaaggtagacatagcttttttgcagtgtgatatgcacaaatacaatctatatttttatgtaaaagatatatttctttgaaagtacttataaaaatatgtttttcataaaaaaaattatatgtaattctgaaagtatgtgatatgcacaagcacaacctatatttcctacattcaaattcgggtttttcttgacgccaagttacattcaattatcaataatagggctagttcaactaatgctatttatttatacaatccacccactactaaatctcaatctccaaggatctttatatattaataagaaaagctactatccaaatgcgaccttgttcgtgaagtgtttggtttataatttggtggcttaagactatagcccaccattgacccaaaaaaagaaaggaaaattaatagtagactatatagctaccaactccctataatttaccttgaaattaaaccagctttgtatttttttaatagaagtcagggctctacagtttcattttaaacttttttttttgttatattacatcctgcaggttagttgtaatttgtaaacgtaatcaacataataaaaccatttacatagactgattaaagttgattccatttgataatatttagctatttatatatcaatcaaccaccagctcttaaatatatgtattcaaattgttttgttgactctttttgctacactttaaatttgaatctagaatgttgtcctgaaacaaaaatctgtggattgaacaaaattatacaccaggtaaaattttgaagtttttaaaagcaggatcacatactcctaattttagattggatagatctagtataaaaatatgaagtttttttcccaaaaaataataataccatttagctcttaattaaatgcatgcaaactaaagataaaaagaggaattattttaaccattctaactcgtcacaacatgcctaatcattccaggttaattttagagttttcaaatcgtcatattaacatgtgatcctgaagactcttctcttctttcttctaccattagctgaaatctttacttgtaccacaattaacctcaaaccctagcccctaaatccccctagaaatcaatccatcctcagttctccaaaaagatatctttggtttttcttcactgacaaaacccctaaaaatggccgactcattcgagctaattgtaacccgaaaagaacctgttctcgtctctccagcctccgaaactccaaaaggtctccattatctctcaaatctcgatcaaaacatcgccatcattgtcaaaacattctactacttcaaatcaaactcaagatccaacgaagaatcctatgaagtcatcaagaagtcactctccgaggttctcgttcactactatcctgccgcagggagactcacgatcagtcctgaaggaaagatcgctgtggattgcaccggagaaggagttgtagtggtggaagctgaggccaattgtgggatagagaagataaagaaggctatatcggagattgatcaaccagagactcttgaaaagttggtttacgacgttcccggtgctcggaatattctcgagattcctccagtggttgttcaggtgaggggttgatcgattgatattatgttttgcttgctgttttgtgtgagtgaacgaacatgacctatactggatttggtccgatattggtttcaaataactatattatatagtagaattagattaatattgattttttaattatgcatgtacgtataaatacgctaattagtaagaaagaaaaagatccatactattattcactacaaaatacataaatttcataacttttaattcaaaagtatttatattggaacatatcctaattgacgtttttccaagattgttgtgtgattgtcgacaaaataaattttggacatactcgtttttttttgggcagtacattcgagtaaatacgattgaagaaatcatgcatttttagttgatcgaatacattgtatacgatgcttccatacaaattttggtttgtttgttaggtgacaaatttcaagtgtggagggttcgtgctaggactaggcatgaaccacaatatgttcgatggtatcgcagccatggagttcctcaactcttgggccgagacggctcgtggccttcctctctccgttccacctttcttggaccgcacacttctccgaccacgaaccccaccaaagatcgaattcccacacaacgagttcgaggacctcgaagacatctccggcaccggaaaactctactccgacgagaaactcgtctacaaatccttcctcttcggacccgaaaaactcgagaggcttaagatcatggcagagacgagatccacgacttttcaaaccctaaccgggtttctgtggagagctcgttgtcaagccttagggcttaaacctgatcaacggatcaagcttctctttgctgcagatggaaggtcgagattcgttccggaacttcctaaaggatattccggtaacgggattgtgttcacttattgcgttacaacggcaggtgaagtgactttaaaccctctttctcattcagtgtgtttggtcaaaagagccgttgaaatggtcaacgacggtttcatgaggtcagcgattgattactttgaggtgactcgagctaggccgagcctaacggcaacacttctgatcacgtcgtgggcaaaactgtcgtttcatactaaggatttcggttggggtgaaccggttgtatctggaccggtcggtttacctgagaaggaagtgattctgtttctgccatgtggtagtgacacgaagagtatcaatgtgctgcttggacttcctggctcggctatgaaagtgttccaagggattatggatatatgaatcattaaaattatttatggtttaatgtttgaatttaaattaactatgatttaaaaagcaaataatgatgatatatcaattacgtgtttgtggtcgtatgaaatattgttcgtcggtggagcaaaaatgtaactaagatgttaaagtatcaagtttaataaagaaagctattgtgtttactaaaatgttgtttggtaagagctcaaatctttgattttcttcttacaatactttttctgacatagagatcaattacaacctacaagtcacaccttacaaaataaacttatcacacatagcaaaaatattatcacgaaaattaaatcgttagaattgtctttttttgatcaacgatttgtctaaattctgaaattttatggttaaaagaaaaaaatcatttgtaagattatttttacataaaccaaaatagtaaagctttatattcgatcgtatttgagtaacaatttttaaatttcacacaaattccatgcttttgaaaagcaccaaatttaaacgtatcataaatcaatttaacccaatattttaaaataaattaaaatatttgacttgactttcgtattcgggtcggatccacccggatttgacaaataaaaacccggtggttggccatcgccttatcttgttgactcttcttcaatcataagcccacccacttcgattaccaactccgaccgccagagacagcgagtttcagatcaaagatgtcggcgacgcttacaggatcgggaactgctttggggttttcgtgttcctcgaagatctcgaaaagagtttcttcttcaccagcttctaaccgatgctgcatcaagatgtctgtttccgtcgacgagaagaagaaaagtttcagtcttcagaaatctgaggaagctttcaatgctgctaaggtaaattgatttcgtcccaccgatactttttgattctggttgaaaattttcggaaaagatcagattttgatggacttgactgaatcatgcctctgttttgcgcatagaaatgtgattctgaatgttgaacaaatggtgtctttttcatgatagaatctaatgcctggaggtgtgaattcccctgttcgagcattcaaatccgttggtggacaacctgttttgattgattctgttaaaggctcaaaaatgtgggacattgatggaaatgagtatattgactacgttggctcttggggacctgctattattggccatgctgatgacgaggttcttgcggctctagctgagacgatgaagaaaggaacaagctttggtgctccttgtctcttggagaatgttttagctgagatggttatatcagctgttcccagcattgaaatggttcggtttgttaattctggtactgaagcgtgtatgggtgtgcttcgtcttgccagagctttcactaacaaagagaagttcattaagtttgaagggtgttatcacggtcatgctaacgccttccttgttaaagctggtagtggtgttgccactttggggctaccggactctccaggtgtccctaaagcagctacttcagatactttaacagctccgtacaatgatcttgaagctgttgagaagctctttgctgcgcataaaggggagatttctgcggtaattctcgaacctgttgttggtaactccggattcatccctcctactccggaattcatcaacggtttacgccagcttactaaagacaatggtgttcttctcatcttcgatgaagtcatgactggatttcgtctagcctatggtggagcccaagaatactttggaatcacgcctgatctaactactcttggtaaaattattggtgggggtcttcccgtgggagcatacggtggtagacgtgatattatggagatggtaagatctggctctagacctttaacaagcttcaaaactaggggtggccatgtaccaatgttgctattctttttttttttttgtaggttgctcccgctggaccaatgtaccaagccgggactctaagtggtaatccgctggcaatgactgcagggattcacacgctgaagcggctaaagcaggcaggaacatatgagtatttagacaagatcacgaaggaactaaccaacggaatcttagaagccggaaagaaaaccgggcatccaatgtgcgggggttacataagcggtatgtttggattctttttcgcagaaggaccggtttacaactttgcagactcaaagaagagcgacacagagaagtttggtaggtttttcaggggaatgttggaagaaggtgtttactttgcaccgtctcagtttgaggccgggtttacgagcttggctcacactcccgaggatatacagttaacaattgctgcggctgagagggtactgagtaggatctagaatgttcccaaccctgagtctagtttcacaatcttcatgttttggggacgatgtgtatggtttgatgagcggatggaataattcttgtgtagtgagttgaattttgtttcatcagtagagcttgagattttttgtattttaagatcatctgttaatgtaatggttttatgttatctcctaaagaaatattgcttttaataccaaaccgatttgcctttccgattatttctgagtactatgaagaattcagaaatgcatatagatggatgaaaatcgcattgctactcaaatcgacatatcgcagcaatgttttggaatgagttttggatgtctttagcttgctgaaactaaatatatttgagagcgtcaaggtggtgtagctattgcaggatattgattggacctaaatctctctgttgaaaccaaacaatttccttagagaacaagaaagaagaagtggatgataaggattgggttttaagaattcaggagtaaaattgtaatctaatctctccatttttgttagttttgtacattttaagtagtcatgctatatgttggaaaaaaggagtagccatgctatatacctaatttatacaaacaattgtgctacaactattaagcacagtttttgtagaaatatgtgttattattaatgaatgattcaaacatgatttttcaacatgtgattgatgtaacctttttttgttggcagccttgtgattgaggtaaccgttgacaaaaaagctcaattacctaatcttatcaagaatagaatgataatttcaaaggagaaaaagggctattcgaaaatcaaaagcacaatgacacaaacgttttttttttttgtaatatttgataaagggatcggatctgaatacgggagtatgtgtttactttggtggtggtgatgttttgagtatactatttgttttttgtttttttttgataggaacagtttaccctattcagacaagacatgtgacaaatacacaatcaacaacaacgttgtaaaccgggactagccgtgtccactcattacaatctttatattcactactctagctcacaattaaaccttattgtcaccattatttccagcgaccattatggaagttgagagagatcaacacatttctccaccatctcttatggccaagacgatccctatcatcgatctaagcaatcttgacgaagagctagtggcacatgcggtggtgaaagggagtgaagagtggggcatttttcacgtggttaatcacggaatcccgatggatttgatacagcggttgaaggacgttggtacacagttcttcgagctcccggagacggagaagaaagccgtagcaaaacaagatggctccaaagacttcgaaggttacacgacgaatctcaagtatgtaaaaggtgaggtttggaccgagaatctttttcacagaatctggccaccgacgtgtatcaattttgattactggcccaagaatcctcctcaatacaggtactactaatctttggctacaaatggttgtcttctgtctagttaattaggggaaaaataccaaagaatgaatcgtttatttatctaactatttacgttgaatatgaaaggaacaaacgtaccgaaaataagcaaatttagtggaaataaaatgagtcggataaatttcggtttgagtggtttgtcaatgattgattataggaatagttgaatgatttagtaatagtaatatttgagctaaataaaattgttaggataagaagttaagaactctaacaccttaattatattaagaggctgctttaagcagatttgtgtttttttgttttgtttcagttataatataaacacgttaaatatgtatagcagaaacttttaatactatgaaaatgtgaaaaaattgatgaatatttttgaataaaaaaagaaaacagatcacattttcaaaacatgaatacctgaaaatgtatacagttcatcatatgtattacttatttttttgtatctaattcattatagggaagtgattgaggagtacacaaaggagactaagaagctatccgagaggattttagggtatttatcagagggattagggttaccaagtgaggccttgatacaaggtctcggtggggaatcgaccgagtatgtaatgaggatcaacaattatcctcctgacccgaaacctgatttgactctaggagtgccggagcacactgacatcattggaatcacaatcattatcaccaatgaagttccagggcttcagattttcaaggacgatcattggttagatgtccactacattccctcctctataaccgtcaacattggcgatcagataatggtttgttagtcgaagttgtatgatttctttaattaatgaaaatgtctctatcatttggtttttgaagttttttcttttggaatttgtaaaggctgagcaatggaaagtacaagaatgtgttgcatagagcgatagtggataaggagaatcaaaggatgtcatggccggtttttgtggatgctaatcctgatgtggttatcggaccattgccggagctcattaccggcgataatccatcaaagttcaagcctattacttgcaaggactttaagtaccgtaggctcctcaaacttcctatcgagtgaactcaaatatattagttgagtcttgtgtgtttactacatatatattgtgatattgttatattttaagttaagggtgtgtaaaagaattgatatactactaaaacaatacctacactacatgcactcaaaatattcttaaaagtatttaagtgctatattaatattttgtattcaaatttcatcaaaatatttaaagaaaattacattaattttaaaagtgttaattaatgatgtaagcgaattatttcgccgaataaagtatcaaaaaaattagtctagaaaattgatatgtattgtcactataaatagaaaaaatgcaatgacgtgaatgacgattaatatccgttttaaaaaagaaaatgaaaaagtggcttctctagtttttactttaccacccactaactttggattatgtgacgatggtccaacaaaagttgttactacaataattgtaacaagtgcaaaactttataggtggcgacgtggcgtcgtaaatattttgtataaaggttatcgtgtatctcgtgcaatttcatttttttctgttaatccaatgatccaaacatatggtacatatatatggtattagtatataatatattttaaaactttggttggcattggtaatctttagaaacggtgatattttgttggattaataccgttgccgtgttatataatctttgttaaaacccacacgtaatgagtagtaggcaaaaattaacaagaaattaacgttacaatccaaatagattaatactaaaatacgtacatgcaccatacaaacaatgctgtaatttgataaatagataaaacttattaattaaagcagaagcaaaccaaacaaatattttttttattcatgatctcttttctgtttatgggttattatgagattttctcagtcgagaagaagcttcttaagcttacgaaatttgtagtctttgtagacataaggcttaaacttgggaacgttctcatcaccggtaattagctccggcaaaggtccgaagacttgatcaaggctagattccacaaaaaccggccacgagattctcgtcttctccttatccatcttcgccctatgctccacactcttatacttcccattgctcattctctgccaaattccgaaaataaattaatccctaatttatatggagcttgaggatccgtgccctatttcagactaatctatatgacaaatgaaaaggctgattattattttcatttaaatttaaagtattattatacacaataccctaccatgattgaaacattaaaagatttcaacatggtctcttgagttcataaatttcttaccaagaattgatcgccgatgatgacgatgatcccggaagtggtatactccgcgtcgatccattggttatctttgaatgcttgaagccctaaagcttcattagcgactaggagtgtgattccattgacatcagtgtgatcaggagctcccacgactaactccggatctggacacggcggatagtaattgattttcattagatactcaatcgtttcgccgcctagaccttccttcaacgcctcatgccttaaacctagtccttctgataaccattccatgattttctccgatagcttctttatgtgacttgcgtactcttcattcacttcactgttaaaatccatcgtaaaacgattaattaatgaccctaaagtatttttgggtgattaatgctaattagttttataaataattcgaacgtaaaaccagttgacaatgagtggactggtctcgtacatgtattctggaggattcttaggccagaatttgtgattgactctagacggtggccagatgcggtgaaagagatgatccacccatgcgtttctaccttctagatctttctggtacttggttctgtatccttctatgtccaaggagtcttctggcttcgctacggcttccttctctgtctccggtagctcgaaaaactccattcccacttgtagcaaccgcagtatcagctcggtcgggattccgtggttaaccacctgaaatattccccactcttggctcgctttgaccaccgcacttgccacaagctcttcatcgggattacttagatcaataacggggatgtccagcgaagaaatgtgttggtttttctccatctccatggttttcagtttcactcgttcctgcttcgagtacggatctattgatcggaggagagaagttgcgatatgaatattaaatagggtaaggtgatgaactgatgatgttaggggttgtctgttgttacatttgaatttaaacagtcagatgacctactttctctaatcacgtttcttctcaacttattttattttttctaaaagcttggcacttccctcgatattaaattctaaccaactttccaataatatgaatgattattacaacgttgtgtttctcgttggcacggtagaaagaaaataaaaatagcatgatttttggtcctactgtcataaaattatagtaaacactataatagtgcattgggtacaccaaaattatataatagtgtcgaattatttgaactgaattgtttaggttggagacaaaaagaaagaattatttaggttatcacaatactcgaattatatatatcaatactgtcggttactgaataagttttacttttgaaaaaccattaaattttgagtaatatttaataaacagaacactgaacaaagacacacaaagggaaaaaaataaaaataaacaaagacacacacacaccgatcataatttcaaaaaaaaaataaaaaaaaaaatcaattatttcatcaaagaagtcaaattttttttgtttgaacttcaattaatagaaaccggttacaacaatgccaaacggccaaatgaaacagagcaacaacaaacaacatacatacaacgacaaagaagtcaattcttgatcagtcgagaaagcttggggacttcaatgtctatgtaatcctggtaagttaaaggctcgaacttgggaggattatcgccgctggtgagttcgggaaatggctcacaaccatatcataaggaggcttgatatgaaccaccgacgacatcctcgttttctttttatccatcaaggctctatgcaacacattgttgtaccttccgttgctcatcttctacaaatcccaaaacaaatctcatctaaaatttttagtcaaactataaacattatttttggaaaaaaagaaaagaaaaatgaaacctataataactcatatgacttaccatgatctgatctccgatgatgataataaccgcgggatatatataatctacatcgagccagcggtcttccttgaacacttgaagtccgaaaatttcattgggaatgagaagtgtgagtccattgaaatcagtgtgggcttttattcccatgacccaatctggctctggacacggccggtaatagttgatcttcataagataaccagcactatcgtccccgaatgctaacttcaacatctcacgttgtaaacctagctaacccttcggatagcaaaccgaggatctcttccgctagctgctttgcatgctttgcaaactcctcagtcacctctctgacccaaaatcgcagcggttaatgtttttagttagcacgttgtttaatttgggtaaatgcataaatgaaatacgtacatgatttccatatatcatagcacaaattaaacggtaaattataaaaaaaaaaaaaatgtttgatccatctgtatatatatatatatatatatatatataacctgtattcaggaggattcttaggccagaatgcataattgactgacgatgatggatatagattatggaagatatgactccttctaccttgtacatcatccatctcatatccttgtatctctttggagttcgctggtttggccacggcttctttcttggactctgggagctcaaagaactgtgtatccaccttgtgcaacctccggattagttcggttgggatcccgtggttaactacctgaaaaattccccactcttcgctcgcctttgccactttacgcgccacgagctccccattggtgttgcttaggtcgacgactgggaagttttgtgatgatgggattttgttgttttgtagagacaacggaggcttgtgctggtctctctcgacctccatgattctaatttttttgtgatcaatcattcaaccaatatacatgttctgagctatttgaacatgtgatgtgggagtagttgagattattaggtgttataagagtggaattattcctcttctagaacaaatttcaattataatagaacattaatatcacacctttaattactagcgttttttcttttcaatatttcaaataatctaaatatctaacatttcagataaaccgaaatagaaattctcgaataaaattgtagtttaacatataaaaataaacacttgataattttgtagataaatttttgacgacccaaatcacgtcaacgtatactttggcacagacgaagagctctttttgacttcataaggttggcgttgctttacatgataacgtaaacgaatacagcaacttaagctgattatttttgaggttaatcactacgtacataggataggagcgattacatttgaatgtatagcatcaatcagatgaatattttgtctaaccgcttagcttttccacatattattttaaattcttgaaatagttttattgtaccacatatagaaaccctcaaaaggaagctattaaagaattgtctccttgaacaattcatcatcatttattgtaggtattgagggttttcagtagacaggaagatcttcgagcgcccagcctcttatcttctggtcaatatagtcattatatattaaagtctcgaatttgggaggattctcgtctccggtaaactccggcaaaggtccgacggacatatcagccctaggtgcaacaaaaacaggccaagaaatcctcaatttgtccttatcagacttcgctctgtgaagaacgttctttaacctcccgttggtcatcctctgcaattaatttgaatccacaaatcaaccccaaaaacattaacgaatctcaagtaaaaaaaacaacaacaaaaaagtcaaccataccatgagttgatcgccaatgataacaaccacggcggagtcgatatagtcaaggtccaaccattgttcgtccttgaaggcttgaagtccaggaacctcatttgggatgaggagtgcgattgcacccatatcgctgtgcgccgcggctcctatgactaattccgtatcttgagttggcggatagaaattgaccctaagcacatactctgccgtgtcaccacctatactttgcgtgaacgtctcacgctgtaaccctaatccctctgataaccaaccaagaatcttctccgttagcctcttcatatgctttgtatactcctccgtcacctccctggtacccccaaaaatttggacgaaaatccaacgtttaaaatttgatattttgttaaagaaatgaaatttaacgtaaaacatgaattactaactcatacgattttattaggaaaggtacgtacctatattgaggaggattcttaggccaatatttataattgataattgagggtggagagagtctgtgaaagagatgttcgtcccaattgtttatacctcctagataattcttcttgtatccttcgaagtcttcctctttcgccacggtttccttttcagcatccgggagctcgaaaaactgcgtaccaaccatttgcagctgccgcatcagctcggttggaatcccatggttaaccacctgaaaaactccccactcttcactcgctttcaccacctcacgcaccaagaagtcttcatcagaaacgcttagatcaacgacgggaacgtcgaccgcgcttcctccaagagtcgagctctccaactgcttgctcaaagatgggagagacgactcagatgcattgtggtctctctcttcttccattgcttcataggtgtgagaaggaaaacaaggctagaggggatttaaatagggtaactgctcgaggttattaaatttcttgtatttgtgaattggtggtttatttattgtgcgtgttttttttttaagaaatcaactttcatcttctaagtcgaccatgaatgtaaccattattgggttgtaatatttttagactcttatacttatctactaaaataaagaagacacaactagctagtttgtagcaaacgtaacgatcacgttaattaacagcctaataattgtattatggcaacgtcgtgggtccattgtgtatctttaaatcataaaccgtctcataacattggccgccatatatttaagaaataagaaaaatacaaaactagctttctgacttctgctaaagacaaaaatagctaggtttaattaagaagaaactgtgtgattgtgtcgatcttggtaggtcaatgcttcatatttatactaaattgcttgcaaacagtgagttttatctttagcagaagtcagaagtctgtttgtgacttccacgatgcagaatcacgtacagtttgtatagcttggttcacacatttcaggctagttcaaggtttgtggttttcttatccacttatttattgtatttgtcctgaaacaaacaagcatatatataactcttcttcgttcttttgaatcttaaataaaagtcataataatagaaaaacatttctcattcatttgtttgtgttgtatatatataatatttctattatgaaactgatggtaaggtgaacaaaaacaaaattttgatttggaaaagtattatgttcgtaataattggatcactgcttacgtagtataattgaatacaagtttgaaaacattattttactaaagtataatcttttcaaactttaatagcaatgtttaaactgtgtggtattaaatattcattaggtctatgattgatgatgtaattacattagattctaatgtatgttggtggtaaatagataagactggcaggtaaaaaaaaaacaaatttcataaacagtagaaacatcaccaaaattgtgttcataataactgtaaattgtgttcataataactgtctcattatatatatttttcacttggcaaatctcctatttactacgttttgagaaatgatgttaagagaaatgatgatctaatataattaacaaatacttgagaggatgtttatacaaaaactacagagaatccaatccatccatatgaatagcaacattccacatgctgcattacaatctaactctactctataaagcaaatcgcaacgctttcttctgcggcaaacacacagattctaacccgagactgatgatctcgattttacctttagaggcgtctggatttgttaggaggtgcgtaacctgacatacccattccgggatctttccttcttagctgttgctgctggtgcggttgagccatcccgcgctgctgctgcagcggaacactcgggttaagccctgcctgtgccgggaaattataagccatcatgccttgagattgctgcatcctctgcatgttatgtgcaaccattggtcttggcatcgatctactgcccattccatgagctcctgccatgttccctgctacgtttcctgctgctactgcttgaggcggattgatgcttgtcgtgccttcgaaatcggtgtttgtatctactggacgagttgggtaattcacattcttctccatcggttggctggctacaaatgcgttccgtcctgggagaggatccattcggaaatactcgtgttctagtgcttgtgaagccgtgatccgctttagaggatcatattccagcattttggataacagatcatacgcaggacttttctgattcaggtgaaccacgttgtggagacccacactgtcgtatttgtgagcttgaatgtgttgaacatcattttgccagtgtggaaggttaactagtgttggccatttatccatcgtcgggtggcctaagatcttgaatatcttgtcaagttgatctaactggaaagggttttgagacgatttcgcttctgctccttgaaacaacggtttaagagttagtaactccgcgaatatacacccaactgcccacatatcaacagcgctcgtgtagtgcttcgaaccaagaagcagctctggtgctcggtaccagattgtgaccacaactccgttatccgatagtggtttcaacggagcttgatatatccttgcgagcccgaaatcagctattttcactattccgtgctcttctgcatcacccataaccaagatattcgacggtttcaaatctctgtgtataatccaattactgtgaagatagttcaatccgttgagaagctgccagagcaaagacttaactgtgtatgtgtttaacgaatggccgactttgtctctgtggtgcctgatgatttcatagagatcgtactcggcataatcaaaggcaagatacagagacatgtctgcaaaattgatgtggacattcacaagcttcacgacgttctcatgggaaatctctctaagcaacatgatctcgcggatagcagtcggggaaactccatctccatctttggactgcttaaacttcttgatagcaataggtcttttaggcggagtcttggttctagccaagaaaacaagaccataagtgccttcaccaatcttaccaacgagattgtactgttgcagccactctggtttctcactagtgctgtttgagctgttggatctactggaactcccatctcccattgctttttagtattattctctacctcaatgtccttaccatgtgaatcggaaaaggggtagagtctaacaaaacaaaacaatcttggtttcctctttgtagttctcctgaaatttgaacaaaactttggaaaatcagccaaaggaatcaaaccgtacatgtaatctatctagattctagactcaatcaagtgatccagaaaacttacaagcaagaaacttcacagaaaaagatctaggactcctcacaaaccaaattccaaaaggaacgtttcaaaattagcagacaataaaattcacatccctcagaaaacttcatatgaacaaattcagacacaaagactccaaattatcagcaattgacgtcttatcaaatctcatattcaaaatagaattcatctacatcgagacacgaaagctcgagactttacttcaaaagatggaaaagggatcaatcaattcagcagaaattaccaagctccaaagaccaataaccagaggaaaaccctacaaattcaatacccagagctacggtgccctaacctaatcaaagaccaaaaaatttcgataccactttcaaattaaaaacttcgaggccttatacgatctgtttttacatttctcaaaaatcgacgatcaggaaaatagaaatacgtaaaggatctgaccggataaggcggtcggatgaatgatgggaagaggagctgagcttggagaacctcggagatggaggagagtagacaaaagcgagaaaattccggtgagacgtcacggaagggagaagattgcgttttccagaaaacggtgacgttccaagcagccgacgctgagaatggaaactagatttgtaatttttttagccacttgctccaactacgctatttatttattagtaaattcatttatttttgtgttcaaataagtaatttcatttaaatcatcgatatacattagtagattggatatttctcatcaaagatttaatgatttatagataattttatcaaaagagaaataaattgtgtttttttatatatatgtcagttattaatattcttagaaagtagaaaattgtgaaaagagggaagaaattaaaaatattaacagtatagaaaaacaataaatgttggaaagaaatgaaaaacagtaaaattataaattttgtccagttactacagtttttttttttccttttcactgtctaaacaaacacaaatatcagattaacaatgaccttgtctgaagattgtagcaactaaaaatagacctcagtgaaacaggtgtgaagcagtcattcacaaaccagaatcaaaaggctatattggttatagtatctcaacaacacctcggctcacgattttgccttcgttgagatcttgaaatgcttttcctgcatcttcaaacttgtatttacttgagactgcgtttgtgagattgaaaatccctgactctgccaatttcactactttaggaagatcctgtcttgctcttcctccataagatcctataacttttatcttcacaaaaaattggaaaaacagaacaaaaagagattcaatatcatgatcttaaaagacaatctcagtaccagagactttcttctaacaaggccgagagagagagagtaagaaccccaaacctttctacgaacaagtcgatttatgtcaatttctccaacggaaccagcttgtgagagtccaatcatcacagcttttccaccatctttcacacttagtgtgcactgcatgaaagtttgaggctttcccaaggcttcaacagcaacatcaacacccatcccaccggttatttcctacgaagaagaaacagtttttcatatttatatcaatcaatggttcatcttcacaaataagaggtcttgaatcaaccatactcttatcctttcaacagcatcttctttagcagcattgacaatatgagtagcaccaagtgtcttggccttctgtaatttatcatcctgaacatccacagcaatgatatccgaggctccaaaagcccttgcgatctgcaaacaactgaagcaacaactcaaagatggttatggtcatacaagaagcaataaaacccaaatccggtaaagaaaagaaaatgccacacatttaacatacctggagcccacaccaccaattccaataactgcaatagaatctccaggacggatctcagcagcatgagccatagcaccatatgctgtaaaaacagcacatcccagaatggcagattcagagtagggcaaagactctggtagaggagctaaaccatgagctggtgtaacacagtactcagccatccctcccatactatacatatacactggtgaatctgccagaaattaagaaatgtaattaggtaaaacaatcacagttctcctaatatgccacctgatgtttaaaaagtcttcaaatttaccatcatgtcgcaaaaagagacgagtttcgccatcgtaaagagttcccttggctctgttgtaagcaaagaagtcttcacatagatcatcatggccctgtatccaaattaaaatatcagctaaaaagctacagttctcagattagagaatccgatgaaagcaatacaatttcgttctcaccttagcacaataagaacaggttccacaaggcataatgaaagctccaactacacgagacccgattggaaatctgaagaaaagttgagacatttaggatttcttcaaaacatatgattccattagtgtggaggtgaagtaaagttgacaaacctattaatgatcttgtgatcagtaagtggaccatgttcaacaacttcaccagtaatctcatgaccaataacacaaggactagcgaacggtatctctcctttcatcacatgaagatcagagtggcaaactccacaagctgcccacaaacgaaaatgaatactaactttcaaaactcgaatcctacaaattgattcaatcaaatcccagaaaatgaagaagaacctttggttttgatgagaatttcattggatttggggcggggaatatgaaattcttcgatggttagaggcttattgggctcgcgatacacggctccacgcatgaatccgccggggctcacgtgatacccacccatcgattgagaatcatcgccggaggctccggtttggagagacctagtggagagggcagagccaacggcgagtcttgttaaagagaagaggttcttaacggcggaggcgcggcggagaatcggagcaaacgccatgcaaacacgacggacgaatttgatcggagatttgggcaacgaaagagacaggcacttgacacgatagactgaatctgttggacactttgattgaattacacgacgcgcttaatctgaatttacgaaatgagtctgcgcaggtggtattcacgcgccgatattgcgtgcggggatgatttgtatcactttaaggatgtattccttgggtcaacatccacgtgtatatcttatctacgaaattaagatattatatagacaattaggacggaatgctaattgttagttttttatataaaaaattttaaattaaaataaacaaaatttactataaacattctttagtttcaaatttaaaatacgtgaaaaatattaaatttatgacaccataaaatttacagaccaaataaacgtaatgttaagttcggttcgttttctatgtttttaaaactaatgtttacaaaataatagtaaaatcaacatagttttatttatgaattttttaaataaataataataattgttttttaaaattaagtttaagagttattttgtacaaatcatgccgaactttgtatgtcgaaaacttacagattaacgaagacataatgcataaacgcagttatttttcgacgctttttaaattaaacacaaataacatttaaaaataatattaaaattaacataaatggttttgcttaaaaagttaactattttgttaacactaaattgttgattttataaaaacttttaaggtaaatcactattatttttaaaaacgatttaaaatgttaaatcaaatatatattacgtgaaacccatgttgaacttcaaataccaaaacttacagaccaatctttaaagggtaggataaaacattttaaaaaaaaatccaagtgcctaagtatttaattatgtgtaaaccatattaaacctaaaacacttcttaggggtttgaatgttgtatctaattagtttacacaaaaactaaaaatttaacacttaaaaaaaaaaaaaatccggtttgttctcaatgcattgaaatttaacacttaaaattttttaaaaccaaaataatttctatactgaaaacagttagttaaaattttaaaaaacatattttgtataagtaaaaagatagtttacctaataaaaatatttttaaaaaatcataaaaactaatcttagtgttaaatttacttgcgtgaaagcggttgaactaataacacggcttaaggacccgtaggatgggacggcatgcttaatccggtttgttctcaatgtattgaaatttaacacttaaatttttttaaaactaaaataatttatatactaaaaacatttagttaaaaaaaaaacataagtaaaaagctaataaaaaatattttttttaaaatcataaaaactaatcaaatttacttgcgtgaaaagcggttgaactaataacacggcttaaggacccgtaggataggacggcatgcttaatccggtttgttctctatgcattgaaatttaacacttagggggtgttattggtttgggatttaaaaagagttttaatgactttaaaagttatgtagaatatgttgttattcaatcaagactttttaaaactctgttacaatttggtgttattggttgtggatttataaaaagtaatctaaaatttttataaatctagtgttattggattaagagttttatagagtcattaaaagttttgtgttattcaattaaaacaaaagaatcttggattgttgataacttaaaatattatgttattggtttaggattgattgtacataattttcttcataacaaaagtcatgaaaactcccacataaaatagagagattgtggaaagaatgtatcatcaaaaaaaaactctcatcatcattagctcttcgacttttgtgagactctgttacggcgagaattgagaatgaaaacaatgcaaacgtgctacgtccttctcgttcgtcttcgattggtaatggagttcagtttttgaatcgtcacttgtcttctgtaatgttccgtaacaaagattgcttggagcctctgcttgaacatgaaaaatcttctttactaataaaaccgaatatgaacaaaagctgttaaacatgaaaaactccactattggttttgaaaaaatgatatttgaactagattgaacacccgtacatagaacatgttatataaaagatagaagatggtcactagacgttaaaaaaaaattggacaatattttgaaaatattttgcagggaaagttttgaaaaagtcattaaaagtatacaagattatggaaaaaagttttaaaagactttacaagattttggaaaaaaagtcatcaagataatatcaaactttttagcaatcttttaaaatccttgatttaaagattttatcaagtcactaaaactcattctaaatcacaaaccaataacacccccttagattttttttaaaccaaaataatttttatactaaaaacaattagttaaaattaaaaaaaaaaacattttgtataagtaaaaaaggtagtttacctaataaaaatatttttaaaaaatcataaaaaataatctagtgttaaatttacttgcgtaaaaagccgttgaactaataacacggcttaaggacccgtaggatgggacagcatgcttaacccggtttgttctcaatgcattgaaatttaacacttacatttttctaaaactaaaataatttatatactaaaaacatttagttaaaattaaaaaagaaatattttgtataagtaaaatgatagtttacctaataaaaatatttgtaaaaaatcataaaaactaatcttagtgttaaatttacttgcgtgaaaagcggttgaactaataacacggcttacggacccgtaggatgggacggcatgcttaatccggtttgttctcaatgcattgaaatttaacacttagattttttaaaaaccaaaatattttagggatttagatattgtatctaattagtttacataaaaattaaaatttaacacttaaaagaaaaagacaaaacattaagaaaaaaatcatgaattttacttaaaaaatatttgaaaaaacctttgatatttatttagtattaattagaattggaaaatagaatattttttaaaaaaatcaaaactattactatgttatatgattttcaaaaaaaagtaagaaaaggaaaatagacctaaaggttgtgaaaccctaataactcgcgattcctttgtctccaccggtggattcgttctctgttttcctctgattcgcgtcctcctccttagtcgaagctttctcccccaaagtaatcgtgcaagcgaatctcatacctccaatccaagccgatatgcaacatgtggcttcaagagatggcttgctaagaacgcctcgtaagacgtaatcgtacggatcgttgagaacaaacgtggtctagtcgccgttaacagccgccttggctccaccgcgactcatcggagaaaagtgaattcaactcttacggatcatcatgttgcagaggagatcatcatcgtcatgggcttttcacttcttcaaagactactaattggatcatcggaattcacaccgagtctctgtataaaagagattatcaagaagaaaattaaagaagaagaagaagatgcgtgagtcagagagatttggtttttttttttctctcaaggaagaattagaagaggctgcgtgtgagaatctgtatttataagcaaagtgttaattaggtcttgatcaataatgatagccgtttgtttaatatagccgttggagtcgttaatgactttgacataagcagatatttgtgttgatcttaatttccttttctttggatgggctttatttccttttttcttcggatgggttttgtttcctttttttttttttgatgattacaagttacgcagagagaagaagcaaaacaggaatagaatctgttgactttaaaactcaaccctgttcatctggtaactctctctctctgttgttcacggttattgaatctgtccaaatgtaggaaactgtttacaagtttgatcgatcacacatgcatgcatcctcctctgttcttggttatatataagagggtatgaagctgcagactaatatttgtaatctttgtgaaatttacagataattaacaatttgggaacttatatgtttaaacataattagatgatgaattgctgcaagaaaccttaaaattaaaggaataacaaaaaaaattggagtttcttacaaagccaaaaaataaaaaacgaaggaatatttacttggctctaagaccaggaacatttttgagacccatcttaccaaggataagttttggtatagctggaggattgtcaagtcccatactacgactaaactcgtttgccaactccacaagcctgtctttgtctcttccaatcatcttctgtgagttgtagtaacccaaccaagcctgatacgccgcctctttgttcctcatctcgacatggcaaagcgccttttgcacctatttgttcacatttcaaaaaattcagtttctcacacacatcaagctaatgaagttttttcaatttctaactaaaaagacttggcactggtagtgcattttagattccaacttctatctccttgaagcaaagatcagtgaaatatgaaaaagggttaaccttttttacagtttctgggtctattgatggcagaggagacttagtgatgggtaaatctttaagagatgatagaaagtattcctcccatggtgccaacaacaatatgccttctccttcctttccttttcgcccggttctaccaagtctgtgtatatattgttctctgtcttttggcaatccaacctgtagaagtaaatagatgtatacaatttctataaacccccaaataaaattttccggttgagttaagagttttacactattgtatgattgattttacctgtaaaacaagggtcacatcagggtaatcaactcctcgagcagatacatcagatgttacgagaatcaaacccttggattttcggaactcgttagaaacccttgtcctgtaactctgcggttttctagaatggatctctctcacgtttaagtttagctcaccaagtagatcagccactaattttgtaaccatggccgttgtacagaagacaatgaccttcaggaaccagagttaagtcagtaagggaaaaacattagtcatcgtgctttgcaactgatgctggtaagaatttcataccttatagtctacgttacccataatgtgttcgcgaagaagtgtgtacagaagagagaaatgtctgtccagtgatgcaatcatgtgcatttgtctgacctgttgatgcgtctctatagtgccttcatgaacacaattgacaaactcgtgatcccgccttagagcaacaaggcatatttggcgtacctttacaccaaaataacacaaatcaaaacccattacaaaaagggattatctcaacgaaaaccaaaaccaaatgaattatgcaagaaaatgggacaaacctcttcaggtactgtggcggaaaatagaaaagtttgtctctccttaggaacagcggaaattatcctctcaatgtccttgcgaaagcccatatctaaaagatgatcagcttcatcaagcacaaggactttcacaccctttaacctcgttgcaaagcctggcgtgttctcgatatggtctttgagccttccaggtgtagccactaaaatctgaaaatttcgatataaaacaattcgtatagaagacgcatatattgaaggaacttttaggattcgcttgaacattattaataaatccacaaggaatgacaaacaattttcacctggcaaggatttgtttgcatacgcttttgctctaaaccaagtctcgtacctccaatcacaacttgaacaccaatagatggatgatactttagcaaggtgtttgcttctgtagcagcttgattggcaagttctctagtagggcatatcacaagcgcaaggattgggggtcgcttattatccgggcttgtaggaggagatttgacaactacttcaattgatggaagcttaaaaataaacaccagcaataagcacagatcccaaatataggttcaatccattaccaaatggccaacttagtgtatggtatgtctcaccaaaaacgctacagttttcccagttcctgttttggccttagctaggacatccttgcctgaaagaacagaggatgccaagggattaaagaataaaagatataacatggaagtcattgtatacttgaggaatcccattgatactcaagaaagttcacaaagtgtctaggcttttctttctgctaaactggtggttattatataaagcttggtagagactagagagtcaccatttctaaatcattgtgttatttgtttctgcattgttgatccaatgagcaccataagaaacgaaaagaaaaaaaacaaatacctttgagaattatagggagagtagcttcctgaacaacagtcattgtctcgtatccagcatccttgattgcctttagcgataagggagacaatggatagtgatcaaatctgttaaccgaaaagagtaactctcaatctgacagtaccaagaggtcaagattcacaatcaagcaaaactcttaaggttgatgtgattaattcaaaatcacacagaagaaactagatttgcaacaatgtttgtttaccttgtcttagtcaaataagaatcatttgcattcctcgttttatccgcttctataacattctccttatcaaacccaaaagcagaaacagctttcttcttaagaaagtcataatcttggtcctcttcctcatcatcttcactaagcaaatccccaatatctcccattactaaactcttgacatcctcatcactactttcgtcttcaagacgaagatcttcccgtttccttaaacccttctcgtcttctctatctctactaaagcttgtctctttcctcccacgaaatgacgcctcgctactctttccttgaatccgactattgaatcccctttctctatcaccaccataacgcttattcctaaaggaatcaacttggttgcgaattcctctcttctcttggtttcttcctctgctacgatcctcctcatcttcatcgtcactcttgagaattccacgcgaagatccggttctaaaaccgcttacccaattgctgagctcttcctcgtcttcgatcaagctctttgacgcgcgaatttctcctccgtctcgaatccgccgctcaaattctggttgatctctgttaggacgggttgagaagtttatgcgagacccaaattcaaagtgattcaatccagaagagaatatccggaagagcaaagggacggagctagaggtattataagagagatgtgtacccgaaagagagtgagcgaagaatcgtattcggagagggaaattcaaaggcatgactttagatacaataacggagtttcgccgttgccggtggccggaaaaactggaggcaagtaaagggttcagtaagagtgaggctttttcgagtttcagtggttttaattttaaggaacagaggaggaccgttaaacgacaacgtattatcttcgtatgctgaaaacggcatgtcgttttgtttgtttgaaatgttggaggaaaataatcagcaaacgacgacgtatcccctcgtgttctgaagtatggaaacggcaggtcgttaactcttgcttcaaaaagaagtttccctctttcaatttttttttacttattcattgacttcgcttcttcctctttgtcgttaactcttagataattaacacggaaaaaccataagtaaaaagcaaaacaaatagataaagaaaaagagcatatacttcaaaacaatggaagagatgatgatggggtcaatacgatgtgaggaatcagaagaaagattccagcgactgcgtaccctaaaaggaaccagaaccaccgtccattaatggaagcgagaaacttgcttgcatcccaaagcactttcataaagtggcaaaagagaaggcaagggatcatagtttccatactcaccatcatccacatttactctaagaaatgttgcactcctgggggctgggacaggatgtccatattttgatgcttccgcactagtcttaggctccatcggttttggaaggaagttgaagaacatttagaacaatacactaaactgtaacgtcgtcattttgccaaagagaaaaaaaaatgggccactcgattattatttgtttagacccgttggtaatcgggcttaaacgggtgaaccctattaaattatttattttttaaatggattcgggtaaaaaaaacataacaaatagcccgtttagactcgcgggcttgaggcccattgtaacatcactagagagagaggtgtcttattttattttttttatgagtgtttaggaccaaaattagattatcgggctttcttcacaagccaattatcgtacaaccatgtttgagttccagtgaagaacctttttgacgacggcgtatactcgtatgcttaaatatgaaaacggcaggtcgttctttttcttcgaattgtttggagaaaagaaatttcgaagcgacgacgtatcgtcatgtcctggaatgtggaaacggcaggtctttgtttcataaaagcttagaattcttggaccatatttagttcatgaatttatcatacgtattaatatggttagtgattgttttaattagggtactagatgatttattatgacctaactgatatatccacctaaatagttttgatccgtagcttttcagttgattcacgagaccgaaaatttgaactaaaatggagaatttgtggattataaccaaattacaatatctatatgaaatataacagatactgaattagaatagaaaacatgttgttaaaaaatttaaaataaaaataaaaataaaaatgggcaaaacaacaaataccaaacgtaaacgaagatattagaaaaagaaattctaaaacagtggcgtttttctgtccaaatccaaaactattatgaagggacgtttctgatatatatataaaaaaacccgagattttatcggatgtgtcgtaatgaaaggggtaaaacacgtggcagtcaaccaggctgtcagttgttggtgaaagcagacaagcgcgtgattttaatataatctctctttacccgcgccaacaacactttaccaagacagatctctcatggcggtgctctgatgcttcagcctttgattttttccttttttgacctttttaatctctaattataataatcagtacaaaatcactgttgtttaccattaatttaaggaattaatcctaatctgattttaaggaattaatctctatttgccaaagaagaggcgcaaaggctccgtcttttttcttcttcttgtttctgtgttaccgatctggctctgtcttcttcttcttcttcttcttcttcttcttcttcttcttcttcttcgtttacgtctctgtgaaatgctcaagctgattagggtttatcaactttttctcaactttcttgttatctccttcgttatcctctctgtcttctcaggtgactaatcactcactctatcgttatccacttgattgttttgtttcctgtttgctttttgatttgagatctatttttgggttcagattgttgtcgacagctaaattctttgatgtatttggatcaaagtatccgtttttatttgatttgttccgtcttcttcgtgatcgtgtttgtgtctgtctctctcctagatttgggttttggggatttgggtatgcgttgttgtgatcagaagggacctttatcgtttagtgatctctttgatacagagagacactaaaaatggtgaaaaaatgacaaaacttcttattggatgagggaagaaacgttctaacgtgttccatcttctatcattttcttcttagatattttaagattgactgttttctgaacatttcatgctttaggaagtgttaagttgaaacctttttctcttagctctccaattgctaagtgttttttctgttgtctttcttaattatcttttgggattctcatgggatttgattgaggtagagggaagaagagagagagacaaaaagagctttaggctattgtctagacttgcttaatttggaatatatgtgtgctgagtctagtattttcctctgtgaaatccagctgatataatcatgatagtaacattcagtttcttttgtcctttcattgattgcagcttagcagctattgtgcatttgaagctgtactcggaagaaaagcccatagaagagtcaaatgtaagttctcttactgattcttgagctcccaatcaatgcatagaagctgcgataataacccattaattatgtagaaagtttatatgctcattggtcgaccatacactttattttggctgtttctgatgttctggcttaacatatctgttttctttgctgttcttgtgattagcatgaactaagtttctgactttgaaatcagcaaaaatgtgtcgtggttggtcatgctggaatctttagtgctaattatctctggctcatacagataacaaaaaatggctgcggagcttgtaagttctgcaacaagtgagaagcttgcagatgtggactgggccaaaaacattgagatctgtgaattagctgctcgagatgaaaggtatgcagagccagactgcttttttctttgtagaaagtgatatttttttaccaacttataaattctttttagccagagaatttcaagcttgcagatgttgctatgatgtttaaattttatcatccttaatgattgagatatataaacactttacttttgcttcatcttggacatactttttttctgataatgagtttatctatggtgaacaggcaagcaaaagatgttatcaaggctatcaaaaaacgcttgggaagcaagaacccaaatactcaattatatgctgtccaggtaggttgtggtccagatctatcgtatacagtagaatcatgctttatgagaatgtcatacttttgaacgttttggtaacttaaaactgttgttttgcttgttcttgcagttgctagagatgttgatgaataatattggagagaatattcataagcaagttatagatacaggtgtactccctacgcttgtgaagatagtaaagaaaaaagtatgttcatctctgtttctggatgttacttctctaccaatttgagagttaagctgcttatagtttgcatattgtttggttggcatttttcgaacactttttagtcggatttgcctgtaagagagaggatttttcttcttcttgatgcaactcaaacctcccttggtggcgcttcagggaaattccctcagtattatacagcatactatgaattagtggtgagtttgaaacaagaacattcgaattccgtgattctgctcttgaagaagcaaattagataagactgagagcttttctttttgttatcttctgttacccccagaacgcaggagttaaatttactcagaggcctaatgctacaccagtcgtggtcactgctcaggctgttccgagaaatacccttaatgaacaacttgcatctgccagaaatgaggggcctgctactactcagcagcgagaatctcaatctgtctctccttcgaggtatcttcttctccatatgtcagttgtctaaattttagttgatgttaagagaccttatgctgttttatctctttgcttatagtattttacaaaaggctagtactgcattagaaattttgaaggaagtgcttgacgcagtcgattctcaaaatcctgaggtatataatatacctcttgactttgtatagttacctccattaaacagacattatttggctccttttctaatctcttaacctgagaatgactccagtttgatccactttttttcatccagggggcaaaagatgagtttactcttgatcttgtcgagcaatgttcgtttcagaaagagcgcgtaatgcacctcgtcatgacatcgaggcaaatcttctttctctcttggtttagagggcatgttaaaagaatttttcttttcaagtatatcaaccaattttgtttatgcagggatgaaaaagcagtttctaaagcaatcgaattgaatgagcaacttcagagaattctcaatagacacgaagatttgctgtctggtagaatcactgttcctagcaggtctaccacatcaaatggatatcattccaatctcgaacctgtccgtcctatctcaaatggtgaccagaaacgcgagctaaaggcttctaatgcaaacaccgaatcaagcagcttcatttctaaccgagcccatcttaagcttgaggaagaagatgaggaagaggagcctgagcagttattcagaaggtctgtcccctcacattactcaatctcaaatcggagattacaaagttgataatctcataaggttcttggaataaaagatggttatccttgatgctaagactaaggatctatgtgaatatatacttgcagattgcgaaaagggaaagctagagcaaggcctgaggatgaagaagagccatcacctccacaaggattgcctggatcagcaatacataacgaaagacttaaccgtccacttatccgtcctttaccatcagaggaggcatcacgcggtggtgatagccattcgcaatccccacctgttgtgattccaccaccacctgcgaagcacgttgagagggaaaaattcttcaaggagaataaaggtgacggtgccttgggtttaccaggtcatatgcgaggcctttctttgcatagccgtgatggcagcagctcacgcagtggaagcgtagacttcagtgactgaaacaaccaaagctctcatcatcatatatatgtattctttcacgcttgtttctttaggttttgttaatttacagatgggaaaaagtttgtgttgtgtgttgctgttatttctctctctctctctctctttctctctccttctacgtctctagtgttgtgaatttagaatgtagcacgatgagatctgattatgtatacgagtaaaaggtacttcctttcactatgttcaaacctgagctatgttatttacagaggttgttgttactgttcctgtttgtgtattgaagccgaatgttcaaatgctatgataactaattggtcaattgcgtagataaagttttgaaacttcgaattcacataaacgtaaagatacaaggagattgaatattacacaacagagtgagagtttcttaagctttgggaggctcttgacaagaatgggcctctttaacatgcttctcgtattcatcttcttcctcttcctcttcttcctcctcttcttcttcttcttcttcttcttcttcaacctcgtcctccacatcttcctcatcatcatcaaagcccttgacggcattagaagacggagctggattcctggcttctccaacgatcttcattatgtcctctacgctttggagggaaaagcttggggtttctctcttgtagtacgccgcttgagcaggctctgtaagctcctttggcaagttctttaagtaccatggatgcttcttgatctctttaagtgtgattctctgcataaatttatgacatgtcatcaaaagattgaaatatagaaaagacagcttcaactcagataaatgagaaagtagtaccttagctgaattagtgacaaatatgcgagagagaaggtgtctgcactcctgcgatatatgaacgtaatccgggatcttgtactggacagccattatacgctgcagaacattttcacagcaccataaaacacttagtagaagaattgaagtgaaaaagacgctgtgagaaatttgaggatttggttaatacttggattgttttcctgaagtttctcggatcatccgggtcttcaaacggataacctccaactaacatcacataaagagtcacaccacaggaccaaacatccgcatgctacataacacaaacaccaaagagttccattaacaagtgacaaataaggatcagaccattgaagaagacatgagtaacattacctttccgtcatattctcttcgggaaagaacttcaggtgcgatataagctggagtaccaacagttgatttaggtctagagtgaagcagagatgactgcacaagaagaaatggaaacatatgacttatgagatcaagtcccaagtaataatgggaaccagaattgaaacaaatgaagaaaaagagactaatgaatgaatgaatgaccttggagtaaccaaaatcacagattttcaaaagcggggctggactaccatcaagcagtgtattctcaagcttcaaatctctatgacatatttgctacataaacatataaaaagattatagaaaaatgaagcaaagacctctcctttcacataatcacattcatggagatttagtttagttatgttaataaaataccagtgaatgacagtaatccacgccacaaatcagctgctgaaagaagtatctagcctgaaaaaaatagcaagatggagaaacatcaatcaagaatttgtagaaaaatcgaataagagaaccaagtaaggattttgagaaaggagcatatatatcacacacctcagcttcactgaatctaccagcattacagattctttcaaagagctctcctccagaagcatactccattacaattgcaagatgagttggagtcagaatcacctacaaaagtttctctgtttttaagttccttaatctcaattaaagtactaacagattatgcaacaaatcaacaaacctccttgaatctgatgatattaggatgcctaagtgatctatgattgataatctctcttgccacattctcatcaatctgcaatccaacatattaccatcaaatcacaatcctcaattatcccaaaagttgaagactttcatctaatttctaaccaatcaaagaaagatcaaaactttttctgagaaaccaaagaggaaaaagatcaaaccttgcgacctctctcaatgtatttcatagcaacgagctctttggtctctttgtgtctaagaagacgagccacaccaaaatttccagctcccaaatccttcacaacctcatacttgtccatcacttcttcctcccaagctttgcaagtgtgcgtgtgtgtatataagtacgatcacgatctctcgttgagaatgtgtcacacttggagttgagttcgtttcagaaaatgagtcatcttataaagcgttgttttcatggagggatctgagattgctcccacacttgagcgtatacttacactcatgcgtatgtgtcggtgtatgtatcggtgtatatatcgatgatggaggagtaaacggaggagatgggtatggaagttaagcacgtgaagaggttgctcgagttccgatgaccaccttcacttcaatccaacggttattaattattctctttaattggatactaagtactaattaattattctcactcgttagattatgccaataattatttactaaggttcaaaataaataagttggttagtaatatgattaatttttttgccaccattcatattagtctaaatgattaagacatgtaataatgtaatgatttgtacttaattataccttcattgtgttataactgagaaacaattacactatgaagaggtttgactaattttcaaggtttccttcattttgatgtgtataactattacgttacgtaaaccatagatttctattcttatgcacatcagtagatccgaatttagtatgttcagtactaaatttgagtccatctaatgtaaccgcaagatgtggcatggtggaggtcggtttaaaagagacaaacttcattgattactttcgattagtataataaattactgcaatatgcatgtgtgtatcaaccgaccataacgaactaagtacgttactaattacactaagtttgtatttttatatcaataagttttacatttggagcaagtcaagccggccatcacatgataatacttcttgaatcacaaatcataaccattcttcatgttgcaataaatatgcatggctcaattgtcaaaccgtatatcataataataatgtgtcatataaatttaaggtttttgatgaagattttatgtatgaatgacccataaagatacatctcatgtgaacttgttttccgttactatgggccaaatctattgtcaaaccacgtggggttgctacatactttctcatacataagttcaagagaatggtcaataattacttgtggataatattgttttctttcctcttaaattatatatcatgagtattttttttttcttaagactttgaaaactagatgctagaatattcaattttctatgatttcttttgaatatcttacaattattgtagattaagtcgtcttgatccgattattacaactacaaattcaactgtctatttaaaaaatggtcagatctattttttgtagttggtacactcatcatttatctaaagagagtatattgcaaactgtaatcaataatggtttgtaacgcatcaagtagaaattagttattgcaacaattgtatttttgtgtttgtaattttagggccaaatttgagtttcttagtttttacattcctcatttaatgggcctttgtaacgtttcatctatagttggtttaaggcccatatatttgtctggcctgatgtagtacaataattaacggcacaataattaagtagtcacatgactaccaaaattagtgtggtgagtgggtaaactgtgaagtttcagttcccattgtcccgtagtgagaaagcaccagtccgcacatgactagccctcactttaaccattcccccataagaaattactttttgagaatgattcggatctagttcatggcctattagtaactttcaaaaaaaaaaaaaaaaaatcttgctttagcttatgttattaacttattattggccgaccattgtccctcgttaatttaatattcgactgcactttttttgttttattgtgtgtggtgcaattcatcgtttatactttatccacacatccttgaccatagcatctaactaataaaatacgatggagactagctcttaccatagcatctttttttttttaatactaataaattgtttaaaactcgatgtttagttgagtacactatgtggccccaaaaagaaaccctaacgaaacctacacttgaatctatatatatggagtcatggagaagtagctcttgctccacttacgtttttagcatttaacaagcaatcaatatcattaggattatatatggagaacaagtttttcgctgcattcttcttgcttcttgtcctcttctcatctcgtaagtcttttccttctatatatatgcattggtccatgaccatatttgattgacaataaatatatatatatatgatatatatgtgaagtcagtgttacgtgatctatctccattcttatgtgttgcattttatttgtgtaattaaatagaggagatcattgggggtgaaggaaggacatgccaatcaaagagccaccacttcaaatacatgtgtacgtccaaccacaactgtgccatagtttgccgtaacgagggattttccggtggtcgctgccatggcttccatcgccgttgctactgcacccgcctttgctaactagtttattttccattaatccatttaaatgtactttttctttctttttattttgaatactaataaagttcatcttcttctttttctcgtttgacatctattgttgggtaaatctcgattctagaggaacgaactgagatatatgtattaataaaaatctcacgctgattctgaaacaagcaatgtactagaacgttgtgtcatgtgtgtttattgattaactagagttaaatttgatttaataaaaatgtcatttgatctatgttttgaatcagcactccaataaagattatcaatatcataaagaagtttctcttaattatgagaatatttataacaatatacatttttagttatcattttaacccaaagtccacattttcttttagtcagttattatccaaaaaatcgtttatacttcccggccaaaggtttccttaaagggattttcaacaatcattttccaaaaacatttgaagaagcatatatatacacatttctatggaaaaaagcgttcaagaaatcacatacaacatctaacatttatgcaaactattttttcatataaaatctgataatttttatacacaatattctgtttatttttacacaatgttctgaaatttgccgattttgattgagtttcaaatgaccaaagttaacatttgaccaatttcaagtatggatttatggaaatgtcataactagagcaagagagacataaaagagaaatagtactaagaaaaatggaaaaagtacatcatcaacataagagcaaatgtctcaatgcattattctatatatttttttttatctatcggttctgttataatagtcaagagaagtaaaaataataggagtatgaagaatgcaacaacccacactaagatgtttataacatcatatgtacacgatgaatgccaaatgaactaatttgcggtctaagtcatcatcatctgttaccattgaatcacttcaactttgtgtcaagtccccaaatccggattgttccatcatcacttgctgaggccaccatatagaggttagtcgggtttcaactgacacacttcaccgatcctgagtatcctcgcaatacactacaagattacgtcagtgttcttcgtatgacccatatgtatacctgacacatcaaagaaatattactcggaagactctaaaagagattgataagaactgttttcccccatatctatgtcttttttacgttgtagattaattattcttgatttgggtatcataaatttaaattaaacaatctagttaaaaatgatgagatctatttggagtgaaattaaacaattttaataaaaatgtatgtgttatatgtatatatacatatatagattaagtggagtgaaaattaacttaataaaaatatcattgatatatgttttgaattagcactctaaaggttatcaatatcataaatgagcttctcttacgagaatatatatatgtaagaatatacatttttagttaattcaaaatttcattcgattatttgtttgaacccaaggtgcacatatgttcccgtaagccgatagtcataacatttgaagcattaacacatttctatgggggaaaaacgttcaatcaaccacataattgtaaacaactaacatttatacaaacgatcgtctgaaaaaaattgattcatataaaatctgataactttagtttatagtatacacactgttttgaaatttgcggatttagattgattcaagttcaaaaaatttgaaaatgtccaaagtcaacatttgaccaagaagtcgagtgttgtttttaatattgatggctaatatgattttaaagcccatacataaaagcccaaatacggcccaataaaggaaaagactcctctgggaagaagaactaaaaaagaaactgggattttggaagaagtggtcgagagaaaacaaacgataatgggaagcgcaccagctcagattccgactagcttcggccatgagcttagggcttgtcttcgttgccgactcgtcaagacctatgaccaggtttttctttactcttctttcactgtttcttccttcttttagggttttggtgtttgatttgcctttctataagctgggtttttttttttttttggttcaaacagtttagagacgctggttgcgagaattgtcctttcttcaagatggaagaggatcatgagcgtatcgtggaggtcactacccctaatttcaatgggtatgtatttcatcaattctaaacctttactttaggcttctttggtaggaaagtctttgcgttgatgggtactgtttcaaattacttcttttagggtttcataagatttacttagctgtatagtaatggaaagttctcaactttagagtgattttgcgtcaggatgcttcgtggtttctaagatctctttgaacttggattctttgttggattagtgatttagcttttaagagtaatttttagaaagttcagtgttagagcttattagtgggtttgtgttctttttgttagttgatatcttgatattcctagctactgatatcaagattgttttgcagtataatctctgtgatggatccaagtagaagctgggcggctaggtggttaagaatcggtatgttgatcgcttcccttaactatcgacttgcttattccatcaatgtgttcttattatcccatcattatactctatttactaaggagattactgttacatttattaacacatctctgtattaaagaacgaccatgagatctccaatgaaagattacattacaagatttgtgtgattctctgtttctagaggcctaaaatctgatataaattggaatgtggctttagatctgaagattttcaagatactttgcctccttgtttggtttattgattgcataatgttgctaaatttgtgcagggaagtttgctcctggttgctacacacttgctgtctcagagccactccctgaggaaatgcaggtaaacgattagcaggacaatattttatcttcgtggtttgaaattgtactcagtaacacattagccttcttcttcaaaattagatcatattttgttcacttgtctgattttgtgtgtttcattcggtggtgatttaatgtagcacttatgccaagaggagcgtgtacaatatgttctgccgaaacgcatgtgaagaaatctatcacgatgaaggctagtagggaagaccaagtattccactttttcattaaaagcttcttgaaacattattaggtgctttatttgaatcttcaatcttgtggaatggtcgatgttaatgaagtcagagactccttaacactcttctatgtaaggcgttagtccgaaaagaaaaaaaaaagaaaaaaaaaatctgtgtctgaacaaaaaagtcttctcttatctaaggtttagactttagttaaccaatcggaccctaactaaaaatattaatgagagtaggaagaataaatttgtgtggactctaaagatcaagacaagacaattataattcttcataaagtcatgcaattaataataataataaaaaaataataattttcttgattaattgctcaaagtgaaagtcaatctaaaatttgttcggtttttcaattctacaatttttatttgaaaatatataaaataaaaaaaaatggttaataaagaattgcttagagtttcctctttttctagaacaaacaaaaatgcttagaccttctcgaaagaatagcacatcacgttatatccaaaagcatattcttttgttagattaatcgtagtcatatggtcataagtcatacataacatgtaacatgttagttcgatcattattaactttcaattaagtattttcgtaagacgtaattttcaacaataaacaacaaatccgcgatatacggtttttgaaagggcaggcaattgtttttttaaattattaatactataaaacaattttcttattggctataaactaatatttaattccacgtggaagttactgttcgtcgatataaaactttcttcgttaccattttgagtctccggcggctttcacactccagaaaaaaaacacagaagctacgtttttcaggtaatatgaaattctctccgatcacctcttcttcgtctggcagtatctctgtctcaaattttgttagatccattcgaaaatccgtttatcgaatcactcttagtctcttaccattcgtcgaatctaaaaatcccgtctttttcgctagtttggtggactgataagctgtgatttgtatgaagaatcgatataaagtctctgcttttttgtgtgggttttgtcgcttctttggtaaaatggatctctctgtgagaaagtgacgatcatgatcttaggtttttgattcttatatcgattgttcatttgcaggactttgattaggtttttggagatttacaaaaatgtcgaacatagacatagaaggaatattgaaggagctacctaatgatgggaggactcctaagactaagatcgtttgtacattaggtcctgcgtctaggtctgtgacaatgattgagaagcttcttaaagcaggcatgaatgtagctcgattcaatttctctcacggaagccatgagtaccatcaggagactcttgacaatctccgcaccgctatgcagaataccggcattctcgctgctgttatgcttgatacaaaggtttatctttctcttcttttgttaaggcttttattcttgaactgttttttcacaagtgtgtaaacattaattgggtgttgatctagattgtgtttcgttatgattttgctcaagactgtttacactctttgtagttgagttgtgaaatgttcaagtttgattttagctccatgcgaaagaacacgacttagaacatcgttgatcttaagagtgtcgttgttttacattaggcatttagtgttttcatattgtttatggatccctaggtctcagaaacatgtgtttattgatgacgttggctcaaactagcaactgatagatcttatgtgttacttagagaaacattatagttggagtctatgtctatgttagaaccatttcagtaaataatatgagtgttacatcacaggggcctgagattcgtaccggtttcttgaaagatgggaaccctatacaactaaaggaaggccaagagatcacaattaccactgattatgacatcaagggcgatgagaaaacgatttccatgagctacaaaaagctcccagtggatgtgaagcccggaaataccatactatgtgcagatggaagcataagtcttgctgtcgtgtcatgtgatccaaacgctgggactgttatatgtcgatgtgaaaatacagccatgctaggtgaaagaaaaaatgtgaatctcccaggtgttgttgttgatctccccacattgactgacaaggatgtagaagatattcttaaatggggtgttccaaacaacatcgatatgattgctctttcatttgttcgcaaaggttcagatcttgttaatgtccggaaagtccttggatcacattccaagagtataatgttgatgtcgaaggtacaaagttacaccttatttcacttgtggctaaagttggttttaaaggtaggattgtgattagaatttttatcttattaaggttgagaaccaagaaggagtcctgaatttcgatgagattttgcgtgaaactgatgcattcatggttgctcgtggtgatcttgggatggagattccgatagagaagatcttcttggctcagaagatgatgatctacaagtgtaaccttgcaggtaaaccggtggtcacagccactcaaatgctcgagtcgatgatcaaatcaccacggccaacacgagcagaagccacagatgtagcaaacgcagttctcgatggcactgactgtgtgatgcttagcggagaaagtgctgcaggagcttaccctgaaatagcagtgaaaacaatggctaaaatctgcatcgaggcggaatcatcgcttgactacaacacaatcttcaaggagatgattagagcaactccacttccaatgagcactcttgagagtcttgcatcatcagctgtacgaacggcaaacaaagccaaagccaaactcatcatcgtgttgaccagaggaggtacaacagctaaactggtggccaagtatagaccggctgttccaattctatcggtggttgttccggtcttcaccagcgatacgtttaactggagttgcagcgatgagtcaccggcgaggcatagtttgatatatagaggtctgataccggttttgggtgaaggatctgcaaaagcaactgatagtgaatccacagaggagattattgaatctgctttgaagtcagcgacagagaaaggactgtgtaaccatggtgatgctgtggtggctctgcaccgtattggagctgcttcggttatcaagatctgtgtggtgaagtgatttttctactaaatatcttgaattttattcttggttaatgtttcttgatgaaataatccaataaagaaccagggaataggttcctgaaagtgttttgtgtggggcatttcttctctttcttttgctgttttagcttataagattatgaatgcactaatgactcttgctcatattattatagtttaattagccaataataacaatttttaaggctcgttttctcatcgtttttgcttagcaacttcaacatttaggtaaaaattgtatgtaatttttcgatacaatcaaatgcaacaaaaactttatcagttgatcaaatccaaaaatcttaaatcaaggcaaaggagggaagatacgggaataagctgaaacgacgccgctctgaatatagcgtttgggattctcaggatcaggaatccattggatctcactaatgtttggcgtttcgacaaacgcaaccgtgaactctcccatcttctccatcttcccacgcttcccagctctgagaataagtccactgttacgcacgtatgagaaaatcccattggtgagcttcacgatatctcctgcctcgaacgcgtcgcactcatctccccacagctgtatgtgaaccgcagccgtttcatccgccgccaacgcaatacaataattcttcccgtttgccgcagacgatttggctttgtcgaggatgatgaaacgcgtgtctatgttgttctgcgccgctggaactatatccttgagaaacaattgcatcgttttggcaaatcgccccctgaaattgaaatatgaaggattcaaaaacagtgaattaaatcaaaggaacagagctttgtggataatcagacgaaacataagcttttaaaggaatagcatagcatcaccccacttgaaacttgtagcacaagcaaagaaataacaaaaaaagtttgactgaaaacctaaccatattttaaaagttcacttagacattttatcgaacagttgatctgcacaatttttttaataaaaaacccagtaacttaccgactatagcaaaacgccgatacttgaggaggatacaacggtgacggagaaaacgccggttcgagtaaagaagacgtgagaagaaaatcacgtcgggaacttggagaccaagtcaatgtgatttttttctaaacagagaaggaaataaataaaggaaaaggagggttttcaaaagttatggcattaggcatatatacatacatgaacataaaacataccatgtcactttgatgctactacatacatgaccatcttacaaaaagagttagcttcctgtttccgcaaaagcttagaaatatttagccgagtttcttaagttgtaatattccagcccaaaaaacaacaacatcaaccttcttccttttgaagatgctctttggttaatcgatatttataaccgcctcatgtgacaaaccgccgacacatggttcttgtttaatctcgatgaagtcttcaatgatccttggaatttcttttagtaacctctcctgctctgaaggtttctccagaagttctctctgctctagatactcctctaatgtaaacaaatggatagagttaaggtgtttcaaatgtaaccatgtcaaatcaccatgtgaaaatgtgtgtgctttttgttgaatcttaaaggatattctcttctccatcctttctcattagcacagttgatgcgcttctgcagaatgttaagctgccttgcaatccactggtttttttcaagatatttacacaagaacaaagtgtgagatgcagttacaaaacaaactgtcgtatttagcttatgtgttttcagagatactcacatgttttgttatatcataatggagagccttagccttctgctccatctccacctgtcagatttaaaaaaccattggtgagtttaagcgcctgaaagaacggaacatgatttgagtatgagaatgcaaatgccaaatgatttaactacctctctgtcttaccagaggattcgtcatgttaatgaataaacagagaaccaaatcttgtgatatacacaacttacaacagttgtctgtctcagaagaccattcatcactttttgcttcaaatctttaatctcttcctgaaaatgaatgtgtacaagaggaggttttagcttctacgaagtttttgaccagccaaatataagatcatgaataagaacaagtcacataggaggaatattataaatatactttatcagcatttgcagcagatttgtcatatttttatcccaaaatcaaggaaatataatggtaaaatatgaattcaattcagacatgattcacctctcttatgtcagaatcatccagcttggaaatgctaacaccacttgccataccagaaacatgaagaagcacgccctcactctgatcatcagcatttttaatgcctaacagaaaaggaaaaatatcaggtgtgacagtgattctgatgcagtgatcatgacatggatcagagaaattcaggtcatgacatgcaagtcttggttacctgtaacctgcaagatctggtacgccataaagtccctagggccattcttcactttcacaaagcttcccaccactttgtccacaaagctatcattctgcttcaacaactctaagactaagctcttacgtagataaacaagctttagattatctgcattgatcgtggcgaaaccagttgctcgcatttcaggttgcacttccttctcacaaatttcgtcatctgaactttctgttttttgcttcttgcacggcatcataaccttatcattcttttcactgaatcgcttttcatttttttcaatgaagccaagttccaaaggtgtgaaatactccacctgatcaaggttttctttcaggtgagtattcaaaagtgtataaatccttttctgatttatagactttttcctgaagatagagtacagcttctcatcacaatgaactttcttcttcttttcacggtcaagcaggtttttctcacgaatgtacctgcggataactgactcaacactatgttgtgacattgcctctctggtgtcttcccctatggacgttaggaaatcaatgagaggctttgaaccccatctgataaactccattctcttgtttttgccaacctttttataatcaactgcatcttcaaccgcatggtcagatactaaaaatttgggatcatctttgttcttcagcttgacgcctttctttcctgactttgaagtgtgggcatcaccaagcgcaaatttgggatcatctttgttcttcagcttgtcgcctttcttttgtgactttgaagtgtggacatcaccaagcgaaaatttgggatcatctttgtactttgacttgacacctttcttttgtggctttgaagcgcagaccttgcggacatcgtcaaaagttagaccttcttgttttttcgcaatttcccaatactcaagaaacagacactcaaatgtattccgatctgtcaagtcaagcttatcctgccaaaccagtaaaggagtgttaagcaaacaaaagttttaagacaagcttgggagatagacatatacaataagacataccaaatgtgtagttgattcatccttttcctaagcctaaccaaattatctaattgaaacttttagagttgtttcactcagattcatccaatttcatactcacttttgtttcaaatggacataaatctctttaatacagagtttacaaatcctaaacaccttagttatttgcaatggatggaaaccaaaatttcaaggttagagactactactatccaaagttgagtaataacagtttgaaacataccccagcagcatcatattcttgaatttcttctaaagcaaagacatactcctggcattgattgcataaccctttatcccctttaagttgaataaactcagcatgagtgacacagccttcacatacagcatgtgagcaacaaaggcagcatagctttggtgttttcttacacaagtagcaactgtgccacactgaaagttgaaaaattcacaattagcccttctgactacaaatatgaacctttatctacactctacagatacaggggtatatcttacaattcaaaggaaccaaactacttcaaaatgataataacattgcaatgaacatacaaatatatatagagaaactttagcacttactacagatatacgagtctccattcttgcttgctgagctatccttttcaacgcaactttcatgataaacttttggacagtctctgaaacaagcaagcacaatgaggtgcacagttagatgcatacatttaaactagactaaatatcacaagtgtactgacaaactgacaatactttaatattcatcttgacaatcttttcataatgaaattgttaattttcatgcaaatcatacattaacaatctgctgcaatttaatagaaggaaaaagtcaatgttgctacattacctaagctcctaattaatgaactaaagaaaaaagaaacatctttatacctttaactacagaataatacacaatgtctctcctcaagcgcattcatatgaaagaatcatcaaaaaaaaccaaagcagtaacattttttatagcttcatcattcagaggaaatgacttcttttggcataaatcactgcctccaaacgaaatcccctaatcgtcaatttgaataaacaaaagtaacttgattgaaaaagaagtactttcctagtgaagaacacaaagtttcctgtttccacttagacaaacaaatctataaaaaagaaccaataagacaacatacatgttcactcggtacaatcctacattgaaattgacaaatcctcgttataatataagcaaaacccaacaaagactaaaacacccttcatcattagaaatcaagaacatgcaaagaacaagcaaacaaaaaaaactaatcctctaccgaagcagcagcagcattatgcttaactaagtgagagagactcacttgaagtcacagagcattaggtttccaccatctttacagataaagcaccaatcctcacactccttctcatcctcctcctcatcatccaaaatctccactacattcatatctctcgccatcgctctctctctctcgatccgatgttacttggcggtgacctagttagtggcgacagagcaagaagaagaaaaacttatctctctaattctgatattaaggctgaaaattagccaaataaatagctgtttgagtgacctgtgtcagtattactagattcttaaggattcgctttgaccaatcacccaaacgccaacctctactttcctaaagtctctattatacccctatcgtatccaggacacgtgtccattaaacacagtttcataggggttatttcgtaaattgaataagtcttgcgttcagatggaccttttttttttacttagcgattgcgttttgtgaccgggaagtacaatgctcgcaagtacaaaagatatcgaaccaagttttgtctttacctaaattttggattataagtgatatttgttgttaaaattaatttactaattataacatttttatgaacaaatcatttacaagttataagattttaataagtaagaaaagtaatctggcatttggtttcacaatgttcaaatttatctttctttcttttttttttgctctgaaggcttttttctcacttacctaagttcattttttcctgataaaaatagaaaataaatttgagtttgttttatttgtgaatgttgatgaaatttaacttttgaaatatacgttctagattgagatatgatcatcagatctttttgcagatcgaacaaaagtctcaataaggtgaagaatcgtatgacaacatataaagggaggagcataagaacatgtccaactaatcaagcatattagtattgatatcattattccgtatatattcttagtctcttcttcctcacattatgttctctttctcttttcttcacctaattttcctattaaaaatatctatctttttttctcttctgcctacatttctacatgatgtttcaacatagctcttaagggaaataacctaaagttttctaaacattgatgttttactacgtcttttttgaaaggcggtaactaaatttgtttttttttttgttttttaaaaggatatcaaaagatcaattacttaccttataaatgttaaaaatgtaaacttctcaatgtttgaatttatttactcaaaaacagatagttaaatatatatatatatatatatagttataggttatgttaaaactattttagtttgtatcatatcctttgatttgaaggtcagagaagaaaggaatatatacaaaaacgcccttttgcattgtcatcgtccagaatagtggagtaatataacacgaacaagtggaagtgtggaaccttcttacacatgcttctgtctcttcctaaagcataagccattttcccaaacattattaagttcttaattaagtcattggtttgttttctattactaattcgtttaaatcattctttattactttatgtttattttgggccatctatatccttttttgttaaaattgatatcctttttagccccaatcacatcccaagttacacacttgcaaaagagatctcacccaaaataaagaagcaaaagaagatggaaaaatacacctccattaagaaatcaaagatgtttcaacttagtgggattctctttctctcaaagcagcatttcttcatcttctttttacatcatagagataaaaatatgaaaaataccttttgtgggtcctttataagcactaacttctctttctttagatgattttacattattgttgcttttattggcttcattattatacaaatcctccatttctctcttcaaccccatgttttcgttctcttccgtttagagtgttttcagctcctctatggctcactcgggtatttaaaagctttgttttacttatactttaatgcctatctttctccattgtatattaattaggtttcttggtttttgttgtttattttacataactttattgtttcttttagtttcgagttacaaaatatttggtacatatttaggtgaaacggagaggtttttgatcatcaaagcaaagagtcaaagacagaattataaattttgttgttcttgatacttataagctttcatttttcttaatgttttcggttcaaatgagctctgatagaggagttatggattgatctgacaatgtttcacatcagaaagcaatcaaagctgttagtttttaagacataattagacccacaaatcggtcttttcttttctttgctttcttatgtttagttaacatagtttgatcacacaagttatgtgtttcttgtatagtaagttaactttctccatcgatttgctgcaatttagactatagattctgcagcagaaaagaaaagctgtttaaactgagattgactgatttaataaactgcagggaacggtgaaagtttccatgatcctcttcgaggattcattcaaagaaattgctttagatggaacaatcagaaattgatcttacaatgtttcatggccttagcttttgtgggaatcacttcgtcaacaactcaaccagatatcgaaggtctatatataattagcctttgtttataaatcattaatgatcttgtagtattaactcgcttcttgattcatttgctaggaggagctctgttgcagctcagagattcgcttaatgattcgagcaatcgtctaaaatggacacgcgattttgtgagcccttgctatagttggtcttatgttacctgcagaggccagagtgttgtggctctgtaagtactcttaaagatcacttctcaagttttagttaccaagatttctcatcatgttgaaaaacttgttttgtatcaatctgtagaaatcttgcctcgagtggattcacaggaacactctctccagctattacaaaactgaagttcttggttaccttgtaagagatcataaaccaattccattacaagtttctttttaggttccattactcatagtaattgttcttgatgcagagagttacagaacaatagtttatctggtgccttaccagattctcttgggaacatggttaatctacagactttaaacctatcagtgaatagtttcagcggatcgataccagcgagctggagtcagctctcgaatctaaagcacttgtaagtccactcaaaaactctttaggaacaatctttgaaatgtgactctgtgagagcgtttggctaagataaaacattgaaatttaattcacagggatctctcatccaataatttaacaggaagcatcccaacacaattcttctcaatcccaacattcgagtaaaaaaaactattttcctcatgaatctacctaattagtcacagtgacttgtcagtactataatcacgtttttgtgatttttctgcagtttttcaggaactcagcttatatgcggtaaaagtttgaatcagccttgttcttcaagttctcgtcttccaggttcttaattatttcttctttctccaattcacatacaaacagaaagacttaacttagtatctttatgttcagtcacatcctccaagaaaaagctgagagacattactttgactgcaagttgtgttgcttctataatcttattccttggagcaatggttatgtatcatcaccatcgcgtccgcagaaccaaatacgacatcttttttgatgtagctggtaagaagttacatatacttatagtcaaacatctcattagatcaatatgaactcttgagccaatatcctttttccttaaaaaatgcaggggaagatgacaggaagatttcctttggacaactaaaacgattctctttacgtgaaatccagctcgcaacagatagtttcaacgagagcaatttgataggacaaggaggatttggtaaagtatacagaggtttgcttccagacaaaacaaaagttgcagtgaaacgccttgcggattacttcagtcctggaggagaagctgctttccaaagagagattcagctcataagcgttgcggttcataaaaatctcttacgccttattggcttctgcacaacttcctctgagagaatccttgtttatccatacatggaaaatcttagtgttgcatatcgactaagaggtatatatacttagcttctctatcacttaaccaaataatagattctataatgtgtgtgtacatatgtgacattgtagatttgaaagcgggagaggaaggattagactggccaacaaggaagcgtgtagcttttggttcagctcacggtttagagtatctacacgaacattgtaacccgaagatcatacaccgcgatctcaaggctgcaaacatacttttagacaacaattttgagccagttcttggagatttcggtttagctaagcttgtggacacatctctgactcatgtcacaactcaagtccgaggcacaatgggtcacattgcgccagagtatctctgcacaggaaaatcatctgaaaaaaccgatgtttttggttacggtataacgcttcttgagcttgttactggtcagcgcgcaatcgatttttcacgcttggaagaagaggaaaatattctcttgcttgatcatgtaagattgacttcttttacatgctttcttctatctgaaaagacttgaaactaatcttaagttgttggatgtgtatgaaacagataaagaagttgcttagagaacagagacttagagacattgttgatagcaatttgactacatatgactccaaagaagttgaaacaatcgttcaagtggctcttctctgcacacaaggctcaccagaagatagaccagcgatgtctgaagtggtcaaaatgcttcaagggactggtggtttggctgagaaatggactgaatgggaacaacttgaagaagttaggaacaaagaagcattgttgcttccgactttaccggctacttgggatgaagaagaaaccaccgttgatcaagaatctatccgattatcgacagcaagatgaagaagaaacagagagagaaagatatctatgaaaacaaacttgcattacagaagataaacttagaaagtattttaagctgctaattgtattgaaccaggtggggaaaacgaagcaaacacacaacgttgatttgtgtaatagatgatatgatatacataactagttgtgttttgtatatatatgaatttggttattttcgtatgataatgatgatcatggttgttatggtggcagtgtttgctctgtttttctacatacgtcgtcgtttcgtgtgtgtcccgtaaaaattataaacttctgaatccagtccttgaagtttagttggtttttcaattttaccttcaacttttgtattctaacaatttaccccacttgtgacattgtttatggctaattttacgtcgagtattcttgtttttttctgcacgtcgagtattcttgtttctagattgtaaatgatgtactatcaagaaaactaattgtccagtctatgtatctcatgaaattattagactagtgatttattggaagggatgatacagtgacagaacaaaacaaatctagatgtttttgttgtagtgacatggattcagagtgtagattcataagaacagaactttcatggattaagatttattcttaaactctagatcctctggtattaaaatacagattgttaattttggtgttgtgtactttgggtgcgttaaatgaaggatgaggcaaggaatgggaccggagacagacgtaagcggtcagtgaaaaagagaactcctttctaacttcctcgtaaaccgggctgtttttctcggttcttggtgcttggtttccgctgacaccgacatgtccggttcccaggtaactttcttctccaccgtccgattcaactatgaatgaacgtccagatcttcgttttccttttctatctctttggtttgttatgacgtgttcttcggtatttctcctgagcctctcagacgtaccctaaataacaaacaacgggtccccaaaaaaaaaattttatatgcaaaattttattaaatacgcaatcaatagggagacaatgttacaagctatatgtatgcatatttactccctacaaaaaaaaatatgtatgcatattttacatgttgaaaaaaaaagagttatcatgtgaaaaagtgggatgatattcaaaatatagtagatatatcaaccatgattcatattagtatagatagattttgttactagtataaaacctataacattgaaaaaaaacatttctaaccagtattagtattagtatatacatgacttggtaaaaaaaagaaatgtaaatcatactactttaatttataactaaaaaaaagacaaaatttagtaagtcgttgaggtggagccaaaagcaataataaggtaataataaatcgagaggaaggtacttgtcttgcattcaataccattagacatattatatgcacatttaccattatgtataatattttatttattttaaattgtgaattagacacttatattcagaaaggaaaaatgatcctataactacagcatgtaacttttgcagtagaaatcaataatattcggtctagaaactacaacaaaattgttcaaactatgaattttcattacttcgtatatggtactaaagacaaacactcaatccttgatgtatatattacaacatgtgtcttttggagactttttccttctgataaaagcttttggagacttgacagagattttaaataagaggaagattgctgttggcctcggaaatgactgaaattaaatatacacaagaaacaattaaagacaattgtagatattttcttaaaaaggagattgaatctagtcatggaaatggtttgaactttgaatgtactaactcgaagtatgtcggattttaccactctcgagtctcgactacactgtaaagttctattttaggtaaccctacacacaccatataaagacaataaccaaaattaaccaaaacctattaaaccaaagttactaaatcgatgtaaaaaaatgcagaagaaaaatctagggcttagatcttttgtcctctctataaatagaagagactacttgggtctctttgccctgtcacatgcttccttcttcttcttcttttttacttacataaagttgcttacattcttgtcctcttcatcttattcttcttatagtgaagcgatttagggtttagaggaatgttgtttggctcgaggtcatggagagtaattcgttaacccaactcaaaactctaaatgattctcggaccaggcttcattcccctcaacctattttatcgcatttttcagaaaatcttttcacattttatatcacttctcagttctcaccccattcaaaacctatatatgtttcagaagctttttggcccatctagagtataaccatgttacagtgtttttttttttttttgctaaaaccatgttacagtgttaattcttatatataaccattgacaaactctttgaatagctagaattatgttccctagaatataaactatttatttcttctatctttcactgtttccccttttgatttactttgaaacgtttctaatctttatttgcacgcagtagctgttctttttactaaaaaaaaaaacacgaacaaaagaaatctggattggatctatgcatgcaaatcttgttttttatacactttcagaggcattttatttactgattctttagcgctaatattattaactttggaaacacaatctgttaaggcatcttggaggatatataaataagatcgagggagtaaatcttgtaatttgtgaattgttccatttttcacatctttgagttcagtgtatgattttttgcaacctttaaatcagtatataaaccataaccattgacatatgatcatttcatttgtcttccattttaactgaggtgaaaaaggaagagaaaaataagggttaaaccaaagaacaaaagaaatctttgcacgtgaatatgatgatatggaatggatggcttctcctcaatattaaaagtctcgtcaagttgaaatgctatttacacatctacacgtaattgaaaaggaccttttattgaggttttacatattgtaaattcacagattgtgattgattgttattttcatgaaagaagcgagattggacgtgatttgcgagtgtatatatatgaactacgctaccaagtatacagtgttgactattgctttatttgggtgtgttaaatagtttaggtagacttgaggagtaacttagaatttcaaaaagttggtaagcttttttatacgagcaaagtcagtttaatttgtatttttataaaaaaaagtctatcatcaagttcttttgtccatgaagactcgtaagtaaacgatgaatcagtcaggaaaaaaaaaaaaaaaatcttatctgaaaatggaatatcggaatttacaaaaacaacctcagattttatttttattttgtcaacaaacctcgaattatttaaatggaacataatcaaccaatgtgatttacaactatttcgtaaacggtgtcgttttggtgtttgacgaagacgaaccaacgttgcttttcagacacgaaagcaattcggttaatttgtttccactccattactcgcatctctctgcttcttcttcatattcttctttactctgtctgaaaatctccttctccttcttcttctttcttcttcttcttcgttcttttctgaattattttcaatggagcccaataacgtagagcgtaatcttcaatctctgagaagattatacagtcttctcgtagcaaatgcaaggaacgaatatattcctgaggcatataaggtaagtttaatttctctgtaattttcatcttcaacctcagaatcatatttctatatcatcgagtaatctaacattaggaatcttctattcgcagttggacgacaacactcagtttttattaaagcgattgctcgattttgcttcccacgaacactttgttacacaatcaaacgtaagtaaccgtcaatattctatcgagtaaatactctgttttcacatgtttcatgtttctgaattttggttactataattttaaattttgttacagttacttgcaacacaattacgtgtgtttcctaaaacggttttacacggtgcaaagccgtcgaacgtggcggattcttctgagacgacgccacctgcaatgttgtctcagatcaatggttctcatattacgcgagttagtaaaccattggaggcgaaaggaacattgcagagagatctgagagttgatcagattcggagcaatcctagtaaggatgttttgacagaagaagtcgttgatgcaatagagcaaatcgatacacaactctccgctttaagtttcgtttctagtcgtgttgactctgatgaaagaacaaggtctgtcaagtcctttgtaactcctcccactgaagagtgtagacaaaacagtcaagcttctatgccttgtttaagaagcaattacatgacggtgagtcagaaaagtgtgattagtggtgcagaagtaactttcccttataatgatcagttagttcgggttacgtcaccaccgcagccattaccgcctcgtgctgtgagtggtttcaagaagccaaatcaaagtaatagagcgtcacaaaagatgccgattatgaaacctactttgatggatcaagaaaccgaaacgtttgatgatgattcttctgaaacagaagctgaccaaacaccgtctgcgacaggttctgagtcggaagacgaagaagtttcaactagtcaagaatactctggggaaacagggtcaagctctggctcggagtgggaaactcaagcagagaatgacaccgagtctaagtcagaatcatcatatccaccacagaatgatgactctgtctctgaagtcagcacttctcctccgcatacagacagggacacatcaagagaacctggaaaacagagaagaaatgtaatggggcggtttaaaaggataaagaataagataggacaaatatttcaccatcatcaccaccaccaccaccatcatcatcaccacgacaaggaaaagccatcagcttggaataagttgcagagtaaatttcaccataagcaccaagagaaatcaaaagagaggaaaagaccgatgtcagaatccaaaggtcttactacacataagcagcaacatcaaggtggccactttcatgcgctagtggaagggttggtgagacacagaaaacactcaaaaaaacaaaagcatcagctgaagagtgatgccaagaaaacagagtggtggaaattattgaagaagcgtcaaggtggtggcgtgaagattcccaaaagaggacgtgtgaagttgggaaaaaaaaaacattatttgtccaaaaatgtttaagaaacaagtctcgattattatattgcagagcaaaacaattgtaaaatatacaagttgaaagtttcatgcctccctcgtgtttttaagaaactttgttaagaaacaaatcacttatctctcccacaagagaggcactatcatcatagcacatctcacactcattatcctcccaagtgtttgcatacgtgcagcgatcacagtaccagaaaggaccagtcccgccgttgtatgacttcacctttacatcgaccaaaccatcttgtaaagttttcataaaatcataaaagtagttaccaatgttgcttgtcgcagtaggtatcgtatgtctgaagaaagtacactcttcataagtagctgcagcgaggacgatatctttttgctcttgtaaagtgtttgagtaactctggagcgtggcgattgcatttccttggaggtatcgtagatactccttcgagttctcatactctgtgtggaaatagtcatacacacaacaccatttaaggactcgtctgcattgaacaatcaacatcaacccttctcttataatcataatgtcttgctcccttaataagtcactcggtttcttgatgttggtttcctcgaaagcttctagatcggatttggcttgctccagtaacttctgacacacgttccagcgatcctcacataaaatccccacttctgttttaatacagaatccagagtctactgcttcaattttgtgggcttcctctgaccgcaaacacctcgaacagaaacgaagcctaaagcaagataacacaaaagagtaaggatcaagacttaaacagagaaatccaattctatgtaattgtcaaaattagggtgaaacctgcagacacaagtcaagaactggggcatttttgtatcagactccagagaacagaggcaatgagggcaagtcactgtcttggttttggtcggataaaggctaaatgattcatctgatattttcattgtggcactacacaaccaatcagaggccttgttacaactcactggtctgtgtgactcaagtctgcatctccaacagaagatatgaccacagatacacaccacgtttaaactatactcatcatcatcatcattctcttgatgaaactcaataacataatcgcaattccgtgcaggacactgtttgatcatcaataccttgtttccttcaatgtaagatctccaaatgtacctctcgtacatctcttgatcacgtactgttagtttctcaatcgtgtctggtccaaccgcagatcgacaatcttgatcaggacaagagattgtggtttggattttctccacatagtagaaattcttctcaagatactctctccaatattttgagtcgaacttgtgagaacaaaagggcatggagattaaatcattatcaccatcaaactcataaacatcagtctccaagctaatctcgctagatgaatctggactgggatcgatcatgactgatttcaaacctgaatccatcaataatttctccttgttttcacctaaacgctctgaaacacgaagcgagtcccatcggagatacataagaagtacggtcgcatcggagtttgatatgaagaagatgtcagagatttcattgatctgtttcttcatctttacggtaatttcatttctcgttagaacagagtagggtctccgtccatcgtactccattgttttcttgaaaatgacaaaacaaaaatcagaaagacaaatcgataaattagtaaagagctagagaagataaacttgtaaagaaatagggttaaggcttactagtagcttgcgccagaaacaacaagattgaatcgaaggtggagatagctaattatcgtctagggtttgccatttttcactctccaacgggggaattggggatatcgtcaagctacaaaattattatgttttcgctattacataatgtttgataaaaaagatttttgacagcataaagtttgataatgatatctttttaattaagaaattttacgttgttacataattaaataaaatatgaccaaaatcatttattatattgttattcatcactaaatatatattggagcaaaatttaaatttttatatacttaattatttactatttagtaatattaattaaatttatacgatatgtcaataatcaattatggtacttaagtggttgaaaacttatcatagttttagaagaccatatctagagactagagtcttccttctactatttggactaaattcaataattggcataaatataaatggcgcaaaataggtatagtcacaaaatgtgaaatttttatatatatttaaaaattatttagtaacattaaatttatacaaagtagaaaagaatcacaatttttatttgaaattttttggcacgaaatagatatatgggacgaaatagatttgtggcgcgaattttgtttttgttatatatagaatttaaatctatgacaaagtaaaaacaaaactataatgtatggttaaaaacttatcatggtaataagagaaaagattttcgagtcttaatcataaaaagattcaatcatttgactgtaaataatgtttttaatggcaagaacatgatgtttcatatatataagttttgaaagactattacactgatcagctcgacatcctcgataatttaaaaataaaataaaaaaatggaataaatgcatttcataaaagaagaaccaaattttccttttgagtaaattcaaatttggtcaaatataatggcctagttgtcatccggtgcagggagctgtttgctctcattctcaatgtaaactctcataacataactcaagtacatgtcttgatcatgtactcctagtttctcaatcgtttttagtctaaccgaagctccacaatcttgatcaggacatgagattacggttaagttttcctccagagagtagaaatttgtctctaggtactccctccaacaagttttgcagaacttgtgagtacaatagggtgtggagattaaacgatgactatcatattcatcatcgcactcttcatcattttcatcatcatcatcatcatcatcatcctcatcttcatcgtcatcctcgtcatcatcatcttcatcatcatcagcatcatcagcatcatcatcatcatcatcatcatcatcatcatcatcatcctcgtcctcgtcctcgtcctcgtcctcatccgcatccgcatcctcatcctcatcctcatcaccatcaccatcaccatcaccatcaccctcaccatcattgttatgatcatcataaaccttaatatattcatcttcagccgtacggcaaataccacaagttgaattagataaaactagattcgaatcaatgacaacggttctgatccttttctccatctcttccttatcctcatctctcaagtacgatccttgttgatcgttctccattgttttcttcaaattaacaaaatatcagattgattaatcgataaactaccaaaagagagaaatataaacttgtaaagaatagagttaaggcttttactagtagcttacgcctcaaacaacaaaattgagtcgaaggtgaagggagattttcccttctctattgggatatatcgagatacaaacttgttctgtttgtgctatatttatagtttgataatccagttttctaattaataaaattgtcccatttgatcttaatcttgctacaaaatggtgatttgtattaactatacaatatccaatctaggttgatttttcttttcttttgggggacaacctatatagaagtttatttaattcaccattatgtttcccaacagatggcacaaattaagttaggtaaaagacaatatttgtccaaaacaaattcaagaacatgaagaaaactaatcttaaaagagtgtaaagaaaataagaggacaaaagaattgtaatcaaagcctaaaaggctaaaacctttaatgtttcctaaatcttttgtttatcttcaagaaaacatagaggacatatttcactaagatttcaaaaagagtttttttttttaatgtcaaatcccttattatggaacttatgatttaataatcttctcaaatctagtcttactgaattttatactaaaatcattcaaaatatgatggtattggatcaataacttataaaagtaattaaatgataacccgagatgtgtgcgcgcgaaatagagagattagtagattaattcaaaatagcattagttaaagagtagaataatgttttttaaaaactttcaatttgatgtaaggagattatatcaatatatatgtaacatttacatgtactccctcttcgagatctcatataaaaatgtaacatttacatgtaatgactttttgttggtttaacttgaaatatgatcgtcttttgatttcttaaagataaattagttgatgttctgagctatgcacgggagaaactagttcttaagatttgtctttgcgaaactaaaagtgtatgttagtgtatgataaaacaaaaatatgaaaatttaaaatactcattttagtgctttataattttgccaaggttcatctaaataactaaatgtcgctgagttaactgaaatcatgcaactagccaaacatatttagtaaaatattttttttgtaatctacgctggttttgacatatcttacgtagaagcgaaataagagaacttgttaactcatctttttccatttagccaatgttagaaaaagaaatacaaaaaatatccatttatgtacatatatatatatatataggtgctatgtctcatctcttcatgatatatgattttctaagtgcaaagattgtctatattctatgagaaagtttcaacgagttatgtatgcaagggataatgccaaactagatgaagtaaaaaagatattatttgagacgaattccaaatcgcagtacctttgaattattagaatatctctgaatttatttaaaaaccccaccaaaacaattaaaattcttaatccattagagctcccttagttaattaagagacatatcacttagatccacacgagctgcaatatcatcactgcacatcaaacactctttatggaaccaagtgtttccatatgtgcagcgatcacagagccaaaaaagaccaccatagtcgtcgtaggacttcaccttcacgtcatccaaaccttcttgtaaagtcttgatgaaatgataaaagtagttcccaatgttgcttgtctcaatggttaccttatgcttgacgcaacaaaaattttcataagtagctgacgaggctcttcctatctcctcatttagcgtctttgagaaactctccaccagtgaggtcgcgtctgcttgcaggaatcgcaggtactccctcttcgacatctcatactctgcatgtaagtaatcatatacacagctccatttaaggacttgcctgcattggacaatcagcatcaatccttttcttataatggtaaagtctttctcggtcaagtcacttggattcttgatgttggactcctcaaaagcttgtagatcagatttagcttgcttcagtgaaacctcactcgccttccagagtcccacgcacgaattctccggttctgctcttccctcgagtgtcttgggtgctcttccctcgaatgtcatcgatacattacagaatttatagaatcctgattccgttttgtgggcttcctctggctgcatacacttccagcagaaacgaccgctagatcaagaaacacacaaattagtatgatcaataatgcttcaaatagagaaatctaatttgcaaaatagggtttcttacttgcaggcacaagtcaagaaccggaggtattgtttagtaccaagatccgcaggacgaagacaatgagggcaaactttcttggtggctttgatcgaggagagagggtaagtcttttctctggtttcgaacgaggagaggctcaatggcttttcacctgattccttcgataagctatttaggtctcgaaacaaccaatcagacgcgttgttgcaggtcactggtttgtgtgactcaagcatgcatctccagcagaagatatgaccacagagacacaccacgttgaagccatagtcttcctgatcagcaccatcatgattcttctgatgaaactcaatgacgtaattgcaatcctgtgcaggacagtatttgatctccaataccttgtttccctcaatgtaagatctcagaatatactccacgtacatctcttgatcacatacggttagcttctgaatcgtgtccggtccaaccgcggcttgacaagctccatgaggacaagagattcgagtttgggttttctccaccaagtagaaattcttttcaagatactttctccaacaagatttgcagaacatgtgagagcaaaagggcgtggagattaagtaatcaccatcatcacaagtcttaaagcaaatcccacaagaagaaatcttatataagtcttgattcggatcaactaccactggtttcaaacctgattccgacaagactttttcgttgttttcaaccaaaaactcagaaacttcatgagagtcccatcggagaaacatgaggagtacggtcgcatcgggttttgataacgagaagatctcagagatttcggcgatctgcttcttcatatttcctttaagttgatctctcgttagaacagagtatggtccctctcgattgttctccattgtgtgcctaagattgacaaaaatcagaaaaacaaatcaatgaatcataacaaagagatcgatcgatggatacacttataaggaatagggttaaggcttacaggtagcttgcgcctcaatcaacaaaaagaatcgaaggcgagagttatcgttcttagttttctcttaatcgtctctagatgatttctgtttcaactttttagggttttaccttttctcactcgcttatgggaaatatcgagttttataagtaaacaaaactattgaccaacaaaaaaaaaacaagtaaaaaactatctgtttttgctaaattgcctgataagtttttaattggaccattggaccttcatctaagctaaacaatcgtctaatcaataaatatggcccattagcacttcttgttttgtctttttgggcccaattcggtttatatagtaatcttctgaggtttcagtttttgagaacaaaactagtcgagtgagagatggaaaaagggacgacaacagaaccacatattttcttgtggagtcagaggactgagaacataagaatcataaacttatgcttaatgcataacacttacactttcttgaagtatatgaacttaagacatcccctacaatttcctacatatgtctccttcagtttctcttcagagaatccactgattatttcaataaactcttcatctctgtgttctttctgaactatcagaacaacttgatcttttggtggaatttttcatcaacaacttgatctgtctcagcatcactttctgtctcagttttacactcctcgaatcagttactaattttgttgtgtgtttgaggttttagaaagctaagtcttgagccttaaataaacaattgatttttgttgtgggctgagtctgtggaattgattgaggaacctaatccatgatatgaagaggtaaatgaaatccctgttaaaccagacgttttctactaactacatggttttgattgatcaagagtgtattaaaaaaggccaaggggctctaatttcgactatgataatttattttaccaagagcaagtaaataaaaagatagaaattattctgatgactaatgaacatttgaaaacacaatttataagtctaaagaacaaagttctttatcagttgacaagaaatttgggatcttcagatgtaaaagcagtgctcttcatcttctgttttagtccatcttcagggcttttagttcctgagagcaaaactacagtagtagagcgagggatgaaaaaagacaacaacaggaccacatattttcttatggagtctgagaacatcagagccaaacgttgcttgtcacaaagcattgtaactgtgaactatcaggaaagaaagaaaaagtcaattcgacattgaaagttggtagtccaatataaaactgcagaaagaaagaaagaaagaaagcaaaaaaaaaaacagaacttaaagagttgcaaggttactctgtctcctagaaccttttgttttatctttaagaaacctagttaagcgatcaatcacttagctcgtccatcttagacgcagtaggatcacagcacatcttacaggccctctggaaccaagagtttccatatgtgcagcgatcgcacaaccagtaaggaccaccatagttgtcgtacgactccgcctgtacctcgggcaaaccttctcgtaaagtcttgatgaaatgataaaagaagttcccaatgttggttgtctcgctcaatagcttaccgcaagtaagctctttggcttctgtttcctcctttatactctgtgagaaactatggacaatgccagacgcgttttgttggaggaatcgcaggtactctctcttcgccatatcatactctgtgtggatatagtcgtacgcacagctccatttgaggaactgtctgcactgaacaatgagcatcagtccttcccttagtaccttaacgtcttgctccttcaagtcactaggtttcttgattatggattcctcgaaagcttctagctcgtatttagcgttcaccagattcacttgactcgcattccagagatccaaacacgaaatccccggttttgctctgttccaatgattgaaaccaacattgctcgaacgcgccggtgccaaacaggatcctgaggttccgtgagtttccggtgaccgaaaacacttccaacagaaacgaccgctgaatcaagaaaacacacaaattagtatgatcaaataattaagatagagaaatctaataatctgcgaatagcaaaaaacagtgttattttcataagagtgaaacctgcagacacaagtcaagaactgggcccatggtcgttcaccatcaatctccacaggaataaagcaatgagggcaaggcttggtattggcatcaatccaggagacggtcgatggcttgtctacttcttctatcaatttctccaagtctctagacaaccaatcagaagcgttgttgcaggtcactggtctgtgtgactcaagcatgcatctccaacagaagatatgaccacagagacacacaatgtttaagctatgctcttcatcttcacttgccagatgaaactcaatcacgtaattgcaaccccgtgcaggacacagtttgagcttccatcccaggtatttctcacggtaagatttcagaatatacaactcgtacatcgcttgatcacgtacggttagcttctcaaccgtctccggtccaacagcagctcgacaatctcgatcaggacaagagattgcagtgtggtttttctccacagagaagaaatttttcttaagatacttgctccaacaagctttgcagaacttgtgagaacaaaaaggcgtggagatcaaatcaccatcaacaacaacagcatcaccatcataatcgtcatcaccaatattagagcagatcccacaatatacacgagataaatcttgattcgaatcaataacaactggtttcaaacctgattcagtcattagtttctccatgtcttcacccaaacgctccaaaacccgattcgagtcccatcggaatcaagattgactccgaaggtaaacagaggaaagctttaacagacgagagttttcttgtatctactgttctagggttttccttttttttttgctttggagatatcgattgcttctctacaaattgtttttttaatcattattaattggaccctaatcattctaaatatttgtgatttatataagattacaacagccaattatggtttacattgattttttttttaaaaagcctataaatagtttttttttattaactcaacattatgattctttattatttatcaatttaataacaaaagttgacaaacaaaaataaatctaaaaaaaaagatctgtactaaatgtgattaaacttgttaagaaatgttactgaaagcaaaaggcaaaccaaatctaaagtcaataaagaaaatatccacctccatgattcaataagccccctaaatggctaaatcaatcaaaaataggaaacaaacatagacccaaaagtatatttaagtaatatatttgactttcagctaattttattatctttggtcaaaaaaaaataaaaaaaaattttgtttatgttttgacttggtgaacactaaatctagtgcatgtggttaccaactcacaaactaataagcaatgcgattggttctttatcatgcaagtgacgtcacaagagttgagtgaagggtataatagtaaaatcagtaagaagaggcaacgccgacgaacccgtggcccgcacgtcgtgagaagagaagagagtctgtgtgagcagaacagagcgaggaaaggcgcgtttgttgcgttttggccccaaaggccaaagcccgccttttgcttttcacctttcgttataaaaagcgtttcctctccttctctttccatttctctctctctcctctctcgctcgctggcttcgaggagaaaaaagaaaaattggagaaataatttaactggttctcggagaatctagggttctttttagccacgccttgctgatctccttcgtgaattcgattccgattctcacctggtacggttttttatatttactcttggttagaattcgcgtcagatctggaatttttgtcatactttttttttctttcgatatcgattcctatgatgacctcttctgtgtcatatttttgtgcattaggcttgatttgtgtgttgttgtttcgccgaattgcttgatctcgtttagttttggtggtcttagacgatttgtggcttagactgtccaatgtggaattgaacagagtttgatgtctagctttagaaatacagtaatctcctaattgttcaggatttggtttaggaattatgagattgtgctatctctggcacgatagaaagggaaaaaactaggtcactagctttgttgaagcggaattgttgagccattattgaatctgtgattattgaggttatctcttcttacggagacttatctggcaggtcttttgtggcctaaagctcataagtttatgctagtgcaagaagttatataggaatgacatattagatttacaatgatggaagtggggttctctcttattcagtggttgatcagttctggtgctgacagtccgtttatatttggatggcttgtaactggatctgttggccttctggctgttatctacacatttcttaaatggcagaaaaaaacttctttaaattgggttaaagctgctgctagagagaagaagaaggtatggaaaagactgagagttccactttctcatcatcaatggactgatgattatggttatgggcaacagccatccacttgctgtgtttgtctctactcccttgttccaggtcaaaatgtttctaataaagcatctctgagtattcccgtccaccgatgtgctgtatgcggtgtagcagctcacttttattgctcaagctctgcagcaaaagactgcaaatgtgttgcacaggctgggtctgaccatgtccgacatcactggtctgagcgatgggttaacatggatgataatgctgacatgactgccttttgcttctactgtgatgaaccttgtggtattcctttcattgaagcttctcctatgtggcactgtctttggtgccagcgcctcatacatgttaagtgtcacatgattatgtccaaggaatctggtgatgcttgtgatcttggctctctcagaagagtaatcctctctccagtacatgtaaaactcaatgaagcaaatggtgtcgatggagtactgactactattaaaaacgagttagcatctatacgagggcatgtgagaagaaagcgccacaggggaaaaaatgggaatggccaatctttaaatggtaagctactggaggattcagtcagcgatccagtaaaaaccgtagttaatgggcttgtagtgaagaaactacgcagagataggagcatagattgcttaaagcaagtctcggacatgcctaatgccaaagggttgcaaaatggtataggcgggcacaaacgaaataaaagtgccgctttaaattttatgaagaagttttccttggttgatttgcccccagatgcaagaccgcttttagtctttattaacgccaaaagcggaggtcaactcggtccttttcttcacaggagacttaatatgctattgaatccagtacaggtacgtttagaagtttgtctgcttttaaacatattgaatttatatcactgattgataattgctttggtgaatttacaggtctttgaacttggctcttgtcaagggccagacgctggtttagacctatgtagcaaagtgaagtattttagagttttggtgtgtggaggagatggaacagttgcatgggtgcttgatgctattgagaagcgcaatttcgaatcccctccacctgtcgctattcttcctttaggcacaggaaatgatttatctagagttttgcagtggggaagaggtatttcagtagttgatggacaaggaagtctaagaacgtttttgcaagacattgatcatgctgcagttacaatgttggatcgatggagtgttaaaattgtagaagagagtacagaaaaatttccagcaagagaaggccataagtttatgatgaattacttaggtacaataattaagcatattcggttggtccctctcatggatcatgaacaatttctgacattttcctttgtttaggtattggctgcgatgcaaaagttgcatatgaatttcatatgatgcggcaagagaaacctgagaagttttgtagtcaggtactgctgttgtgacgatgatatattgagaaccagaatctgaatagcgctttgtttcattgtttttttttggtgtaaaaattgtgggtgtaaaaattgcggcttaacccgttaagtaactaatttcaatgagaaaaatatggctgatatattatatcttgttttctttgcagtttgtaaataaattacgatatgctaaagaaggtgcgagggatataatggatcgagcatgtgccgatttaccatggcaagtttggcttgaagttgatggaaaagacattgaaattcctaaggtatcttactgaaatgacattagtccttcattccccatcttgtgtggtgtgttcttacaggatttgtccgtatcactttcctcatactgtgcctttttgttctttgctaatatggaaaccccaaccaatactcactaaacatatattaagtaaaaattgagcatgaaagatagcgcataattgcttgataaaaagtaaaaaccatagctgacaacgacattttagtttcctatctggagaacgttttgattatgtgggaaccgagcgagagaggttgacattaccaaaaaggctaaaattattgttgttacctctggaaactgatgtccctaatttgttatcctctcaggattcagagggtctaatagtacttaacattggaagctatatgggtggagtagatctttggcaaaatgattatgaacacgatgataattttagcattcagtgtatgcacgacaagactctagaggtggtatgtgtccgtggagcgtggcaccttggcaaactacaggtctagtctcatctcgaattgctccttactcatgtttctgatacttttaattccgttttctttagacctgcacataaattttgagcagtaatccttacttaatgtgaggctaaaagatttaattgaattgattcagcagatttataacatgtgattgttccttacaggtcggtctttctcaggctaggaggttagcacagggaaaggtaataagaatacatgtttctagtccttttcctgttcaaatagatggagaaccgtttatccagcaacctggctgcttggagataactcaccacgggcaggtatatcatttcgctctatcaatcacacggcaaaaccttgagacaaattgtacattacattgaaagtagagctgaagaaactcactgtaccatgtaattgatgatgttctaagggttggtttgtgtatgcaggtgtttatgctaagaagagcatcggatgaaccacgagggcatgccgcagccataatgaatgaagtgttactcgatgcagaatgcaaaggagtcataaatgcatctcaaaagaaagtactactacagcaaatggctctccatctctcgtagtaaaaaaacaaaaacagatcatcctctcaccaaattttggtaacaagaagagttaacttacaatcttgtcttacccactagaaagccagtcccgggtacgagattttttgtctatttaaccttaatttttgtttcaattttgttttgttttggtgtttgtgaagagtgccatatgtatagatagtgtgcccatacgaaagccactgagattggcgtcaaaaagtgtcaagtagagaaagtttgattatatacatcatacagtgatcggttttagggtaatacaaaggctctattacccatgagttttctgatattcgttttttgttacttaacattatttacgcaattacgctccatgtgtcataagatccaactacgtgtattgccagacccaccgcctaaaaagcagacccttgacctctctctatatacagaagcttgacttgctgagaaacttcgatttctcattttacattgtttcctaaaaataccatgatgttatatttgtggaatcattttataccaaacacggaatattttgttcaagggaatcaatgatattttggctaataagtacttactaaagtttatctatcatttaattaccttactagttttgttatttccttaaatattgggcttatccagagcaattagtcttttgtatcattaacagaattgggtgcaacactctgattctttaggtagtgtcatcccttatctcactgctataagcctataaaacaaatacctttaatcgtaggatctcatgcattaatgctagtacaattgcattgcacttagtagtagtttatcatatacacaatacataatctttttttttggtaagtggataaataaaacagcttctttccatccatcatgcgacctccaaagaaaatatctacagaaagaaacagaataatttcaaaattcagagcaaaataatatcaagaaaaaattagaaccaaaaagagacatgtcatttgattttagggatattatattatccggatgggaatttcatttattatttgatttgctcaataaaaatgtatgatgcttggatctagtttaagaaaattaaatctaatttctaattctgctagattatattggactatttagtcaacaaatgataattatattatcaaaagatataattttgaatacgacaattaaattacttatttcaactatttgaaaaagaaaaaaaaaacggttatatcttctacatgaagtcaagatttttttcccccaaaatcaacaaaatcataaattcaaaaaataatatttcaatccaaaaatttatacatcatttattattacttatcattatctttttcctttggtttatatatattgtgaaatctgtacagtttttttttcatctttataaaaaaacgttatatatagtgaaaaagaagaagaaaataaaaagaatctaaaaccactcagctctccgcaccatgtgaaaggttggtgtagtggcaagaactctttcgaatctgaacgccttaagctctgagagacgagcattttccagaaaattcccattacctaatccccaggattcgatgaacccagaaatgatggttttcgaaaggctctagctttctcaaatccagattttgctgaggtttgtttactctaaaccctatagattcgttttccttttcttctacgtttatgaaaattcgtttgctttctttccaaaattcattgacgcataatgttctcagattcgcacatgcttgatctctcattttacagatcgtttaaatcttgatctcgtgatttttgtctctgtttttagtcggtgacccatgagttcatgagagaacgaaattgtttgattttgtcttttaatgagttcatgttttatcagaatctgtgtggtgggaatttggtggagtgcttaaaaataaattgaattaattagttgcttaattttgcttgtgttaaaaaaaattaagagtaatggctgctttaatctgcttctggttaaaaaatttggagtgatggctacttaatttgcttatggttaataaaatttggtgtaatggctgctttcatctgcttagatatgtatattttatacactttttagtggtttcttgtgtttggatttggtgaaaaatctttcctgctcagttacaacctgaagcatgatcttattgctttcagacatcattttgttcactttcttttgttttgatcgatctcagcatgtttttgactcttctgacatctgaaaggttgagtgggatctatgatctaattgtttataaatgatacattcttttcacattcatactactataagccttttttataactagatcacagaatccagatttagcttgcttcatcaccattagtttatgtatagtcccttttacatgtaagcttaggttccgtttatatatattgttttgttaaaagtggtatgttaccgtatgctttcatgttgagagtcttgtgtttatgatatctttattgttttcgctgcaggagctcgttgaaagaatgcaaaatagaccatctctctcttgtcctttgtctttcagatcgtttctctttcaacgtgatattagagtacaatactagataccgtgaggtcctttgtattattggaccttgagttgtcttgtctaagtgggataacctttctagtgaacattttcttggtcagttcatctagtgaactttttttggtctcgtgaagaaatagaagttttctttttcgggcttgatgggtaaagagaatcagttggagacaacaaattgtggagtcaatgatcacgattgtccacccgtcaagaacgaggaactagcagctgaggcgcgttatagtacagacagtgactcgggtttgccaacctgtcgtgtatgccattctgcagaatccgacagacgaggagataccgccttggggtttttggggattacccctccggttccagaagctcgtaaaagcaatgtagatggaaccgctgatgatgtcagcaaagctacagagtctgagctgaagaattctgttgtcaaaagcaatggaagggaatctggcttcatcgaattaacaagtcctgatgcggaagttttcatttgcacaaatgatatagaaatgggaatccagcagcatcaggatgcattgcttgagcttggatgttcttgcaaaaacgagcttgctttggtacactacgcttgcgcgctcaagtggtttctcaaccatggatccaccgtgtgtgaaatctgtggacatcctgcagaaaatataaagactgctgatttcaacaaagtggtcattgccttgagagattacacagcaataagagaaagaactgctgatggaggagatcaaatccctgtattaccggtgaatacagattcaaccattgattcagatgaagttgctgtcattcgaaggcaacgacttagtgagataacgtcatggtttggtccccattccctgaacaacaacaacaacaacaatagttctgttgcggctatccctgaccaacctttaggtgttgtgaacttcgacatcttacctatggaaaaccgtgcaactaaatgggctgtggaaggtactgggattctacttgctacaggtttactcactgttactttggtctggctcattgcccctcgtgttggaaaggtatgccatcgatctaaccttgtatatctaagcctctctgactggtatatcgataacgtttatttggttaacggttgttttgaatttgtacagaaaactgctaggagcggacttcacatacttcttggtggtctctgtgctttaacaatagtcatcttcttcagatttgtaagtaaatctctcaagtgatagatccattctaacagataagtagttcctactttttactaatccaaacacacaaaaacttgtgaacaggttgtgctcactagaatcaggtatggtcctgcacgctactgggcaatcttattcatcttctggtttcttgtgtttggtatttgggcttctcgttctaatgcttctcacaatagcccttgaatccaccatctctctcaatctctcatgtctctctatctatctgagtctgtgtattctttctcttggagaaaaatgtacattgcttcattaaagaagaaataagctcatgcttcattgaatatatatatgattcataatggttggtcacaattgcttttacagttcttctgtatctacttcgtgatatctttagacatttaatcaatcattacaaaacaaaaccaaaaaatcgaaacttgctgactcagtgtgattcacctgtgcaaaaccccccaattaccccagaatccgttaagttggttagtctcggaaatccaaatgtggaaatctcaataacccgattatgtaatcgtatgacccgacttggtctccgggtcaggatccgacacaatgccggtgatcgaagactctgaaaagcttcaactttttgccgattatttttacccttgaggagcaaaattccaattcaagaacggtttctgctcgaacgggtcctgaaacgaatcgacgaaatcggaggactggtactgaaactgaggaacaaaggcgtcattttgcaacaaaccaatggaactaaacatggacgtgtcatcattaaatgcctctaacgcgtcttccagattaatccatttgggctcactctcaacctcccagttatcagaacacgtgacgtccggtgaaatcacgtgacttgagcatcttgagtccgacgtactcatcttttccgtcggtttctcagccgccgccggtaaatacttctccattgttcctttcttattgtatatccgacacaaaacccaatcatcaagctgcaaaatttcaaccaaaaaaaacccattaatcatcatcaattcatcatcatcacaaaaatcgaaaaaaaacccagaaattaaaaatcagaaaagcttactcttaagttgttcttcttgttggtagaagcagatcgatcgacattagcgagacgatactcgtgcataatccaattcgttttaatccctttcggagcttttcctgcgtagaagacgagtgctttcttaatccctaacgtcttcggttttccgatcggtttatcagctccagtcgctttccaataaccggttccagctgcccggtttggtctcgacccgtttgggtatttccggtctctatgcgagaagaagtaccattctttctcaccgtacaacgccatttctggaaacaaaaattcgaattctcttcaaaatctcaaagtcaattcacaaaaccatatgtcaatcttgtcgtggactgaagttttacctggaagctcccatggattgaatttgtacaagtcaatctctgcgataaccggaacgttaatcggttctgacgcacatctccggcaaagatagaacttgacaagctcttcgtccgtcggatgaaatcggaatcccgccggcaaattcaactccgccttcatttttggaaaagtaccttgttgttttcttgtggataagattcgattttgagtttttataaaccttcgaatcggaggatctttgtggtttatctcaaagattgaaatcgaggagaagagagcaaagtccatggagcttttataaacgaaggggaggttcatgaaccacacgtgtgtagttttctttcggacacgtgtgataaaaaccaacctttttctttttcaacgttgaccgcgcagccagctgaggtttacacgtggcttggactaattggatgatcgacatacagagtatgtgatgatgtcattgcttccgtcagccgcacgaaccttttcgtggttgtaatctggtacttcacggtgtagcagcttgtgcacgatgttctctggctgatatttatattgtgacttgtaagtggactggtcagagtattactgtgagcttctccgcagcggatttcttctctgttcatgtaattgcatacgtcattgagaatagatgacttcatcttagtcacacgccggcttatatgtatacgtaaagtctgaaagatgcgataatcgaccagtttcgtggaccaaattttccacataaacgacagttactatttaaaatgaaatgtattatagtttgcttattcttttccctaatattttataaaatgttgtttagtaacaagtactaagaccatcttcattggtaatctttaagagtttctaagcacaaatccttatgaaaaaagtttaaaaataattcaaaaatgtgaaattaagcaaggtatgcaccttagcttaggtattctttggtttctaagaaacttatatgtggcagtttttcattgactggagaagaatacaaaacaaaacataaaatctttcacattttttttatatcttctgaagataaatttgaaaataaatctaattgcttttggtttcttttaattgaatagatagcaaaaatattatctgagtcaaatttaaatttaatcgttattccaattttttatttgtctttttatatgtttttatgtcatatatgtttatgatttaagaatttttaataattattatgctttatcaaatcgaaatacttatgatttttcattttaaaactaactttttttctttaaagaaacccacttaaggattccaccattggacaataaaaatagtaaagactcaacaaaatctctaaacttcaaaataatcaaaatttattcttaaaaaaattaaaggattccacattaggactccaccaatgggggtgctctaatgaatgtaagtaaactgatcttatatgttataatttatattggggtatgtttgacaactgtgacaattagaaaaatgggctttttgagaagaaaaagaatgtaaaactcaatggaagatataaaaatggctcccaaaatcataaaacatacgaaaaatatttatgtgtgtttagaaacatatatcatgtttaataaccaaaaaagaagaagaagaagatatttataaactagaaaagaaaaggtaatgcttagctagagcatcaagattgtaaaagcccatatggggcttaactataacttcccttttaaaggcccattttatctttacgtgaaggctgtgttgggtccaagtcttgtcttccaagttccagttgcaatgtcgtatacgcaaaacctcaacacctaggtttcaactttttcccaaattttgcttagacaagtgtatatgcaaaatgaagaactttaatcgaataacttttcttgtcaataatttttttttttttttttgctttaaggttttaattaacctatttaaaatacaatttgatatgttgaaatttaaaacatatattgtaaaaataaatttacaagaaatctttacaaaacaagattggaccattttgttgttttgaaaaatattcaacttgctcatttttagcattgacttgaacttattcaacataagtatcacttaatcactttactaattcaactgatcaaaacttcttttttggtgggatattcaactgatcaaaacagtaaaggttgattattagtttgccttagaagttgaagatcatatagatgctagtcaaattagaaggggcattttggtaattcagttgtagaatcgtaagacaaaggtgaaaagcataatgctattttcaggattatataacacatcaacagaggatccaaacttttcccaattattgcaagtcaatcgatttgtttatctatataaagctcccaaatctcaaatctcaaatctcaaattttttattaaacgcctacatatattactcacacttgttttcagatcataaagttttttcttggatttatatataatgcactaatacatacacacccacatgcttacacacatgttcgaactgtaatcagtaaaagaaacatcagagaggaagagaaggagaagaaaagatggagatgggtcgtctggtcttcgggttgtgtttgattcttattgtgggtacgtttcttgaattctccggcggtgctacggcggcgaagggagtaacgtacgacggacggtctttgataatcgatggacagaggaagcttctcttctccggttccatccactatcctcgcagcacacccgaggtaaatgtttccatcatacataaactagatgtgatttaatgtgataataacatttcggcaaacctctttaacccaaacatttttggcaaatgaaccttttatcaaattaaaatggtaaacatttttggcaaacgtaaataattatggttggaccataaacttgtgtcatatcaactattgatgtaatatgacaaaactaagctatcaaaaaacaaaactatacgtatatgacaaaatcaggagtataattttggatatatatgaaagcaatgttttgttgataagatctaaaatcatatgctagatattgctgcaaaactatgtatcgtagtcgacctaattgatatatatgatgtaatgtacatctatatactactactttctaacgaattctgtttcacgagtttctttgcatttaaaatttggtttcactttttatcatgtactttttgttgcgtgataaacttctattttcgccaaaaatgaaaaaacaaacttctttctttcttgaaaattaagaaatgtcatttttgggttttttttttgttttgttaaagtgaaacaaaattctagcggggatcaattattggataaattaatcatatagttatcagacacaacatattcatgatttcatattacactagatatcttcttcaattttaatttatttgcgcgattttaaaacaccaaattaatctacaccttatgcacttttatatatataactgttaattcattttctatgattaaatttcgagagatgtattcaatcaaacattttaagtgatttgtgttaaaataacaaatccaatgttattcaattatggatttctaaaaatctcatgaaatctaatgttattgaatttatgattttaaaatttactttaaaatcccatgttattaaaaacattttaaggattagattattactgattttaagaaacttaagtaaattttagtggatttccttagttaaaaatacagaattttaaatctcatggtcttaggtggaaatcgaaaagatttaacaataaatcataacaacttctttaaatttatccaaattcttcaaaattacataaaaactcaaaataacttaaatcactcaaaatagaagattaaatacactcatatttttagaaaaattctaatcactaaatgaaacgaaaaagacatgcattacgtattgaaacgaaattgatctgttattatttggttcacaagatttgttataccttcactttcaagattaagacatagatatcatccacaacacaacatctttgactccttgactctgctgataatgaaacagtcacgggtctcaacacgacatcgtttttgattctttttatgttctaattttgtcattgtccacttctttgacactcttaaaaaaattacagatttatcatttaattagttaaacattactaaatcaaatacatcgactgatagaatggcaatgatccatttataatctaaaactaaattagacacagatccgttgtctgtgcttccatttaatgttcttctcatagtttcgatatacaaaataaaataatatcgaataaataagttttgtgttaaaaaaaaaaatcgaataaataagtgaataactaataatgatatatcaaataaaaagtcaaaatgtgaaaagtattaaaactaatcatgcacataattgattctgtttttctgtgtcttactatctattggtctttgacaactctaacacaatcacgtgaacaaatctcatttcattaactaatcaatgggatccaaagacagctaattattcattaccaaatgcatcatcatttcaatcatttgaataagcgaacgcgtttttatgttaaataattttgtattgaagatgtggccgtctctgataaaaaagacaaaggaaggaggcatcgatgtgatccaaacgtacgttttctggaacctccatgagcctaagcttggacaggtccgttccatttatgatttctcaatatgacttttaaaatttttcattttcttcatatggtaggaaaattatagaatatataattacttcgaataaaatgaatattgcagtatgattttagtggaagaaacgatttagtgaagtttattaaagaaattagatcacaaggtctctatgtctgtctacgtattggacccttcatcgaagccgagtggaattacgggtactaatcaactgaccaaaattattgtttgtcaacgtatatttaacattgaaatgattttgacgaccggtttgattaaccaggggattgccattttggttacgggatgtacccggtatggtataccgaaccgacaatgagcccttcaagttccacatgcaaaaattcaccgctaagatcgtagatttgatgaaatctgagggcttatatgcttctcaaggaggtccaattattctttctcaggtatttaatcttttcaatcttattcgtcaaattcaatgtcaccaaaccgaaccaaatcctttgcattaaatacattaaccggatcattgcttagacaaataagtttcttatttgggttcttttgtaagatcgagaacgagtatgcaaacgtggagggggctttccatgagaaaggagcatcgtacatcaagtgggcaggtcaaatggcggtcgggcttaagaccggagtgccatggatcatgtgcaagtcgcccgacgctcctgatcccgtggttcgtaccggttacttatctaagatcaatcatcaatgactcaatgtttcttatacttcttagagatcgaatattttcatctgtagatcaatacctgcaacgggatgaaatgcggcgagacttttcctggaccaaactcacccaataagccgaaaatgtggactgaggattggacttcattgtaagggttttacttcattgtctatttcgataggtttcttgttttaaaagttaactatgtttattttatttttttgtgatgaaaaagctttcaggtttatggaaaagagccttatattagatctgctgaggatattgctttccatgccgctcttttcgttgcaaaaaatggaagttacatcaactattacatggtaaataacaacatctttatcaaatattagtcgcattatatgatcatcaataactcaccaccttgtttcaatacagtaccatggtggaacaaactttggaaggacttcatcttcgtatttcattacaggatactatgatcaagctcctctcgacgaatacggtttggtctaaatgcatgttctctgtttgaaagaacctgataatttgattctgattttgttttgtgtgtttcaggtcttttaagacagcctaagtacggtcatttgaaggagcttcacgctgcgataaaatcctctgcaaatcctctgcttcaaggaaagcaaacgattctctccttgggaccaatgcaacaagcttatgtctttgaagacgcgaacaatggatgcgttgcgtttctggtaaacaatgacgctaaagccagtcaaatacaattcagaaacaatgcgtatagcttgagtcccaagtcaattggtattcttcagaactgcaaaaacctaatttatgaaactgcaaaagtaagtctttttgcgaccttacagatcatactaatagtaatcaacaactattcaagcattttaaccgcttaattaataaaggtgaatgtgaagatgaatacgagagttacaacgccggttcaagtgttcaacgttcccgataactggaatttgtttagagaaacaatccctgcattcccaggcacatctttgaagacaaatgctttgttggaacacactaatttgacaaaggacaaaactgattatctttggtacacttcaaggtaaaatattatagacattacacattacatttctaatgttcatttatcttttctaacgcaagtttggctcttccaatgtaagctttaagctggattcaccctgcacgaacccgtctatctacacagaatcatcaggacatgttgtccacgtgttcgtcaacaatgcactagcaggtacataagtattgagagtaacaacggggaagaaaaatgtgttcacaaactctgcttcggtgttgattttgacggtccattgcacttagtttgcaagatacacatactttactctctagtatagcttaactaccaaataattcaatattcatatttatgaacatattaaaagcgtgttgttgtaggatctggacatggaagcagagacataagggtagttaaactacaagctccggttagcttaatcaatggacaaaacaatatatcgatcctcagcggcatggttggtctaccggtaagacgtttactgatactagaaccctgtttattaagtgagtagatagaatcataacatttttttcaaccttaataataaaaggactctggagcttacatggagaggagatcttatggactaaccaaagtacaaattagctgtggcgggacaaaacccatcgatttgagtagatctcaatggggttactcggtaatatgatgaataagcctttcattttatgagtgatggaagattgtgttgatacataacctagtatgtatatgtgttgtgaaggtgggtttgcttggagagaaagttaggttatatcaatggaagaatttaaatagagtgaagtggagtatgaataaagctggactaattaagaaccgccccctcgcttggtacaaggtatgcctatttacatatgtaaataagtactatatgtgtaatttatgaatagtatcggtgacgaatgtgaatatgcagacaacgtttgatgggccgaatggagatgggcccgtgggcctacacatgtcgagtatgggtaaaggagaaatttgggtgaatggtgaaagcattggtcgttattgggtctcgtttctcacccctgctggacaaccttctcaatctatgtaagtgtcacacacacacctggaaacacaaaattatgtttgttgttactttttgatatggaattggatttggttaatgcagatatcatattcctcgggcgttcttaaaaccatctggaaatttattggtggtatttgaagaggaaggtggtgatcctcttgggatatctttgaatacaatatcggttgttggttcgagtcaagctcaatctcaattctcctgaagattatttttttaaaaatggtttttgggtaattgggggtgttttataaaccaaacaatacattatattgaaatgatacaatacacaaattgaatgaaatatacaggtttcataaatcttagtgtcacatgtaaagaaacttcagatatatcagtttcacaaatttcgtttaatttgctcaagtactcaaaatattcaaaagatgcaaaatactagaaaaaagagagatccaccgatcacgctcgtatcccaagtacgaagggtccagtctagagcctggctttgttggttcggcgaatccagttggctcttcaccgacaccaaattggcaaacactttcaacgcgccgtttaattgttgaagcgatattcgttgtatatcacatgcgtatctgagaaagtgtggctcacgctccaatagtggcttgttggtttaacaagtagcaaagtccgggaactgtggggcctacaaatttaagatttcaacactttcggtattgtattcgttggggctggaccagatatttcctacattagttttgatatttggtttcctaaataatcgaaaaagaagccgacgacccacgttttaactcttaaggccaagccataaaaacttggaattttgaaaagaattaaaatagaggattataaggagacatgaatgtaccagaaaacgtggattggctggagagcagcgtttttgaataatccgtgtcgataaaaaatctgccttatcaattaatttcatttaattttggattctttttcatgtgatgtgtttcctttgatgatcaaagtaaaaaaacaaataatcaaatgacctgtttttttagatttgtagatgatcaaatggatattatttttgtttttctcgtagatatacaaagtttttttttttttttggttcctttgtctgtgacgatgacgattgttacgtggtgagaggatcaggatatagaaagggtttagatc

SEQ ID NO: 955 - DNA, 37225 bp, Arabidopsis thaliana
ttttttgtaaggaaagtcaaatttgggtaaggggctaatgacttcacactttctctctatatacatacagtacgtctttttcgttcttgaagttggctttacttcttccctaatctatggaccatgacgaatgtctgtttaagcgccacgccatatatatatatcatagtgtttcttcgcgtatggtgaaaagggtatttcttacttttattattgaaagaaaaattacaacctttatatgattatgaggattgaggagacagttactattagttaacaataaaatgatctcactcaaatatgcataaatggaatctgatatctacatcaaatggtatgaataaataagcaaaaaaaagaagaagcttatcctaataagagacaatctgatataaataataatgatatcataatccacagtggagagtgatttggtcacactcaaacaagcacacaaaacaagaaagatatttggaagctctaaaaagataaatcttgtttttccctcctaattgtaaagaagagggctttagacttttagaacaacactcgagggaagtacgacgacgaagaagagctaacaacgataatgaatcgggttactactgaaagcattgcgtctacggcgatactggtggtgatggtgtttctcttctcgtggagatctatcgaggcggcgaatgtatcctacgaccaccgttctctcaccatcggcaatcgccgtcagctcattatctccgccgccattcactatcccagaagcgtccctgctgttagtgacttcttctttttctttgattttatcacttggtgaatgctaaagttgaaagctttttggatttgtgctttatgctcacattgaatcgaacaaagtttcgagcttgtgagggtttagttgagggagattctagaatcagtctctaagagacatttaaaatcatgggtttgatgggaaatttctaaatttcttgcattttccatcctcttctcaaaatgattaagaaaatgcaatttcagttctttagttatgagtttggatgatttaggcctctgttcttaaattgtgctttattctcaatttcatcctcaattgattttttgttgtagatgtggccatctcttgttcaaacagcaaaagaaggaggctgcaacgcaatcgagtcttatgtcttctggaatggccatgagccatctcctggaaaggttctaatttcaacgagcttgcaattattactcttggaagatatcttctagatgatgtttgttgaaacattgctgaataatcatgttgctgtcttctagtattattttggtggccggtataatatagtgaagtttatcaagattgttcaacaagctggaatgcatatgattctacgaattggtccttttgttgccgccgagtggaattacgggtaatgagctttctatacaatccttcctttctcaaatattgttgccccctttgtagtttttctaattgaatcttgtggttataggggagtcccggtttggctgcattacgtgccaggaacagtcttcagagcggataatgagccatggaaggttagacaggaaaatattgcggaatttgttttttcttctctgttactgaaaattcatttgctgtgtgaattttcttgtttcagcattacatggagagtttcacgacgtatatagtaaacctgttgaaacaagagaagctttttgcacctcagggcggtccaataatcttgtctcaggcaagacaagacaaacgacaacatataatatttcagcatcgttttgtttcctttagaatgtttttttcttgatattgtgattcattaggtggaaaacgagtacgggtattatgaaaaggattacggagaaggagggaaaaggtatgctcaatggtctgcttctatggctgtttcacagaatattggtgttccatggatgatgtgccagcaatgggatgctcctcccactgtggtaagtctatatcgaatccgaaacacaagatctatacacaccttcatctttttgattcattgcatgctttcttgtatcgagatgttagcagatgctttctgatataaacaagtgaaaaatctttcaactagttccagtttatgatggatttctcttatttccttttgcagattagtacctgcaatggcttttactgtgaccaattcacacctaatacaccagataaacccaagatttggactgagaactggcctggatggtaagtagattggttccgctaacatttcctgttacaagtttcatacaaagttggagtcttttggagcttcttgttcattagcaagtgaatctgactttcgcggactaaaaagagtttttcttttcttccaggtttaaaacttttggaggcagagaccctcacagaccagcagaggatgtagcctactctgttgctcggtttttcgggaaaggtggaagtgttcacaactactacatggtaatatttgttagtttcttcaagacgaggaagttagttagctctgtatcagtttgtaatctaaatggattttggttgtatgttttgtctgaaatttggtgtagtatcacggaggaactaattttggacgtacttcaggaggaccttttatcactacaagctatgactatgaagctcccatcgatgagtatggtgagtttgtaacaaagaagatcactgtgtagtgagataactcttcaacggttatataactaatttttgtgtgctattattcctttatcaggattgcctagattaccaaaatggggacaccttaaggatctccacaaagctataatgctctctgaaaacttgctgataagtggcgagcatcaaaattttacattaggccattcactcgaggtacactttctgtatttaaacccgtcgggaaagacttctgtttctgtcagaatgttctttctgatggtttgttttcgattttcaggctgatgtgtacacagactcttcgggaacttgtgctgcgtttctgtcaaacttggatgataaaaatgacaaggcggtgatgtttcgaaacacatcataccacttgcctgcttggtcagttagcattctacctgactgcaagaccgaggttttcaacacagcaaaggtaacaataactggtttggacaatgacataacagaaacacaagttagcaaaaggctgatttgacattttgcaacaggtaacttcgaagtcctccaaggttgaaatgctacctgaagatttgaaatcttcatcaggtcttaaatgggaagtattctcggagaaaccgggtatttggggcgcagcagattttgtgaaaaatgaacttgttgaccacatcaacaccacaaaggacacaactgactatctttggtacacaacaaggtcagtacctgaatactgttattgttagattaattgaattcgtcgagaaagaatctgaagcaaatgtactcaatctgctgcagtataacagtcagtgaaaatgaagcgttcttgaagaaaggaagctccccggttctgtttattgaatcaaaagggcatactcttcatgttttcatcaacaaagagtacttaggtaccttcaacactctctacaattcgtttgttatttcactcaattttctaattgattggtcgtaaatgtgacaactggtttctaggaactgcgacagggaatgggactcatgtgcctttcaaactcaagaaaccagttgctctcaaagcgggcgaaaacaatattgatttgcttagcatgactgttggtctagcggtaattctataaacaaaaatccaaatatcattgcagttttgctacatcatccgcactcatacattcggttactttttttctgccacagaatgcaggatccttttacgaatgggttggagctggacttacaagcgtctcaatcaaaggtttcaacaagggcacattgaatttgacaaacagcaaatggtcctacaaggtaatatagttctcgtgcctagaaacctctcatgtgctcctgagtgattctgtttctaacaacattcccatgaatcttgcagctcggcgtggaaggagagcatctagaactgttcaagccaggtaactccggggctgtgaaatggacggtgactacgaaacctcccaagaaacagcctctgacttggtataaggtaatgtagtagcaactcttggacaagaagcaagattgtagaagataaagttgtgtctctaaaatatctgatcttttggtaggttgtgatagagccaccttctgggagtgagccggttgggcttgatatgatcagtatggggaaaggaatggcatggttaaatggtgaagagataggaagatattggcccaggattgctagaaagaacagcccgaacgacgagtgcgtaaaagaatgcgattacagaggcaaattcatgccggataaatgcctaactggatgtggagagccatctcagagatggtaaaactagtagaaagccattaatcagagttcctttgttcaaatttggttattgttttttttttgttttttggatgattaggtatcatgttccaagatcatggtttaagtcttccgggaatgagctggtgatcttcgaggagaaaggcggcaatcccatgaagataaagttgtccaaaaggaaagtatcggtggtgtaagcaagtagaacaagttaaagatgatgatgcaaaacgtgagattgcaatcaagaaagacgagattttgtttgtgttgtatttgtttgttacaacaagtcggaactcgaaaaacgatgaaacaaaatccccaattttatgaacttaacacagtttttcatcatcacaagctgtaactgggccaccgaccactgatatttgttacagtttatgggcttttgattcaactgtttttatataagacaaaggaatgcgagagatttatggcttggctaattatggaagaggaggaggttgacggcataccggtaaatgaattcgggaggcttgaaattgtaagaacatcaacggcaaagcaaaaaaagaaaaagtgaagggcttgtttgcgtaagagaaaatcccagcaggcctatgtatgtaaaatccgatttttattttgatctcttattaggtttccttgtcgtctcagggatgttttttttattgaatttgattttgattttccagggttttgattatggatttgactttactggcatagttacgcctcctgtgagcactgattatgatgtcaccctttatgctaagcttggactttactgctacaattttcaaaaggtaaccctgaactgaataatatatattgtctctttattcatcatgtattataatcaatctcctaaccttgattcctctcttcatatattgcttgcttgtcaggggacaaacttaaagtttgtgcgctgggaaaagtataatacgtctacgggcactgcttacattgataactacatcactttggaggcaatggatccgtcctgcaactctgtcttctcttttcagactgtgttcagtgctgctggatgttataaccaagatacttatcatgtacaagactggagggtcttggcctgcagaccaacatgtacgtatgcttttcttctttaccactgtcttttctttcgagatcaatcaccagagaggactaactgtttatagagatcaggtggcaagtctgtgaatgaatattttgaccggcatgaggcaatggatcccttctacacaggtaaaatgcccaaatggttgtctgatgacgccttggcctttgacaacaaaaagtattacgtggtaagatgtccagaactggagtttaatcttcttttttagtttgagaagcagttagaggtgaatgcatttttgtcacaggtgcaagaatcagacttgcatgagaatgactggctgcttgtattcatggaaatggtattcttacaagaaaaatcctgtaagtccttgaatttcttcttcttctttttcttcatgtttcttttctcttacgcttgcttgccagtgtgactttaggaattgaaggtttccccacccttggagatcaacaaggtagttgtagaaactaaagaagattacataactgaggcgcgtgagaagctccacgcagagaatgcaatcttctacataagttacaagtatacaggtgtttcttcaagtgatcacaaagctatcataaggaaaaccatggatggggtaccagaacacatgagtcttgaaattgctttggtaaagtaagtcgagaacaagaagaagaagaagaagaagaaggagaatagacagacacctcttgtatgcatctggtctgttgcaatcaattattaagcgctattcaacttttatcttgttatatgactatgcacgatgtgtaaagataatgctgggatctatatgactatagcgagttgggatctatatgtattttaaccttcgctaactgctggatatctgtttgcaatgcataatagtactttgtatgataagttgataaccaataacacaagctgtaccaaaccgtggaggttattgatatgatcagtatgtggaaaggcaaggcatagttaaatggtaaagagattggcccaggagttctccaaatgacgaatatgttaaaaaatccgattagaggcaagcaaattcgtgccactggtcactggatgtggagagccatctctgagatggtaaactagaaagccattagagttctcagatttttcattgtttttttggctaaggtatcgtcaagttccaggtacgatcatgaagatttgggattcatatgctaccaagggaaaccaagcaagatatatatatatatatatcgtttgcctagttaacacaccttacattttttaattaggaacaccacaagatattcatttgttaacataccttacatcatcaagctatgtaactacgacatcagaactcattctatctcctcaatcaccacgccaccaccttttcgaaattgatctttcttcttcatttctggaaaccctctgtaatcgttgagctcaaccaccgagttcttctctgcccttacagatggttccagagcttcccatacttcagaattctgctcattgacccaacacatcatgtagaacactttcctctctgcaagctttagtttcttcttcagatcacgccctgatgatgattttacttcctttattgcaccaagaatcaacctttggagatcaccgagcagacataccatagctccagagccaagagaaagaaaacaaatcacatcatccaccagattcaatccgaacttcagaccaccaccaaggtttttataagctgaagagcatgtctgttccaagcaaaaggacaacacttcctttatggtctctggttgtccattgtgacccaaaactgatgaaacagtcaacaccattgttgctgcaccaagcgaatcagattgccactctccattatagatacggagcgtaaagcaataactatatgcaatgtcaatcaaatggattggtaagagaggagatggattcgtggaggtaagcttgcttagtgagatcaaaggtgtatcaggccctcgtgggatttcactcacaactgtggtctcttcttcgtcttcaacgcattgaacaagttgtgtacctccgagtccaagattgatcgttcgagctgaagcaagtaaccaccaaggatcccatggttggatcattttgcttaattctccagaagctaaggctctttggaatccttttctctcttctaagctcaaatcatcaagactcacttcatctccgttcattatcttctgaataatctcctccggtaagctcaaaccttcatcatccgtgatgctatcaattcccccatcatcttcctcttcttcttcgtgaaaccttttcaaaatttcgagcatcttccttttcgtttgatcatcagatcgaacttgcttcaattcatcgtttacattatctctcatgaatgattcagtacattggacactgtgagatttgtaacaaggaagggaacagtaccggaagttgcagcgaggacaagtgtactgcgagaactgcttattacatacatggcagataatccgcgtagaagaagggtttaacggagacgaatttgaactctccgacgaaataatcgtcttctccggcatcatcttcagaaagctattccaaattagggttttgacttttgattgaagaagacaggtctagaaacttacatacaccaattttaaaatcgagtttgggccgaattatggaccgtactttgggctatgggccttcattttaataaacaggtcggatatatccaccggacccggaatgatcgtcttcctcagtgttgtattttggctttcctcattgcttcctcaatctaaggatttccatgaacaaggaactaaaatgagatctcttctctttgtactatcactcatttgcttttgctctcaaacagcactttcatggaagaaggaagagtttcgcagctgtgaccaaactccattttgtaaacgcgctcgatctcgtactcccggcgcgtgttctctaattgtcggcgatgtttccatcactgatggagatctcgtagcgaagcttctaccgaaagcgcctaatcaaggcgatggggatcagatcaagccgttgattctttctctctcagtttacaaggatgggatcgtgcggcttaaaatcgatgaggaccattcgttgaacccgccgaagaagaggttccaagttcctgatgtggtagtgtctgagtttgaggagaagaagatctggctgcagaaagtagcgacggagacgatctctggagacactagtccgtcttcagtagtttatgtatccgatggttacgaggcggtggtgcgacacgatccgtttgaggtgtatgtgcgtgagaaatcaggtgatcgccgtcgcgttgtgtcattgaattctcatggattatttgattttgagcagttggggaggaaaactgaaggagataactgggaagagaaatttaggactcatacagattctagaccatctggtcctcaatctattagtttcgatgtttcgttttatgattccagtttcgtttatggaattcctgaacacgccactagcttcgcgttgaagcctaccaagggtcctggagttgaggaatctgaaccctacaggctttttaatctagatgtgtttgaatacgatcatgaatcaccgtttgggctttacgggtcgattccgttcatggtttcgcatgggaagtctggtaaaacttcaggatttttctggttgaatgctgcggaaatgcagattgatgtgttggctaatggttgggatgcagagagtggtatttctttgccttctagtcacagtaggatcgacacattctggatgagcgaggcagggattgtggatacattctttttcgttgggcctgagccaaaggatgttgtaaagcagtatgcaagtgtgacaggtacttcagccatgcctcagttgtttgccactggttatcatcaatgtaggtggaactacaaagatgaggaggatgtggcacaggtggactcgaaattcgatgaacacgatattccttatgatgttctctggcttgacattgagcatacagatgggaagagatactttacatgggatagtgtgttgtttcctcatccagaggagatgcaaaagaaattggctgcaaagggtaggaagatggtgaccattgtggatcctcatatcaagagggatgactcatacttcttacacaaagaggctactcagatgggatactatgttaaggattcatctggaaaagactttgatggttggtgctggcctggttcatcatcttacattgatatgttgagcccagagattagaaaatggtggggtgggaggttctcgtataagaactatgttggttcaactccatcattgtacacctggaatgacatgaatgagccttctgtattcaatggtcccgaggtataactttctgtctgaatggtctttttttcttgttccgttattgtttttctgtaatctgtatagctcatttctcatattcattttgggattgcagttgaatatagcaatccattgtttttctattgcacaattatggatatgtttgaactctgatagattatacatcccttatcttgcatactatgacaccttttattaattattgcactactaaagcaagtattttaagatccattttatgtttatgtggttttacattggatatttgtttctgtgacttctttaagagtggagtgtaagctatggttgcatatctccacctctgatttgcttatatcgtagaaagtttatcatatatgtaaaggtctattactgagatgaagactggcacttttttctttcttttttgttggagtaggttactatgccaagagatgcattacatgttgggggtgttgaacacagagaagttcataacgcatatggatattacttccacatggcgacttccgatggacttgttatgcgtgaagaaggaaaggataggccttttgtattgtcaagagcaatctttcccggcactcaaagatacggagcaatttggactggagataacacagccgaatgggaacaccttagagtctccattccaatgatattgacacttggtcttactggaattacattctctggtacaaacaaatttagctgttcaaattctgctggcgttttttttttctttctcaaatttaatggaagttttcttttcttttgcaggagctgatattggtgggttttttggaaatcctgaaccagaacttctagttaggtggtaccaagtgggtgcttactatccatttttcaggggtcatgctcatcacgataccaaaagacgagagccttggttgtttgggtaagatgtgatttagtacttaattttttcttgtcaagaggtattattttagtatgcggtccaggtctagtctatggatatttgcttgatggatgatcaagcagattgaaatgtagtgatactggttattgagaaaagaatacaattgcggaaactaaaacctggtgttgcactctagtcagttgattgtctaaatagttaggccattagtttcatcaagtaggcattgcaacggttgtccagaagtctctctgcctttgttttgctggctcataaatgttgcactttctcattcgaatcaaatcaatgttctcttgtttcagtgaacggaacacagaactcatgagagatgccatacacactcgttacacactgctcccatacttctacacgttgttcagagaagcaaacgttacgggtgttcctgttgtacgcccattatggatggaattcccgcaagatgaagctacttttagcaacgatgaagccttcatggtcggtagtggtctactggttcaaggagtttacaccaaggtacttgagcgctaagtacaacttcctacttatttatattttggcctttgtatctctttacttaatcatatactccagataaatgatcaaaccctgccacataccctcttctcgtctttctgcaaaattagggaacaacgcaagcttccgtgtatttgcctggcaaagaatcatggtatgacttgagaaacggtaagacttacgttggaggcaagactcacaagatggatgctccagaggagagtattcctgcgtttcaaaaggcaggaaccatcatcccaaggaaggaccggtttaggcgaagttcctctcaaatggacaatgatccttatactttggtacgtacaacacttgcatcacactgttttatcatctgctatcagcaccatgaacaaagtaaaaccggttggtaaaaagattatctctgaaagtgaaatcccaatgataaactatgtgatctaacatctaaaacccttcaggtggtagctttgaacagttctcaagaagcagaaggtgaactctacatcgatgacggcaaaagctttgaattcagacgaggctcttacatccatcgtcgcttcgtcttctcaaagggtgttcttacatcaacgaacttagctcctccagaagctcgtctctcttcccaatgcttgatcgacagaattatcctcttgggacacagctcaggtccaaaatctgcgttggtggaaccgttgaatcaaaaggcagagattgagatgggacctctgcgaatgggtgggcttgtagcttcctcgggtacaaaggtgttgactatccgcaaaccgggtgttcgagtggaccaagactggaccgtaaagattctgtgattgaacggtttgaaccagtttcactcatggccgttagagtggccgaaatctgcttttccggcgacggaatatcacactttttaatatatgtttggagatttagacttaaatagttgtaagagctaacagtttgaaagtcactttgcattgttgtttatcttcatataaatgagtttagattttgataatttcagaattcgtggaatcataattaacaattttgatagggaaaaataatttgttttttttagtcagagggtcaaataatcttaccttccatcgttgcctaattattgtcaaatccttttactttttacctaatcaacccatgaaaaatcttgaattacacgttttaagagtcatgaagaaaaatcaatctgattctgttggctagatttgttttttttatactgcttagtgtttactgttatagaaagggttctaagtatgcaaagtttgccctaattagataatgttagatccgtgtaggtgaaacaagaagccaaaattctgtgtaaaaagagtcacgtaactacctaactcttgtaggtctaaagaccatcttcactttaaattagaacctcatgtttcccaaacaatatattccgttcatgaatctcgtttcgaattaaaactaaaatattacacattttagaatgtaagaaaaacacactcaaaattaagaatcttggaattgaaaacgagattttgaatgtgttcaaagatactctttagaaattataatggtagataatagcacttgcatgacaaattcgattctctcttctcatcatgcatttttgctttacattttgttcctttaaaccaagaatattttgactcacctaaaagataaaccaaacatatctgaaatctacaattgacaattaacttctctttttcttttctcttattcttactgaaataaaaatagtatgcaactggtctttataaatttcagttttatatatttaaaaaaaatcttctataccaagtttaccaactcatggtagtccaatgattaaaaaataaatcattatggggttaggacttaggagatcgaattcgaatcatttcaaattttcaatgcgatttcaatcattgtttttcactgttaacactttgaaatatctaagtgtatctaaaaatttcaagccttagagattaatttggacttcgatccggaattctgcgacgactatcaaacaaattttgttttaaccgaaatatagattatttgcatctctgattatcaaaccattcattctttttattattattcagtttactataaagtatatgtccctccctttatgaaccgtatcaaatactatacatagtatgcatgttcgaagaaatttccaacatactaatttgaaatcaacgaacatatcaaattataatgcgttgatgcagaatatatgctttctatatatataacttaaatacaaaaacctaaattttccatatgccttcgtaatttagtatataaatattcattcattcttaatacagcctaggactcggtagcattttgaagtaggaacgaattttgttaattaagatacatgagtgattagatcgaatccaaaaggtatggaggcgtagaacaagaatttggttctctttcattttacgtatctttcactaaagaatagagagaaaacaaaaccatgcaaaaacctctcaaaaattatatattgaacgcttagacaaagagccaaatttattcgctttttgatgtttacatcagtatttgtttctagctagttcatattatttaaactccataatcatttgaaagacataaaatacagatgtttaagatctgtggatgtttatataggatcttcgaattcggataatgaaatcatttatacactattaagtattaactttgtagaggacttaagtattcgaaatcttgattcaggttgtcaatcaagaaccgtaatgtttgatctatagagccatgggattaatggatgctaaaagaataaaacactcgagaagaagagtacacgtaaaatcactcacacacaaagaatgagagatgggagaagaatactacaaagtgtttgttttttttaaatcggctcatatataaatttgggcgatactctactacccacattattcttttaaacaatgatataaatgtgtatggcctatgtagccgaactttttacatatctgacctgtatatatataataattatttatcaaagaaattagagaaagattcttccacttttgatggcttataaaagatgatgacccaaaacactcaaaatgcagcagcaactgctctctcaccacccatctcctcatttctcttttgcatttctttctttttttctgcattgcattcttttgaggggtttaattttctgcatagctttgtctaatctcttagagctcaataagagaaggtactataactgatctctccctctttcaagttttttttttgtttggtttatagaaaactataaccgccattatccgttagttttaaccgttttttgaaactagtgaatcctcataactttggtttctcactaaaaacagatggatgttccacggccagctttcaaatgttttgatgacgatggccggcttaaacgttcaggtaaaaaatttaaatccccttgttggttacttgacagtttacacctttgaaatgaatgatccaaagagaaaaactgcgattgtttcagggacggtttggaccgcgagtgcgcatatcataaccgccgtgattggatctggtgttctatcgcttgcgtgggctataggtcaactcggttggatcgcaggtcctacagtgatgttgttgttctcttttgtcacttactactcttccacgcttcttagcgactgctacagaaccggagatcctgtctctgggaagagaaactatacttacatggacgctgtccgatcaatcctaggtatcaactatcgtctctctgttttcctccgcatatgctttgattgctctgtttttgggttgtttctctctgttttgttctgttttactctgttttgtgttctgaaatgctctgtttctggcaggtggctttaggttcaagatttgtgggctgattcagtatttgaatctgtttggtatcacggtcgggtacacaatcgcagcatctataagtatgatgtgagtctttctttctcacaaactagtttattttggaacaccatataatgagataaaaggccttaaaaatttggttgtatcggatcgagtttcagggcgatcaagaggtccaactgtttccacgagagcggagggaaaaacccgtgtcacatgtcgagcaatccatacatgatcatgtttggtgtgaccgagatcttgctctctcagatcaaagattttgaccagatttggtggctctccattgtcgctgctatcatgtccttcacatactctgcaatcggtttagctctcggaatcattcaagtcgcgggtaaaagaaaattactttgtaagactcttcgcagtaatcaacaaagcagagggtttaactaactctaatgtgtttcagcaaatggagttgtcaagggaagtctcaccggaattagcatcggcgcagtgactcagacccaaaaaatatggagaacctttcaagcacttggagacattgcctttgcttattcatactctgttgttcttattgaaattcaggtaagataaagaacctaaccaatatggaatctgttttctatacgagtttacaaaatctctgacctttttttggggtgcatgtgggttttcattaggacactgtaagatctccaccagcagaatcaaaaacgatgaagatcgccacaagaatcagcatcgctgttacaacgacattttacatgctatgtggttgtatgggctatgccgccttcggagataaagcaccgggaaacctcttaaccggttttggtttctacaatccgttttggctccttgacgtggctaacgctgccatagttatccaccttgtaggagcttatcaagtctttgctcagcccatcttcgcctttattgagaaacaagctgccgctaggtttcccgacagtgacttggtgaccaaggaatacgaaatccgaatccctggttttaggtcaccgtacaaagtcaacgttttcagagcagtttaccgaagcgggtttgtggttttgaccactgtgatatccatgcttatgccgtttttcaacgacgtcgtagggattttaggtgcgttagggttttggcctttgacggtttactttccggtggagatgtatataagacagaggaaggttgagagatggagtatgaagtgggtttgtctgcagatgttgagctgtggttgtttgatgatcacgttggtcgccggagttggctccatcgccggagtaatgctagaccttaaggtttacaagccgttcaagactacttactaaacaaaccatgatgatgatgaagaagaagaaggtggtggagaaaaaaacaaaagatataaattttaatatatttcatttggggaaatgtgaataatgtaaaagttcttcgtttcgtataatttttatcttgcgtaatttatatacataatgtgttctcaatctataattgatgtggtgtttattgaaagtttgttaaccagatatggatttaaagacaataaacatactaatagatttatgtagaaaatgaattatagattaacatagatttatgaaaaaaggttttttaagaaaaaacaacttgaacataaggtatagtccattgccggagtaatgccatgagataatcgtaatgtatgaataagtgtatgtgaatataagaagattggcgaaatgatatatggagtaatatttacccgaaattaaaaaagcaagaaagtggtgggaatgaaagactcgtggatgaaacatcaagaatcattagaaagtttgaaagatggcgacttggaactgaaaaaggtaataacatggaatcgaatctaagtgacatcgatttggaataatttaagggaaagaaacccgacacataaagagaaacactaaaagagcaatatggatggttttgctttaaagagaatcacccacataagttttacccaatagaaaattttcactaaacgccaaatatattaggcagcataactaggttggcggatgatgaaggatcaattttttttctttttgacatatccatcacttagtccattagaaattcttcgtattctagactcttcgtattgagactagaatatatagaaatacgaaacatgcattgtgtgttgggcctaaaggctaacctacccaaaagttgtaaactaaaatacccatactactctcgttctcatctgcgcttcacactttgataaaaaaggagaagttcaacttgttaatctgtgatcactgttcttcttaagttttgatcttgattgataaaattgtttttttttccaaaattcaaatactctaaaactcagcgggtcactatcaatcatatcatatttgaattcaaacataggcggtaaaaaaataagacaaaaagaaaattctcttaaaacataagttgtataatggttgaaggaaaaaacagaaaactttttaagaaatgaaagatatagaaccagaaggtattattatggtgaggaaaaaaaaagtacataccctagagactagtagtagtagtacacacagtttacaacgcccatgtaataagagagctagggggagggaagcatcacaagttacaaactaacaacaacaacaaaaagtacaatcccaaactagacagacgtactcttagtacaaacctcaacccaaaagagatcactgaaaaaccttcgaatccaacggaagaaccggaagtaaaaaaaaaacggaattgactcaggctcaaattcgtacacgcttgacatcagtttgtggaacactgatatcacctccattacctttgcttgaaccatccgttaggccctaacacacaaccaaattcaaaatcacacacatagatttcatccttgaaaacaatccacgatcttgacagagcaaggtataattgtgcagcaatgattaatcagtaaaatctggttctaagccgatataattgtgccatttgctttcattgtagtttacgtattggatataaagtttagtagaattaacaaaattaaggcttaccgtttcatcaggaacaactgcatatctctctgcaggcgacacccagcttttccctggtaacaaagcaatgcaaaagttgaatcatttaatcacttgttgagtcgtttacagaaatcgttttaactagtggtattgtttaaatacctgaagatggatcgatattagaagattctatatgttgtccacttgctccatcgacgctgagtgcctctataatcttgggaaagttcctataaacaccaaaccaaatatccatttcacattatcaagataggtagtgagtgggattgaaaagcaatgattttggtggaaacaacgatcttactggccaattttcatattctgttcgtaacaccaagatatgttaagtggaaaacattgattcatgagcgattagatgatcacacttttacctgtcaaccgactctccaatgccgagctgtccatttgtacctctaccccaagcaaacacgttatttctttcagtgacagccaaggtatgtctccatccacatgagacttgaactactttctgtgaaattccacaatatgtgtgcattggaaaagaaaacagcgaattgagacatgaacttattaatatgattatatagccggtaaaacattgggacgagctttctcgttaaacttttttagggataacatgcctgatcatcgggaaatcgcacttgcacaggagaacactgatctaaattattgccgactcctacttgtccaaactgcaggctaaaagagagacaattagaagtttgttttattcaagatgagttactaaagttacccaatatatgcattgttgttttcttaaaataacatctaagtgaatgcatatcactccttaacagcataaagcaactaaatgcaaatatcagtgaatgtgtagatgaaaataggtgttctatacatttctacgaaatataggccagaaaaaaaaaaaaaaaaagcaagacattctagaccttattccaaccccatccatatagttttccatctgaagtcaatgccattgtatgtctccaacctcccgaaatctggaaaagaaacgaacagtaagtccaaaagatgtcgaacagaagaagaaaaccaacagaagtacatacaatgaagccagtcttcttcagtaggtaatagttgtcagaaagttttcgaaaaacatattattgctatcccatatgttggatatttcagatgtacaaatttgtatttcaagacagatttataaggcctaagtgaaacctgggagataaaactgttgctcagtgcttccagtttgtgaggaataaggtgatcctccaagtctccatgtcctagctgtccatatttgctccatccataagtatacaatgctccagagtaggaaactgatattgtgtgccgccatccacaagcaaccattgacattttctcaccctaaaattgtagttacaaccaggaaaacgagagtcaagtgagtcgaaatgaaaagagaattaaggaaaaaattgagggactaaaatgcagaaatagaagttggtaaaaaggtgaggttgcgtgatatcaatgttatatgaactaaatttcatttcatgaactgtgcagattcaggataccaaactttgatcattctaaaagttttatggtcacttccctgacacccaccaactgaaattagactgcatatacgtgtgactccatcaatatagacagctaatccagaatagtgcagtgcatattgagctattcacgatttctttcacgtatactgaacttcaaatgcaagtttaaacaagtagcaggtgcttaaacaaaaattatagaacaagagtcttctagcttacaccagtagaggtaactctttcaggaactaagcggtcagtccggtcacctaatcccaaatttccgtatcttccccagccccatccatagaggtcaccatcttctgtaactgcagcagtgtgttctgcaccagcagcaaccattttgattcgtattccctgcacccattacaagtttaaagtgttgatgtaacaatggagatcagcgaaactaacaacataaactcagggtctctaatcacttaatcttctagtttacctagtccgataaattatcaataagatcctaccttctatctgtgttttgcagatagtataacacatagacatccaatttagtatctaccactcctaaaattatgtaacttaaattatgattctgaagacatcttcaccagatgtggacccttaactagtaacagtcatatgtttaagaagatcaagttgcagaaatagacccaacattgacccaattctgaagcatagtatttggcaagttgaggaaactacaacgaaaaaagatgttagaagaatatttagtgatacaaacctcaaaggcttgaatcttctgaggcactagagaatcttcggtgtcccccagaccaagttgaccattctggttgcggccccaactgtataaacagaagtcaaagagatatgttggaaaacaagacaagacagacaaaacgtttaaaaggcaatgtacacaataaccaagatatatagaaatgacacaggacgcaatcgacattatcaaattccgatgaaattcatctaattgagctgagatgtaaactgtaaatgattgcacataaggagaagaacaataacaaagagaaaatacctctggacctctccttccatagtgacagccaaacaatgactatccccacaagcaatctgcttgatccgaataccgtgcaatgctttgattggtagcggagtaaacaagtcgcttgagttaccatggcctaatctcccaaaatcacccctgcaaagtacacataaaggttagagaacacgaggcttaaaatatgtgcaaatgagtgtataattagttactgttttctacacaaaaatctagagaggaactagtggtcatcatctcatcccgaatatatcaaacagactgaagagcaattgattcagcagcaaagaagaagataatgatgagaaacaaaccatccccaactgtagacttccatgcctgattgtgaataagcaacagtgtgatcagcaccacaggtaacggaaacaatttggtggccatctaaagcgctaagctgagtcggagaaggtcgatcctctgcatcgccatgacctaactgtccatcctctcctcgaccccaagaacaaacaatgtcaccagctacaaaatcaaaacataaaactactcattagtagacgacgaaagtaagggaaactcgattaaaggccagatcaagagaattcgcgaagagcacagcctactaaagcagcggatttcacaattccggtgattatttgagtccgtaatagaaaaggaaaaaaaacagcgaagaagaagagagacgtacagagaagagcgacggagtggctagcaccagcggagatgataagaaccttacgaggaggagccgtaacttcgtcggcagccatatcctccgccatggatcacagttgcagttttcacaagatattttttttggggagaaatgaattttgaaaaaagtaagaaatttctattttttgataaattgggaaattttgtagcttctctttcactatccgtaatctctcgagggttgaacaaggaaagacagagagagaaagcggtagatggtaataaaggcgcgatggagatttgcacatgtcatatatctgctttttgacttttttacttttgctggtttttttattttttgttttaaccgtacagtaaatctcttttttgtcgtacaggctttaattgcaaaagggtccctcttcacttaataaatccaaatacggacctcaccggtaaagttttatactttcataatttcaccatttctttttttttttgtttcttgaccatttcatttacctcttcacataagtagatttaagccagtacacatgacattctagatcgtaacttgtgttttatgtgttcatcattcacaggtgtaaggcgcatagatcgtaagagcctaatcatatgtttttagtcatgcacacgtgtgaaagtatacacgttagtcaaaaaaaattctgagtttcatagtccaaagtgacatatccaatttgtctttttagttataaatattcagttcagctattttagtttttcaaagaggtcaaattaaacctggattacaatatggtgtacagtttgtctttttattatgattctgattatcatatgaagatacgtcttgctacatgttattttattcaattattcaaaatgcatggttctacatatggaaatatacagatatacggtctacttacaacttgattttttttttttttgttaaattacaacttgaagattctactatcaacaaaacaaaaacaaaaaaaaatcttctatcgatcgagcgagatattcaaatcaaaatacatggtcaacaggtcaactatagattcaaaatatatgaatacctaaatattcaaattaagatatatcaattcacgatctaaaacatccaaatatagattttgcgaaaacggccaaagaaattatacataacggataaaaataaataaaaaattacatacggatactacttagtagtacttactagattacctaaaacccataatcttacatatacatatggataaaggtaacatcgatgaattacttgtttcatccgatctggaacgaatatatcacctcgctcgacctaacatttatgtgaaactaaaaggttgtttacattgagataaaaccaacattatatgcttgtcagtgagggaagttgtgacatctattatagtaagaaaattaaatgaatgaagatatttttgcattgcctgatacatgcattatatgtattgtccaattttggcattaaagtcaacgagacaaaactctagatcaagatggtctctaatgttgacatttgttgcgacctctttcaaatgggttcatctcatcattcatcacacaaatttgttgcattatcttttataatcttgttaaataaacatcattacgaacaatttgtggaaaaatggaaattatatgaaagccattggaagtactatatacaatttaatgcacatgacttcaacagaaaatactagagagacaagataagacacctataataatttaagcttgacatgaagtgctaaacaattactgtttagagacatatatgcacatgaaactaggaaagaaaaaacattgcggtgagtacatgtcaatgattgtcgatgaacaaattacaaaacagtaaaaatcaacacccacccacatgggttccggtataagggtcaagtttggcgataacacaaattttagggtttgcaaaaatgttgtaaccataatcggtgatgaaatatggaagatcatgtgaatatttagatgatgaaactatttggctgaaaagacagttaactttaagctttattacttgagatgccccgtgacagacaacgaatgaccttggagagaatcacacagatgatgctagaggtagctttaatgtgttatatttgcgaatgaagatgcttcacgctcctgtcgaattcttctctctttagagaaagaacagaccattattagtttagcccactcaagagaaaaaaccgaaaacaattgcaataaatgcttcaaagtgcaataaggaaccataagatagttagcatcaacctccacttcatactgtcttttacaagaagacatacattcatctgaacaaattgctaccaaattcggcatttaataagctgtctcgttacttaggattttcataaccacacaattttttgttggataagattctagtaatgtgtcaatatttcaaaggaaaactataatgccgacagacacataacttgatccacaaacttccattggactaatctactactcgatttatcattcagttaaaagcaattctatacaatgaaagttactgcaagtttgacctctcaagatttaggctaacctgacaaaacagagcaaaatcttacaagatttaggtttaaataagacgtgtaggaaccaagaaactaagaactacatgagatttaagatggttcttatttcttcatcttccatacataacttaaatgtgaattctacaaatgattttcttcatctcttttctttacatttgattccattttatgtttgcaaataatgagcaatcacaacaactgtaaaaaacatcaattcaagatactccttttcagcttcggtcagctatttggttgttcgttattggtgtccattgctgacttatccatctcatcatcagaatcaatgacattttcaaagtcataatatggatgcgcctgcacatttaaaaaccgatgtcgctatgtatgtgtatcaaagaagtaaaacaactcgttggttcattatcagcatcgtaagttagttacctttggtcgcggtttaacagcttcgaaactatgaaattgaggatccgagaaatcaggcgcctgcaaaataatatatgctcctttgtttttgtacctctcttctgttgcctacaccacacacaaaaatgattgttaacgcatatctttagaaaatgcaaataccaaaggcgtaaaaatacatacttggaattgcggatagtcaggtgcactgaaaatagtgataagctttccggattcgacattgtggtctattgtatatccattgtccattccaccaagaccagttctcttctctctagcatctggaccttcatgtgatctgatgatcaactgcaccaataagtgtaaaacatttgatccaatcatccatatcagtatttgggaagcaaacaagcatcaatatctactttggtgtcaccttcagttcatatttcttcaaaaaatcctctgtacaatcgggaccccaaagaagaccaatgcctctctgttcatttggtgaaaggcccggagtcattgaaggatcagaccataaaacgtctcctggtatcaagtttgaaccttcccaaggaggatcaagaactgatcttcgagcttgcatcaactcatctaaggtaccgagtttcattgagctcggctcaggttccagaagaactacccgacggttctttttcccccttgttgttcgcttaggcaagactgggctgcggaaaagccctccatgtgctgtataaacacgtccagaaattatggaagccaaaggaagaccttcaaagcaacccaaacatttccggtacacatgttttcccttgtctccgtattttgtaagcacttccttctcgaaaccatacatagatgtacaatactttgactcatgattaccacggagtaggtagactctgtccggcatcaaaacctaaacaaccaaaaagatatgtgctttaagaatactaagacttgagccaatagtaaaacagcttagtaaagagtttaccttccaggacaagagaacaaggaaggtttcaagtccccaagcaccgcgatccacatagtctccgttgaaaacataacaccggttttgacaaggaaagccagtatctttcaataggaaaagaaggtcatgaagctgaccatgaatgtcaccaaccacaacaacgttggatacagagtcaagatcatcgatatgaacgcagttacgttctttgtggaggattttatgagcggtgaggacgagggaatcaaagacgttgacaggcaatagtgaaggtaactgggaaggaggtagattccatgaagaccattcgaaacacgacataagcccatgtacccagtcgttagtgagagctcccccatctggccatgtaatgggagatggtggaacagtttccattaaaactgtaaaaacactaatctataatcaattccagagtatgaacatgtgaaacaagagtatcaagcaatcgaaacatagacaaagttttcaaatttcagcgatcaaagccaccagaacataaaatcgaatctgtatatattcattcgtacatctttaaactcaagagaagagcaaaaagtacaaaatcgaatcatgggaaatcgaaatccatatcacaaagaataattcggaacagagtgagactcaccggctaagagtggagacaatttacaaaattccaaagcttggatcttggacctagctaagctagcttactttgctttctctctgctttcagtcccgacaccgtcgtcgacgagatttaggatctgtctggctttggatccatttactcaaacgacgtcggttaaccagctaaaaggattcaaatcaaattcatgattccaaaccggccggtttaataaacgaacaaaccttttttgtcgtgacgctgcaatagcgttttgcaatcacgcgctatcgaaaacgcgagttcgagattttgttaaaggtggccaaccggtttgttctggttttgatataaacttgaacaaaattgggagaccgaattatacattggtctattcggttacttatcgatttcagcttgattttgtttacggtactatccaaggaatttttgtttggtttcgatttttttatttttcagtgtggatgaaatcaaaccgactaaaatcggttcgatatcgatttttacattttttcggtccggttcatgcttttcctctattttgagatatttgtactgaaaagcagaaagagagaagaaacacaaaaattggactttggtttgaaattggcgacatttttgggaaatctagagactaataatcaatttcgtcaaaagatcaaatcttgctaaattttcttctgctcgtttgattttccgaatcgttggtttcgataagtgaagaaaagatggggaatttgttcgtgaagaaaccacagatcacggaggttgatcgagcgattctctctctcaaaacccaaagacgcaagcttggtcaatatcagcagaaggttttttattctctcttcttatatcttaattttcttttgttacaatttcttttggaacccagatcatatagttttgattcatccaaaatcctaattggagattggatttgattcgtttcacaatatgtgtcttatgattgttagtagtgtgatggaaaagaaagactcaagcttttgagttctttggctcatctctttgttaaccgatcttctcattttttttgctaatttagcttgagaaagtaattgaagcggaaaagcaagctgcaagagacttaatccgtgaaaagcgaaaggacagagctttgttagcattgaggaagaaacgaactcaagaagagttattgaagcaagtggatcaatgggtcatcaatgttgaacaacaagtaaatccttctccttgtgtgtatgttttgtatccggcatcgtctcttttgatgcataattatggctttctcaaactttcatgtgaactcgcagttaacagatattgaacttacgagcaaacaaaaggcagtgtttgagagcttaaagcagggtaatagtgctattaaggccattcaaagcgaattggaccttgatgatgttcaaaaactaatggatgatactgctgatgctaaagcttatcaagatgtgagtcaaaatactttcgggtttcgtatcatttgtttatgattcattattacgttatccgctttgtcagaatgtaaatatcttcttatttgatcactgctttgtgtggcacagtttgttctgagctcgtctagtgtgaaaacctctataatcttttttgtcgagcttttgtgtttgatgactctatttacatttccgaatgtcaggagctgaacgctatattgggagagaaactatcagcagaggatgaggaagatatattagcagaatttgacaacctagaaagtcaggtatgggtttacaaaataaatttgtgtattattatctttactagataaagagactaatgttgatgtgtgttttgcttaaagcttattgttgatgagatgcctgaagtgcctacaaaggagtctgaagaatctgagaagctggatcttccggatgtgccaacaaaaactcctgtcgcttccaatgcggaaatcacaccagctgagtccgccacaaaaacaaaaggtttttcctttcgtcttcttcttcttttccttgttagaattgcaagaactaaactcaagacatgttttatttggtctgttactttcgtgttgcagttctcgaagaacctttgccggcttgagctagaagaaactgatcagcaatacgattttatcattcttttaccagttttttctttggtgctctctgaagttttctgtataatctttgaagtcgctgtcatttgtaaagaacaagatatatttggaatcccattgtgtttcgggaaagttagcacaattaacttactctttggttcaaacatacggaaggatttagatttaaagaatgaaaaacaagattatggtaagagttttccaacatctcttattttattgttattccatctcaggaaaccaaatatgttcatacaatacaaaaagaatttttgcctcttttgtctgaatataaatctcaattggattatgcaagctgtttggcttcgatatccttgagtctgagagtaacggctctcttgtgtgcatctaaaccttcgatttcagccatagttgctacataagggccgaggtttctcagaccttcctctgtcaaagattgtacagtcatgaactttaggaaagagtcgagagagacgccactgtacattcttgcatatccatatgttggaagaacgtggtttgtcccgctcgcataatccccaacactctctggagtccatggtcctatgaaaaccgagcctgcgttctcaatcagtccctcccatttctcagcgtctttgacattgatgatcaaatgttcgggtgcatatagatttgagaaagatattgcctggagaattaaagaacaaacagtgatgatgttacagatgttgttttgagatagtaacagtaaaggtgaaccgtaaagagatgggtacctcaatcatatctcgagcaaacactgtgaaactgtgacttagtgcttttgaagcaaactctcctctaggaaggcttttgcactgcttggcaatttcttcttcgatggcgttgagatctacactatcgcccacaactacaagaacaacttgactatctggaccatgctccgcctgcagagaaaccaaaaaaagaaatgtacaagttagccgctctctgtaggtctgaattaaacaaataaggcagacacaaactcatcccgatatgttatgttgaaaattgcaactttttcatggaaatacctgagaaagtaagtctgctgcaatgtaaactggactagcatgttcgtcagcaataactaggacttctgaaggaccagcaggcatatcgattgagaccattgcctcgctgttctgcagtaagggaaaaagcaggttaaagagtagtctagagactccaaacaagttaggacaaaagtaattgatgaacgatatctatacttgaagaatcatcttagcagctgtgacatactggttcccaggaccaaaaatcttctcaacctttggacaagaatctgtcccccaggccatggcagctatagcctgcaaaacaaaatcgaaatgtctacaatcttagagagaaaaaatacaatcaccagcatgaaaacataagcgaaaaaaaactaacacagacacacctgcgctccaccagctttgagtatgtgagtaacaccagccctcttggcgcaatacagaacctcctgaaacaagattaaaacataagctcagcagtaagataaatgtaagtactatcggatattcccagggaaaaaagacagctcggagtactaccttacaaatgcttccatccttacttggtggagttgcaagaacaactgttttacatccagcaatttgagcaggctgagagagaagtatagggtaaggaaaaagaagacaagattattacaaaattacaagagaaatgaacaagcaaaagtataaaacatgagaacttacaatagcaagcatcaaagccgttgatggcaaaacagctgttccaccaggcacataaagacctacagagccaatagatcttgacacccttttacatctgacaccctaacaaagttcacgactaaagattagtgtgaagaagacttaagaacgtaatgtgtaactaaattgacttactttcatattctcaacgcttttctcagttgacttttgggctaagtgaaacgcatatatgttgtcatacgcaacatcaaacgcttctttgacattggaatcgagctgaatacaaaaggcattgacacagagaaaggaaattaatttaacatacaaatgaaaaagaattcaaaacatttatatacaaaagttaaatcaactacctcaggaacagaaagctcagacatatcttccacaactttattcagctggactttgtcaaatctttcagtgtatctgaaacaaaatataatcctcatttccatctcttctagggaataagagtagtgaaaatgaaagacagagaataagtcacttactctttgacagcattatccccattgctacgaacagcatcgataatcgggttcacctgatagtaaaatatgaccgagcttaataagagaagtgggaaaatggtcaacgaagaagaagaagaagagtttgaaagttacagtggcgaaaatagaagagaagtcaatgcgagggcgtgacttcaaactatcaacttgggaagaactaagttcagataatctataagacttcatagagcaacaaacgtatcctgtaaaacgcaattggtcaacaaattcgttcatctatctcacaacttgcttaattaaaccaaaaattgaatcttttcattgaatttcaagtcaattagctaagattaactgaaatttgaaaaatccacatcaattctcaggcgataaagaacaaaacagagagtgaaagaaaagagagtgacctttccgaggagcgtgagttgaaatcgagatacgtggggacgagagaagcgaaagacgagacagattgagggacatctagtttcgattcaccggattcctcaaatcaggacagtgttcgttcgtttgagtttgagtgtcgccggcgacagagtctaaagtcggcgattgttttgtcttaacgataataaaggccttaaaacgtacaaggtttacaaaaccaattaaggcccgtaaagcccattcatctgcaccgctaaaaaaataattgggcctttactgaagcatattctaattttcttatatattaatattttcgccatatttaacactactaacaagaaattatgggcctaattctatatttttccacaagaatgggcctttctgtataaagatttttcgaaaacgtttatgagccaaaggcccacgtacttcttaatgtataggaattaacattctaatcaaatttctatttttccagatactttcgcatcacgttttccatttttttaatttaatatttggaaaaaatattcaacagatttaaaactgataaaatctttataagatttgttccctttgtttaagggaaaatttccttatttttctcgaaccttatatgtgcctaaaaccctagtcgataagcgagagtcgtgtttccttgaagaatgaattcgtgtgatattgttccgatggaagcagagctaagtccaggagccatcgaagagtggctttcgacggtaaagcatggaaagatgacggagaacggaaaacgacgatcggatttgtccatcaaggtgaagagacatctctcggctcttggttgggtaatctcttactataacaaaaggaacaagaaagagcagcgttataagtctcccaagggaaagtggttctactctttagctaaggcttgtatgagttgtgtcgaccaagactctcaacagcaactacaaattgttcccaaatatgacttgtcttgccttccaagcaatattgcctcagagtctagttctgatgtttcgaatcaaaaacagaagaaaagtaagaaaaggggtagggtcgaggatttggatgtcaaaagcacagctccggaaaaagataatcatccgtctgctgatttgatcaaaatcgttccaaattttgatgtagcaaaacaacaacaacagaagaagataataatgaatagagagggttctgatacggctgtgtttaatggggaccaagagaagatcagaatcggtctcaatgttgatgtaatacatgagcaacagaagaagagaaggaagatggcgagtgaagagataaggaggccgaagatggtgaaatctctgaagaaggtattacaagtgatggaaaagaagcagcagaagaacaagcatgaaaaagagtctctaagattctgtagaaaagattgtagtccggacatgaactgtgatgtgtgttgtgtttgtcactggggtggagatttgcttctttgtgatggttgtccttcagcgtttcaccatgcttgcctcggtttgtctagtcttcccgaggaagacctctggttctgtccttgttgctgctgcgatatctgtggatcaatggaatcacccgcgaacagcaagttgatggcttgtgagcagtgccagagaaggttccatctcacgtgtttgaaagaagactcttgcattgtttcgagtagaggctggttctgtagtagtcaatgcaacagagtcttttccgcgcttgagaatctcctaggaagtaaaattgcagtaggcaacgacggtgatttggtctggacattgatgagagctccgaacgaaggtgaacactatgatgatgaacaaatctccaagctagaatctgctgtcgagatacttcaccaagggtttgagcctaccaatgatgttttctctgggagagaccttgttgaggaactgatatacaggaaagacagaactggagtgggccgcgggttttacacagtcttgatcgagagaaagaacgagcctatcacggtggcagcagtgagagttgacaaagatgtagtcgagatccctttggtggcgacattgtctagttacagaagaagtgggatgtgcagagtgctgatggatgagttggagaagcaaatgtctcagatgggagtttgtagactggtcttaccggctgcaaaagaggttgtgaccacttggactgagcggtttgggttctctgtaatgaacagttcggagcggctggagcttgtgaaacatggaatgcttgattttgttggtaccatcatgtgccataagtttcttcagaaggaaagagcagaaaatgattctgcagaagagtcaagtctcacagaataacaagtctcctggtttttgtcatgtaatattgattgatcttaaatattggggagaaaatgtgtagtaaacaactcttgatgtccatatataattggtacatctttgtttgtctttaaatgggtgagtctgctttaattgaatgtgagttatatcaaatcaaataattggattcattttctctactgtttataggatttgtatatgaaatctttagagaaaccaagacaatgcactaactcgatgatgctgaaactctactcacacttgctcaatctgaggtatcaatttcctttctatctgtcactgtcagacactaaaaacacaaagacccaccattgaactaaaaaacattgccataaatcagacatgcataaatgaatcttaggctcatgccgcagaaactaaagctatcagctcatttgattctaacatcgctctaaacaacttatttattggatacagtgaatagtaagtccagagctcacagtaaaacagagagatgatcttaacattgtactctgttatttcttttttgttttacaaaagtcaaaagataatcagatgaataaggaagaaaataagcttcaattcacataaccaaagtattgcaaacattgaagaacacacaatttacaaagaaccaaatcgcacaaattgattccttttgaaaccaggactcatcactacgtcatttgccactgcaattcatagcaaagataaagctgaataagcaaacttttaacttgatgatgatacataaattgaggaaagtagttttaaaaaccttaagaacaggctctcctttgttagtatttgcagattgtttagccatttgttgtaattgagcttgtgcagctcttccagctgcagacttatcaaactgctctttcctgcgttaccaaaccaaaaattaacatccatatatctacaatttcaaagtttaggatttcaaaggaatttaagattctaaaaccctgaaggatcaatttttcaatagaggcgaagagaaaagagataaaaaccgtcgctgggcagcttcggcggctttggcacgagcttcggcggaggcttgtctctcttcttccttacgctgttccttttgggttccgtcgaagcaactgaaacaacccatctacgatcagattgatttgatctcttcttcgcttctgatttgaagtttaccgaagaagaaagaagacgcgtcttctgcagaataatttagctctttttggggattcttattttatattaaaatcttttacattaatgatttatttattaacccgattaatcaacaaaagctaattagaaaatttgctttatcatttatgcactactaaataaagttttttatttatttatataaaatgctattgaatcaacaactttgctgttgtttacgtagtaaaatctaatattgaatcaacttatgtagctgtttatgtctctgtcttggtactaaaagattcttaactttctctgtttttgtttttgtatgctaatgccaatggtctgattcaagaactcgaaaaagattaaaaaaaagaagaagcttaggttacgaggaacaaacacaatcagtaactcaaaactgttttatgtgtctatatacataaacatcatattcttcttcaaaacacacacagccaatagtccttgtttatgtggggaccaaagttgtttatgagtctgagtgcagaccagaactacagcttcttttgtccgaggaagataatgattcctttgtcatgaatctggaaattatgagtctggcaatgttctcaccagccactgcacttgtctccattgtgcttgccgcgttttcaaaagcattcacatagtacaagtgatggtcatctaatatgaatggtgcgaaaacttcaggcgcgtggtactttgggtatgcaccccagtctattcgaacggtttcggttctcctactgtttaagaaagaagagaaattgaaccagttttaatgaaactgaacagatgtgcttcaaatctgacagagattgtgttgtaactacctgaagagctcatcaagcaacgaatctgatgcaggttgtcgcgtaaaaatcttgtatgtcatatctgttttactatatttccttagaattgagatgcatgagaatggaattagaggatcttcaagggttcccaccaaagctggaacatctgaaagcgatttcatcccaaagtatcccttttcatagagaaaacatgatcacacattagttacgagtcagaatcatgatcaggataacgttaaaactacagacagtgattgatacttactgggtttaaaagccccctcacaaatgtcgtgtgcgtgtgttgtagttctctcttaggaattgagatcgtgggtgagaactgaatatccacttcgtctaatggtgtggcaactactgtgacatcacacttgtagctgtttcctttagtggatttaagctcgtaatggttttcgagatatgaaatggattcaattttctcgttcaggtgtaacgtaacatctgaatgattaatgagctttgcagccatctgccagtttccaccttcaacagaccataatcctccacctgaacccgccaaagagacagcacctgccaacccactgatgagtacactctgtccatagtttatccttgtaataacctggagaaacacaataaacacactcaaaattgtaataggatgataattggcaaaagttgttaaggagaagagttatatgttgaaccatataagcaaagaagagattaaaatggcctttgaaggacagtattgtaagaaagattaccgtaaccagctcgttgactaacaaaggagaaagctgagcttcagataatttctcctgtagagtgagctttgtgagattgtacaagcctgaccatttaagcatcccttcaacattgtcgaagataggtcttgactctaagctttcatagtacttcaagaaattatcaactgtattctacgaacataaaaaatcaacatcagtcaacatacaaaaggatccacacacacacacaaacacaaacctagatgcaaaatcaagttacgaaaacatcctcattgctagctaacaaattaaaatcactttacaacaacaaactcattgttcaacaattgatagccaattctgaaatcaaaaggttctacatttaaatacctcaatgaagctgctcattctcagcagtgataacccataacgtaagaacaagtagagatcattcacccaagagacgatcgtatccaaaaacggaaatttggtaccggaaccgaatgtcttgacgacaaatctcttcccatcccagattccaatcgctgaagattcttcaatcggcgtcggtaatcgaaccgtcagattgaacctttcgacgaaatccttaacgtggtagttcttcggatggagaatcgaaccgccggcttcgaaagtatcaccggcgacagtgacggtcctcatgcgtccaccgactatctcgtgacgctcaaacatcaggatc

SEQ ID NO: 956 - DNA, 52717 bp, Arabidopsis thaliana
ttggcttgatttaagccggtggaaacagagtagttacggaggaagtgagctacggatgagcctccgatcccactcccgacgatacatacggtcgctggagaatcatcctcgacgccgccggtggaatcgccggagcaaggtagaagaaccggcgatagtagagcgaacagaagggagattgctatcgggaaatctttcattttagtcaacgagttgactttatcgctctctctctcgattgtaaattatcaatgaggccttcttgggcccttatcctatcggactaactctatagtgcataaaggaaaaatattattttgttttatttatttattttgcaagtgttctaaagaaattgaattaatctcattaagctcaagatctatattctatacgatttaaacatacttatcatatagtcatatatcataagaagctaaccggatccgagtccggttttgattcaatttcaattgtgagatcaactttaaccgaattattgaagcccattaaaggcacaaatttccacaactgttcggtcagtgtctcagtgacaccaccaatagtagctaggctatatcataagagcgggaaaattcgcctactgaaaacaaaaaaacgtaattactaaccgttagggttttctttaccggcgatgtcgcgacgaggcggtggccccgtgacagtgttgaacgtggcggagaagccgtccgtggcgaagtcagtggcggggattctatcccgtggaactttccggactcgggagggtaggtctcggtacaacaaaatcttcgagttcgattacgccatcaatgggcagccgtgtcgtatgctaatgacctccgtcatcggccacctgatggagcttgagttcgccgatcgttaccgcaaatggcactcctgcgacccggcagatctgtaccaagctccggtcatgaaacacgttcccgaggtaattctattgtatgtgtgtgcacgcctaattgatttaatgtcccattgtacttgtatgcttttgtatagttctgggttgttgatttagtcattgcttctctaactaggaattgttgattgggtctgatttgttttggtaattgcaactgtataaaacgggactaggatctttgattcgcctttataatgaagttggggttttctgacttgcaagttttatttaattctggtgttgagtgaattaggacaaaaaggatattaagaagacattggaggaggaggcaaggaaaagcgactggcttgtgctgtggcttgattgtgatagggaaggtgaaaacattgcatttgaagttgtagatgtttgcagagctgtcaagcataatctttttatacgcagggctcatttctctgcgttaattgacaggtagagattgctttacacgttattcctcatatatcttctactaagcactctatttcaaacgattgaactgattccaatgatgtaattgctagggatattcatgaagcagttcagaatcttagagatcctaatcaattgtttgctgaggctgtagatgctagacaagtgagtttctcctgaaatccctcttctgtttatgtgttagcagtatttcctaccgaatttgtattagctaatgtttttttcgaaaactttaggaaatagacctacgcattggtgcttctttcactagatttcagactatgctgctgagagataggtttgctattgactctacgggtgaggagaggagtcgtgttataagttatggtccgtgtcaggtaatgtgaaaccagtatcgataagtttcagaacaatctgtcccattttacatatcagagccagttaatgtagctagatttgatatttctctgcttcaactgaagtttcctacacttggctttattgtcgagcgatactgggagatccaggcacatgaaccagaagagttttggacaatcaactgttctcaccaatcagaagaaggccttgccacctttaattggatgtacgattttcaactgccttccttattgttgttcccaatcttcttgaaagttacattgatataatttctattgcaggcgtggtcatctcttcgattatgcttcagctgtcatattatatgagatgtgcgttgaggaacctactgccactgtgagtaaaaaagaaacatcttatcagacggaattatatcatctgacactccatctctagttaacattgtgtatttactttataatctccatccaggtaatgaatgtcccacatccaagggaacgattcaagtatcctccttatcctttgaacacgattgaacttgaaaaacgtgcttcaagatatttccgtctgagttcagagcacaccatgaaggtctgaatgagtatttagattggttaagatactttctatgattctttggcctattaggattgcatgttcaacataatctaaattctgttctctcttggtagagttttatgctgtcgtataggctgatatgtctttgaattacaattacatctctcttttgttaaatgacatcaaaaatgtctggacaggtggcagaagaattatatcaggctggtttcatcagctatcctcgtacggagaccgattctttttcgagcaggacagatttacgtgtaagtaacttttttctcatgagccagtaaggttagtttggactttatcatttcctttgatagtctcttaggatctctagttgtgtgtaggctatggtggaggaacaaacaagacatcctgcatggggatcatatgcacaaagattattagaacctgaggggggcctctggagaaaccctgctaatggtggtcatgatgacaaggctcacccacccattcacccaacaaagttttctagcggagagtctaactggagcagagatcaccttgtaagtatggctgtcagtttggtttaacatacccgagcataggtatatgtttctacgttggagccaacattcttttccactatttcagaatgtatatgagctagttgtccgccattacctagcatgtgtttcccagccagcagttgctgctgaaactacagtcgagattgatatcgctggtgagcgcttttctgcatctgggagagcaatattagccgtaagactcttcactctctacttttttgtcgtaatttctgtggaataaaatgtgaaactactttgattgattagatgtttcctgttttggtagtataaaatgtaaagctgctctttgttgcaagcatatatattgcttactttcccttcaataaataatttgatactgacctaattttctttgtgtgactagaaaaattaccttgaggtgtaccgctttgaatcatggggtggttcagtgattcccgtgtatgaaaaagggcagcaggttgtttatttctatatctcagctaatcctcttttgaataaactactttgtccttgcttataagttacattacttaactactaaactataatgcaattgaacggcataactttgcattgtagtttctagttcaaaaactggtgtcatgattattattaaagtggcccaaacaaatagtaattgctacaaatttggagaaccaaacacagtttgctttatctgtatggacgaggctgcttgtttattggcataaaactgtgcccagggagctggctttctagtcaaatcctgacagtcttatatgtttaaatctactggactcttcctgagacataatggggcttatttaagtggcttacattttttccccaaacaggagcctgtctaactgctaaaatttctgattcacattcacttcttggatttgttctgtaataccgtactgcttagttcttacagcagggacaatcaatgacatttctgaatttcttggtaatgtgcagtttatcccaacaactttgactctcgatgcagctgtaacaaggccaccaccactattgtgtgaagctgacttactgagttgtatggacaaggtttttaaaattttcttgtttccccttcctttcgtggtggtgtttgcatactcttgttcacctacccctacttatcatccgattatgtttgtaactctttattatcctaccttttgtgaatgttaggcaggcattggcaccgatgcgacaatgcacgaccacataaagaaactccttgatcggggttatgcaacaaaggatgctaatacacggttttctccaaccaacctggtagctgatatgatacataagctttatgaatttttccctttgtcttttttttatttctatactctgtatatttattttaatctttagagtgtagaattatggcagcatgaagattagggttacaactgcttttgggcgttaataacgcctacacgttagaatcaggaactgcttgtgaccatatataagtttgtttactagaccaacatcatacctgtagcttcccaggatctttcattagctataaggttgcataacataacataatgattatccttggaaaatatacttttatctcaaacttcagcctagacatatattggttacgttttctggtctctagactataaaaacatctttatgaactttatctggttatagcaaaactgtgtatctatatatagtggtagtattgtctgaactcttaagtgtataaaacatctaaattaactttattaactggagttatagcaagactactctccctgggataatttgatatatatgttcttagcccttatatgtctgttcagcgtttctgaagttagcttactgtactgatttcatttcagggtgaggcgcttgtgatgggatatgatgacatggggtatgtataagactgcatgtgatgtactacaaattttccttacgtttcaaaaaacttagagcctccttcatatatcattatatatttgtggctttcaatcatatttcccttctaatcagagtaaactgattaaagaatttatatttttatgttaagagcctatctatttggagagacctcatttgtatcaagccccttttgaagagccctctaagactttgatgtctgtcagtcttcttgttgccaatcttttgacgtttttctctcaggtatgaactttggaaaccaaatctcagagcccttatggaacatgatatgaatgaagttagcgttggcaggaagaccaaagctgaagttcttgaaacatgtttgcagcaaatgaaagcttgtttcttagatgtgagtcagctgttttttattagactttttgtcttctctctgtggccaaatctgttattgctgaaggtgctgctaacacagtaggctggaactgaatgccgtgtttttctaattgtcattcacaaatttaattctcgcaggcaagagtaaaaaaatcaaagctcctagaagcaatgacaattttctttgaaaggtagtctcgttactttgttcagtactgtgtagctgaagtctatttcttcgtaatataatatgatactgcatgtgcagatctaataacactgatgagagtgaaagtcagacagctggtgaagttgtccgacgatgcaatctctgcaatgaatcagatatggcactcaggaagaaccgggtatcatatattctgtctgaacaaaattttctctgttctccctattgttaatgggaaccacaggttaaacgttctattccctttctttgcaggatggcaatttcatggttgggtgcatgaattatcctcaggtcagaatttcaccgctctttacataccatatatattgttggaaatttaaactttttgctctctgtattgtaaccttatttctgaagattatgatctaatcatttgacatttcagtatttcttcgtttatgcttccttgcttacatctattatattaatttcacacattttcctttctctagtgtcggaatgcagtctggcttcctggaccgacattggaagcatctgtcactactaatgtttgtcaatcctgtggtccaggtatagccacagattctccagtataacagtgaattgaatttcaaaaactaaattacacttggatgacacagcgtgtacatgtgtctttctgtctttattattaaatggtgcctttctctttctgtaggcccggtctacaagatacttttcaagttccgtcaaattggaattccaccaggctttgatgttaatcacttaggtaaaaaaaattgcagccaatttgttttcttgtttaccaggctttgatttttttaccaggctttgattttaatgtcatcacagccaccgtgccaatttcatcgtgacttcttctaatatgtcctatggtaatgttgtgatcaggttgcgtgggtggctgtgatgacattcttaaacagttgatagacatctgtggaactggatcccgttctcaaggttagtgctttgttgttacgcaatacatatacctttgtattagacatcatacaatctttctttcatcatcttctgtcctaaatgagaatgcaagaactttagtatagtgtcttgcgaatagagaacatttaggctaaaaagaatcaatgatttgttcttgcagcaaggagaactccaggtactgcaccgtcaaacaatatccaaggaagcaacacaagacagagtaatgtctgcatacattgtcagcaacgaggacatgcttccacgaattgtccctcacgggttccagcatctcgaaattctcgtcctactgcaacaaatccgagaaacggtactgatccttgtataatagtttagcaaacaaagatcatcgattagcttttgctagtatgtactatatactagtcaaaattcaagcaaattgtccagaccaagtcttccttattgacatgtaatttatattctagtattgttggttataatgcagatgaaagtacagtatcatgtaacacttgtggatcacaatgtgttcttcgtacagccaacacagaagctaacaggggaagacaattcttctcatgtccaacacaaggctgcagtttctttgcgtaagagtctggttttaccccaatttcttcgcataatccatttttttttccttttacatcactcaacacatcagttttttgtttgcactgcttgtaaacagatgggaagatagcataaacaacagtagtgggaatgcaacaacagggtctaatagcggcgggagcggtagacgtggcagccgtggtcgtggccgtggaggtagaggcggccaaagcagtggaggacgacgcggctctggaacaagctttgtctctgcaactggagagccagtgagtggtataaggtgcttctcatgtggcgatccttcacattttgctaacgcttgtcctaatcgtaataactctaacggtaactatttctaagtctacttactacgaactttgactatgtatgtagcatgattaattagtgctactaacttaatttgggtttttgtattttattttattttattttatgaccactttttctctggaattcatcctaatttgcgtagatcactgttagctggatattttaaatataatatttcacgtgctattctgaatcactgaatagtttccacctattttatttataaatcttgaatagtcgtttttaatttttagttatgttcttagtgagctaatgtggatccatatttcatcattttttttgtattgtctcataattcataattcatacatcaactatatcactatgtatatgccattgatcttgagtctagacatggtcaagtaatagatattaacaaaatgcttaagctacaaagtttagtcctccgaatttgtttttagagatggtcaagtaatagatattaacaactgttaataacacaaaccacagtcgttttgctctgtaagaaaacgacacaacaaccggaataaacgccgttttgttgtttaaaaacggcacaccaattttcagtccattttgaacataaaagatttaaaattctcaaatcgaaattgagataacagaggatccggcgagcttctccggcgtaggattcgggtcattttcttcggcaactatgaaagggaaaaaaagagagagagaggtgattactgattaggccgtctcctgtggaacaagaacgcgtttcttcttacattcctcatcgaaggagttgttgtagccacttgaggtacttttcatactaatcttggaatttgtatagcttggttcggtatattgaacagtcaattaggtatcttgctgtgaatgatcaagtgggtacttatcattgcctcttcttagtagtctcattacaagactgaagtttggtctcaaaattgacaagcttctcgaagcatttgtccttggactataacttatagtcgagcttgttgtcccttctccagttgttatcttggttgtcgtctgtatatagaagattaaaacaactgttttgcttggagtataattgatactttacaatagaataataatgcacgaaattgaggtcgtgagagaatgaggaaagccaagttctcatgccatgtcggccatctctatcttgttgatttgagtacttagagtctattatagcttcaaagttacaaaaaggaccatcatttttaagccttgtagttctcactttgactaattcatggcttactttatttgttgcttcaaagacaaaacgaatattgagtttcttttttacttgaaataaacaaaagcaaagctgataggcttctgaaactaatattaaaagacaggccagtactaatagaagacttttttaatgaacaaatttcaaacttcaaagctttcaatgatcaaaaaactaatcatagcttgaccatttcctttttatattgttttcctggaaagaagaaaaaaaggtctgcacctcttctattctctctttttcctttcctgaaaccagtttcaaaggttgttttcttgcctagaattttcatagctatgtgtcttggatccagatccatagtttagtagggcctgtattcttctttcaaatatgcttgttatgctacatgatttgagtttttttggatggttttatggtatgtagtctttaagagatgtacaaagtgaggtttttgcagacatgattacatcttgtttgatgtcttctaatgaagatttaagggcttctgtgtatgcatgaatggtaaaggaaatgatgaagcttgctgtttttttcatatctcttcttcttatccttctgatctctgagacaacagggttgaacttagaaggtcaatatcttcttgaaatcaagagcaagtttgtggatgctaagcagaatttgagaaactggaattcaaatgattctgtaccttgtggatggactggcgtgatgtgcagcaactattcgagtgatccagaggttttgtccttgaatctgtcttcgatggttctctcgggtaagctatcaccaagcataggtggattggttcatctgaagcagctggatctgtcatataatgggttgtcagggaaaattcctaaggaaattggcaactgttcaagcttggagattctgaaactaaacaataaccagtttgatggtgagatacctgtggaaataggtaagcttgtgtctttggagaatctgatcatatacaacaacagaatctcagggtctctccctgtggagattgggaaccttttgtctctctctcaactggtgacttacagtaacaacatcagtggacaattgccccgttccatcggcaacctcaagagactgacaagcttccgagccggtcagaacatgatctctggaagtttgccttctgagattggtggatgtgagagcttggtcatgcttggtcttgcacagaaccagttgagtggtgaattaccaaaagagattggaatgctcaagaaactttcacaggtgattctttgggaaaatgagttctcagggtttatccccagggagattagcaactgcacaagtttagaaacccttgctctctacaagaaccagcttgtcgggccaatcccgaaagagctcggggaccttcagtcgctggagtttctctacctttacagaaacgggttgaatggaacgattccaagagagattgggaatctctcatatgcaattgagatagatttctcggaaaacgctttgaccggagagatacctttggagttagggaacatagaggggcttgagcttctttatctttttgagaaccaactcacaggtaccatccctgtggagctttctactttgaagaatctatcaaagcttgatctctccatcaatgctttaacgggtcctattcccctgggatttcagtatctaagaggactcttcatgctgcagctgtttcagaactcccttagcgggaccatacctccaaaacttggctggtatagcgatctctgggttcttgatatgtccgataaccatctcagtggaagaattccaagctacctctgccttcactccaatatgatcatcttgaacttgggtacaaacaacctctctggcaacattcctactggaatcaccacttgcaaaactctggtccaacttcgtctagccagaaacaacctcgttggtcggttcccatccaacctgtgtaaacaggttaatgtcacagccatcgagttgggacagaacagattccgtggttccatccctagggaggtcgggaactgcagtgccctacaaaggctgcagctagcagacaatggcttcacgggggagctacctagagagattggcatgctttcacagcttgggaccttgaatatctcatccaataagcttactggagaggtcccttctgaaatcttcaactgcaagatgcttcagcgactagacatgtgttgcaacaatttctctggaaccttaccaagtgaggtaggttccctctaccagcttgagcttctgaagctctcaaacaataatctttcgggtacaatacctgtggctctagggaacttatctcgcttgaccgaactacaaatgggtggaaacttgttcaacggtagcattccacgggagttgggcagtctgacgggtttgcaaatagcattgaacctcagttataacaagcttaccggagaaataccacctgagctcagtaatcttgttatgcttgagttcctgctcctcaacaacaacaatttgtctggggaaataccaagctcttttgctaatctctccagcttgcttggttacaacttctcatacaacagcttaactggtcctattccacttctccgtaacatatccatgtctagcttcatcggtaatgaagggctttgcggcccgccgctcaaccagtgtatccaaacacagcctttcgcgccttctcagtcaaccgggaagcccggaggaatgcgttcgagtaaaatcatagccattactgcagctgtgattggcggggtctctctcatgctgattgctctcattgtctacctcatgagacgcccagtgagaacagtcgcttcttctgctcaagatggccaaccatcggaaatgtctttggacatatacttccctccaaaggaaggattcacgttccaagatttagttgcagccactgataatttcgacgagagctttgtagttgggagaggagcttgtggaaccgtctacaaagcggttcttccagccgggtacactctagctgtcaagaagctggcatcaaaccatgaaggcggcaacaacaacaatgtggataatagctttagagcagagattctaactcttgggaatatcaggcaccgtaacatcgtcaagctacatggattctgcaatcaccaaggatcaaatctgcttctgtatgagtacatgcccaagggaagccttggagaaatacttcatgatccttcatgcaacttggattggtctaagagatttaaaatcgctttaggtgcggctcagggtctcgcctatttgcaccatgattgcaagccgagaatcttccaccgggacataaaatcaaacaatatactgcttgacgacaagtttgaagctcatgtgggagattttggactagcaaaagtgattgacatgccacattctaaatccatgtctgctattgctggctcctatggctacattgccccaggtaaagtttttgcttttgtttgtgcaattaagtatccaatgagggaactgaaattaaactgttttaacaactttgcagaatatgcatacaccatgaaagtgacagagaagtctgacatctatagctacggggtggttctactggagctgctaaccggaaaagccccggttcagccaatagatcaaggaggagatgtggtgaattgggtgaggagttacataagaagagatgcattgtcctcaggagttcttgatgctcggttaacgctagaagacgagagaattgtctctcatatgctcactgtgttaaagattgcacttctttgcacaagtgtgtctccagtcgcgaggccatcgatgcgacaagttgttctcatgcttattgagtctgagagatcggaaggagaacaagaacatttggatacagaagaattgacacaaacaactaccccatgacacaatacacattcttgttgtatcttcttcttttttcacacgagattattcttctatgtaaccatggcgaataattattgtaaagtctatacgcacgcagctatatcaaaagatataagcagtatctatatctacaagttaccgttaggtttaattaattagtgttaatccaatcattatccatgggacccaaacggtaattaccgttgtctttttagtatgaacaggtaaatagtagtactctctaacattggatattgtttttggtcattggatcatttaatagatcataatttaatactatggaagtatccatgttataatcaacttgatttttcatagtgattaggtctataaattattgttaatttaatgaagacaccaataataatacggtcacttttgctctggaaatcataattagcgtagatcacggttagctggatttgttataaatataatatttcacgtgctattctgaatcgtgcccaccagattatatatctaatctcttctagtttttaattttagctatgtggtagtgagttaatgtggatctgtttttctcaatattaattttgttaaataattagtcctcttagtcttcacttctctagggatatgattttaaatcaaacgaaaagattcgagtcatactaagacttattcgtacgccatgaaagtttgaaaggtctttttttccttttcttcaaactgaaaattcaaaataaaggataggatatgaataatcgagaagttcatctttaagtaaatgtgattaatatcttagttataatatcataatgccaaacattatcttgcgtgtattaacaatatcattatggttagaattgagattcgttaacaatactcgaatcactatgagatctttagcgataggatgatatgtgtattcctaactcgatcatgaactttaatatgtgctagaaacatctaatgtagtttctgttttttctttgtcgttcccaaattccaatgtaaataaggtatctaattacctcataagataattcctagtagtctaatttagaatacttctttaacaaaaaaaacatccaaatatatacttttcacaatttctactgaatgtagtgtgttggtaagttatgtaacaaattattgaggaaaaccatcaaaacaactgtaaattaaaaccacctacaatataagaagaaacattaggtctcatcttttattttgttaaaacattaggtctcttcaccgacggatctatttgtgtcctctacttttagccattctttaagaaaaaagaaatgaaaaaaaatgagggaattggctaccctttattgaaaatgaaacatgcatgatttgttttcgttagagatgagaaatataatgacataataaataagaatccaaagtgaagaagaagttggaaaacaaaaaaaaaaaaaaaagagagaaaaagattcttttgtccattaaaagagaatgaatgataacgatgtccattattattctccgtcctcgtgcttaatttaattatcttcccctctttaattaaaactaattaactattagagaacaataaataattaaatagtatagtaagaatcggatcgtaaggtaaatcaacggctgagattcattcaaaccagaggacacaaaacatctcttctctctctcccactttttctcccggagacagttaacgtgattcgcccttttctctttgcccaagagctatacgacaatacctccaccacaccccacacacacacacgagagacagagagagagagagaggaaatttgctactgagagatacattcagtgagtgtgtgtctgtcaccgtggaggagaaacggaaggaggatagatgaaaccgaccggagaaggaggaggggaagtcgccggagcggtggcggaaggttcggcgttgttaattgtaggagtaaagccagatgaatggagtagagaggttcttacatggtctttggtgaatgtagcgcgtcctggagatcgaatcgttgctcttcatgttctcgattattctctaggtttgtttaaaccctcgatctgagattattctgtttgtttatttgtttctaattttgatattttttgttggttttggtttgtgtagagggctcaacgtcgcttatttcgttggttaggaattttgatactatgcttggtgtttatgaaagcttctgcaacttaaaacaggtaaaaagtttctccatttatgaaaatttgtcatgattttaagtgaaatttgttgtctttagggttggattaagttttcttaaaactgaaatttgattgatgttgtgtaacaggtagatttgaagttgaaggttttcagagggaagtcagctaggaaagttcttgtacaagaagttaaatcgtgtggagctacaagtttaatcgttggttcctctaggaaacatcacactatccgttcttcagcttctttagccaagtattgtgccaggaatcttgccaaggatgtctctgtttttgctgttaaaagtggcaagattatgttccgcagagtacctaataccaatggtatgttaccgcattactttctcacggtaatggtggtttgttctctgttagttcttaaggtaaaggtttgggctttgcaggtgcagatggtccacagatgaatattccctctttagtttgtggatcaccagatattgctattgaagcggcaaagattggaaacagttttagccctgctagaacgagctcacgctggacaagaactagtcgtagttcgtcattgcagtctcctgacagcttaggtgtagacaatttgttggctttagtgccagtacaaacaaatgagactgattctggttcccttgagtcaggaccaggttggcattttcttcgcgggctttacggtaataatcgaaaaagctggaccaaagtttctgctaagaaggctgtacttcagtgggtttcgaggctgcgaggtcggcattcagaaactgtaatctatctggataggaaacggagtgactctggttgtgatgaagattgctcttctagtattgatggtgaagatgtttctatatcacggtttggttctgagcttatgcagtcacctctttctcctttcattggatcaaacaacattccagaagagctggaaggtctacatgaaaagtactcttccacatgtagattattcacatacgaggaagtcttgtcaattacctcaaactttgcatctggtatgcccctttatatatgctaacatgagtttagcttgtgtctgacttgatattcatccttttgctttatgttttctgtttccagagaacttggttggagaaggtggtaatagttatgtttatagaggagatctaccagatggcagggaattagctgtcaaaatattgaaaccttgtctggatgtgttgaaggaatttatactggaaattgaagtcattaccagtgtacatcacaaaaatatagtatctctctttggtttctgtttcgagaataataatttgatgctggtatacgattatctaccacgaggaagccttgaagagaaccttcatggtaaataaactacatttgatattccctctggattctcatactagagaaagatccatcgtcattgttctcatttcttgaatcaggcaatagaaaggatgcaaagaaatttggctggatggagagatataaggtggcagtgggtgttgccgaggcgttagactatctgcataatactcatgatccagaagtaattcaccgggatgtcaaatcttctaatgttcttttggcagatgattttgagccacaggtactgctacatcacaatcttaatctgagttcattcacagatgcaatttttacacaagtttcctgattgacattaaattatattggttcagctctcagatttcggattcgccagcttggcttcaagtacctcacagcatgtagcgggtggggatattgccgggacatttgggtatttaacttgcttcgttacaccatctcttaaaaactatcaccattccatcaatctgcctcttaactttcttctttctttgacagttacctagcaccagagtacttcatgcacggtaaagtaaccgacaagattgatgtctatgcttttggtgttgtattgctcgagctcatatcgggtagaaaaccaatctgcgtcgaccagtctaaaggccaggagagccttgtcttgtgggtaagcataattgtccacaaactcacattttctacttcataccgttattctgcctattgaaatcagattataggaagcaatgttactcttccatgtccatatgaaatgacttaagttgcatctctttcccaggcaaacccaattctagatagtggaaagtttgctcagttactggatcccagtctagaaaatgataacagtaacgatctaatcgagaaactattgttagctgccacgctatgcatcaaacgcacacctcatgaccgtccgcaaattggccttgtaagcatacgtgtcatttatcttcttggtttgcaatgaatccttattctttgctcctcattgctctctttcttttgggatatattcttatttcaacctcaggtcctaaagatattacaaggggaagaagaagcaacagagtggggaaagcaacaagtgagagcctcagaagacgtgagcgcatatttgacaaatatagaatcacacataaacctcgcattgcttgatttggaagatgatgcagcttctgatagcagccctgaagctagtagtatctctgttgaggaatacttgaaagggcgatggagccgcactgctagcttcaacttcaactaataatttttactagtttaaccccgaaaatcccaaaatttgacgatattgtaagttgtgtaaattgtaatcgattttctgagattctcaagctttaagttgtgtcaatttaggaagagtgaatagctcttgtagagaggacttaagttggaatttgtcttctttgttttgtcagagcagaaaatgtttcaagtgttccactttcatatcggttttaaaagtttaaaaatgtataagtgttccgattcggttttaaggttcagttttataattttagtttacttgtaaaaaccacataaaaaaataactaacttgaatggaaaagcatacaagaaactcaaagagaaggctgaagcttatccttgtgtttgggcttcttataatattgttgtctacggtggtttttttgatgtggacagcttatagatggaggaaacgtcgtaagaccgaagatagagttcgtgttcttcagacaaaactttctaaactcgttaaagaatgataaccagctgtttgaattcttggtagtttggtttgtgagaaatcgatcaaaacaaatgatctttttctgaatgtggttttgtaattaacaaagttgaattttgtttggttagataagggagctaacattttgctctcactttttcatggttgtttttgttaacttcttttaaaaaggaccgaacaatttttttttttttttttttgtcaaaaaaagaccgaacagtatgtgctgaaatcttcattttaccgcggattaaagtttgggtttgagaaaagataaaatctggcttcgcacactcctttgcagcaagtcatatggtaattgacttaccaattcaaccaaaccaaattagataaggaacaaaaaaaaaccacaagtgttgcaatgatggtcgtttgcatttcttgcatcttgacttgtatcttactctacagattcaatcctttttgcatcttccgacttatatcctcctccaagtcaataacttgaggcatgttgatcctttctgctgctttcatgtctttcagttctcgagtcaattcagcaatctgcttctggatttttgcccctccatcaggtagccttgagaccgtaccctatgagatgaaaaatgaaactcaaaacagagacttcgagataatgcctgagaagctttctagatgttacaatgaattggtgtcattaccttgttttgtaatagcatcgtcaaacgattgagtcttgctttaattacgctttctgacaattccttgtcatcgactggggaaatgttgattctcttgtccaaattcacatcctttggcttgaaagcatagtcagccctgtcagaagcagttttttttcaaatctatgagagattatacaaaacaacacaacataaatttgacacaaaaaaagaggctgttggtggtaatacccattgatgacggtgtcttgtgaaatacttgctgatgcgcgtcccaagagcaatgctgtttctctcctttttaagtaagagaacgcatcagaaactgagattgaaagatgaaagaaaagtgttttataactaaaaagctggtttggagacagagtcaccttatttgttcttcttcatctttctgtatcgcttgaataggagctgtcttggagaaaagtaagctatggtggctaactccagctataccaagggtttcgagaaactttacatgggattccagtttttcatctctgtaaaaaacaaacaaagataagtgaatcgaaataaaccatcatgacacaatttttgctcagaattcagtgtttgcttacagtttgatttggttatagtgctcttcgtatagttgctgttgtgtaggtgaaacatcaaagcctcccttgggaagactaaaaagttctcgaaggtcctaagagagatatcatatggtataaagatttagaaacgaagaaaagaaaagctagaaaataattagactgctatttacagcagaattgaaattggacctgctggctgaagtagcggatttgttctttatgctcagttgcagttttaaacaatcctcccttgtatacctaaagatgcatataccaacagcattatataatacaaattatcatacatatcaaaatcactcagctatgaaactaagagaggaacaaaaatatgtcacagacctgctttctgtatatcttttcttcaacagttgctgaggtcattaacctatatacgatgacatcctttgtctgcccaattctatatgctcgatcaacactctggttgtccgtgctgcatagatatcagaaaatcatgtcacaaaagtattttcaagagaccagaaatatggacagcttccaaacactagttttagactacatcaagtttcacaagcaaggggtaacgcatagaaatgaaagcatacaatttttgcatcatattcaattaagatcatgttagagatccgccaataagcatataaattaaaacaagaagtaagattgtgctgcttcaatttggtaacttgatcttcaacaagctagagatgtagaattttgacagacgagtgaataacaatatattaacaaaaagtctagacttgggcttttgaaagtatagtaaacggaagtaagtaccttggattccaggcagggtccaccacaatcacacggtctgccttagtcagagtaaggccgagaccaccaacttgagaagtcaagagaaatataggagccacatgaccttcttgaaattcctacagaatattattgttttatagaactgttagcaatttagcatgaagactagaaaaaataacgaactcagaaaaaatgaaatgtaatgtgttggggaagagaaaaacccacttcaacagtcttcaatctgtcaggggcttttgttgtaccatcaattcgcaagaaactataaccgttggaggtaagagaatcctgaaaattccatgcgtaacatataaagaatacttcaaatttcagaaaacacgttggagggtaaagtaagtagcaaaacctgaatgagattaagcatcttgcgtgtctgggagaagattagaacacggtgcccctctggaattaaattttcctgagtaacaatgtagaaaggatgtcagtcaaacagacaaccatcaaaattaatgtcactaattgaaccataaatgcgatctaaccagtagcgacatgataaatgacaatttgcaagagatactgtcattcttggtctgaaaatcatctgtatccacattgtccgctatatgcatagccaatctctcagccacgcctgcttcttcttgtgttaatgttgaatccattccttcaaggacatcctcagcagccctcttagttaagagaagcgggtggtcacatattttcttcagaatctgttacataacaaacagtaactgtaagctggcagatatgaacagacaagattttaaacaggaaataaatgcttgaagtgtttataaacagagaggaaaggaagccgccttcccatgtaacatatatcctaatgagaactaggcaaagtgtatagagatctgaaactgagtctacatttatttaacgaatttactggataagagagaacacatggacacatcaaacaataaaaaatacaagaagagagcttcacgttaccgttagagctgctagaggtgaaccatcaaaagctgacagaacaatttcactgtttaagaaagcttcatataattgcctctgcaacaaagagataagtatcagtaattccaaaagacttagaatatttgatcaacgactgtagttgtatgtttaagggttgcacctggcaagctgttaaccgtaaccatacaacaatttcgtccttcttcgaaagtttggaggttgcaccatcatcaccgaagacttcactcttaaggcgccgcaagaagaaaggttgaatatgctccctcaagttctatcaatcaaaaggaggaaacagaaatttttacttgtaagatctgcagcctacagaccgtggcaacatatttcacgagcgaattgataggttttttcttcctaggtgcaattaagcttgcgtacgcataactgttctacggcaatatcaaaaacagtttgcaatctcataagatgcataccagactgtaagcatgatgcatgataatctataatttcatttcttgctatatttatgatcaatagtaatcatagactagagctagattcaacaagacatacgaagataagaggaagaaatttaaaaatctaataaaacttctttcagctacagtacgaaatagtacccactcaagcatattcaaattgaatcctcacctttgctactgttgagcctatcctctgttctctatcagtagcatttttgtcagttccacgaagaatgtaatgctcataattctgcttaaacctgttaaagcttaaagccttagtaatacagagctggtaaatgtactctgacaaaattatagggaggatatgtttaccaattcttgtcaccgagtaacccagggcagctgaagttgaagagagcccacagttcctgaaaatatgaagatggaatcaatagacagcattagaattgcaagaactgaccaacgttaaatgtcatagacaataataccttgagattgttctggattggtgtaccacttattataatacggtgagaacttgggatctcaagcaaactcttcgccctttgtgtgttggggttcttaataagatgtccctagaagtgtaagcggaaatacattttattgatatcagtagggggaaaattcagaacctacactaatggtaacatctcagcgcttgatggacaatagtgcatacacactataccaactattagtgcaaagacctcacaaatgataaaatattgatgtgtttacctcgtccagaatcatgtagtcccatttgtttccatcttcatcatcctcatcagtataatggtcgtcaccttgcaaagcctttgtattgttccgcacaatatcataggttgttagaagaatacctttaccctacaaaagttaaagatattcaagtgggaaacccataccatttttcaaaaacaatcagaaattaactccggaaaaatgatagattatttcagtttaatcaatctaagcaatattaaaatacgcttatataaagatgatttactagaggaaggggcaacattgtcacaaatcaagtgaaaacgtaaatgaaatgcagttgtatagttaatgtatcagtgagatttctcaggagaacaatgaaagaaagaacatgaacctgcagaatgtggtggagatcatattcccgggctttcgtagaagtaccgtagtatctgtaaaaaggaaagaaagacaatcagtatcactaaaacactagttcagtatatacaaattaaagaaagtcgctcttactccctagtcatttgtgaaagtcccacggtagctaattctttcatccagtgaggcagcaaggtttttggggccactaccagagcacgcttgatcaatttggagtggaataaaccagcaagaaaactacaaatctgcaatgcgaatcaaccaaaatcaaagatacattattgataacgaaaagaaaagtgcaggttgcagatttccgtacctgcatagttttacctaaacccatatcatctccaagtattccacctttcccttgggtatgcaatgaccaaagccaattcaacccttccctctgatgtggatataacattgttgcaatctttccaggcaatgtgtaagacaaattgaggccagttaaagtgatagacccttcatcttccaacgatctctcatcataaccatgtcttttggcgttataagaccgagctggcttattaattttcatttcagccgcctttttcccggacaaaatgagacagtcatcatcatcatcatcctcgtctaagtctcttagcttggcagcattagaccttccgactgttcttatcttctcacttacctctatgtgcctggtcgtcttcatactttggtcgacttccttgcattggctcttcccacggtcaagattgtatccctgcctattatcttcagagttatcgtcaaagtgccgaccagaatatgagttttgctttccaacattcgaaattctttcttcccattcccttgaaaattccttactagtttgctcttcccggatggcaaaaccagatttgccttgcttgtccttgatactattaacgccagcattatatgtggtaaccacatctggtgaggacttagatagatccgatagcaaggaaaatgaggatttggcatcctcaaaatcaaatttatcaacctggctcttcactccacatgcatcaaaatcattgctttggctatccttcttcttctgaatcgacattgtcccaagcttagaggtcaaatcatccaaaatacccatgatctcgttccttcctccatcaccttgcatttcctctttttgcttcaactgaggtgagggcgaacaaaagtctgtgattatcgaaaagttaggctcgccagccagctcagtgttagcttcctttgattcatcccaagatgtgaatttgttcccaattccagcgctgtctagtgatgtctctcctttaactgattagagcatcatgcaaaaacaaacgtattcaagtaaagttatctgacaaaacgcagtataataacagctataaagaccgaaaatcaaacaccagactagaaactcagatttcgaagaaaccctaatttcaaagtaagctactaggacaaaattgaaatacatcatcaacggaaacaccaatttctttctgtaaactaagagacatgggtttgcgaaaaccctaaaatcgggtgaaatctcaaaattacctggggaatagaaatcaaccaaatcaggatcgtcatatccatcagcttcgtcttcctttggcaaggccttgcaaagacgacgtcgtccagcaagcttaatcatggacttcttcgtctcttcatcttctccatctgaagtccccaaatataataaataaaactcaaaatcaaagacagatacgaatccgaaaccatagagaaacgatagaagagaacaatcgtacgagaagaagagggaggctgtctaggaggcgcagaaagatcctggaggatactgtagtgacgatcgttcaagctccgaggttttcttctatggctggccgtattttccgccattgctacaccgttttctggagatgagtttgtgtttcccgatgatcgattgtgataaatggagagaagagtgagaagaagaagaagatgatgaagagaatgtttggaatcccgccttccttggcttttttgaattttgaagatttctcagttccgagacaaatggctcttgtgcgctctctctctctctctctctctcacatttaacctacaatacaacaaaatatgattttatttcctttttggtcagatataatagtataatattttttgcgttggtctgaattgtttagtaacaagaacatccgatgtggtacactttttttacaagtcatttcagatattacaagtcatttcagataatacaagtaataatttgttcaatatctcatgatggaaccaaaaaatgacggtttgatggaggcggtcgctttttggaatttccggctctattcatggctttggatgatcgggaaaaggaagagaatgtgtgaaattgtgagctcgtggacgtggagggttcattacttactaccttggtaaatacttggctccttccatatacagtacaacaaaatttgctgcaagagtttggagactctattgatttgaagatgctcgacatgttcgagttctgcttccaacataaaccaagttccattatgaaatgcggcatcaaccttagctagttagctaccaagtgtaccatcacttgcctaattgtcttggtcatgaatcctgatatactaaaaataaaataattaaagagaggtcgaattctcttataattgtagatcaaatgaacaatgaacgattctatgtgtatcacgatcgaactctattataaggttgtctcttttgatctacaattattcgttttttttagcaatcaaaacttcgtataagcacttaaaagtcttaaacattggtcatccgacaaaatatattttaattcaaaataattgcaaccacaataagaaaaagtccgtaacgatttggttaataatagcattgtctagggacttaaagaaaagttccttaaaaaacttcacattgacatcaaatctctaatagcaaaacccttaaaactggcgggaatcggagtggtgtatagtctcactttctacttctctcagacctccacgagctcacaaaatcacacacattctcttcttttcccgctcacccaaagccatgaatagatccggtatttccaaaaagcgaccgcctccttcgaataccccaccaccggcgggtaagcatcgagccactggtgattcaacaccatctccggccatcggaaccctagatgatgaatttatgatggaagaggacgtgtttctggacgaaactctcttgtacggcgacgaagatgaggaatccctaatcctccgtgacattgaggagcgtgaatcgcgttcctcggcttgggctcgacctccgctctcccccgcgtatctctcgaattcacagagtatcagttgagtactatcttagtttgataagggcttcttcatcttatgattgctggaaaatttctcaacacttggatttgtgtattttgatttgtttagttttccaacaattggagattgactctataatcgcggagagtcataaggagctgttaccgggttcctcagggcaagctccaatcattaggatgtttggggttaccagagaaggtgagtgtttttaaacctctttttcttttgctctttgtggggaacgatttcgttggatttgagtttctggtatattgtcaggtaacagtgtgtgttgctttgttcatggatttgagccatacttttacattgcttgccctcctggaatggggccagacgatatttctaatttccatcagagtcttgaggtatttactatgtagatctctgtatattttgtactttgatctcgctggttttgttttaaagctcagctgattcattcagggaaggatgagggaatccaataaaaatgccaaggtcccgaaatttgttaaacgtatagaaatggtgcagaaaagaagcattatgtattaccaacagcaaaaatcccaaacttttctgaagattacagttgcattgccgactatggtggcaagctgtcgcggtatgacttcccaaatatttgtgcgctatgtgtctactatctcttatcctttactgatttaaagtcattgtaattattaaattggtaggcatccttgatagaggcctacaaattgatggattgggtatgaagagcttccagacatatgaaagcaatattcttttcgttctccgtttcatggttgattgtgatattgtcggaggaaattggattgaagtacctactgggaagtataagaaaaatgcaagaactttgtcatactgccaattggagttccattgcctgtatcctcatcggaatttcttttctggaacaataatatgcttatagtaacatattgtattttatgccagtgctttctttaacatgggttttaggtactcagatctaatcagtcatgctgcagaaggtgaatactcaaaaatggctccattccgtgtactaagtttcgatattgagtgtgcaggtcgtaaaggacattttccggaagctaagcatgatcctgtaatccaggttagctgtttttgtcattttttgatatacctttttgttacctttgtttgcattcttcttgaaacaacattctcattgcttttctagatagcgaaccttgttactcttcagggagaggatcacccatttgtacgcaatgtcatgactcttaagtcatgtgctccaatcgtaggcgtagatgtcatgtcttttgaaacagaaagagaggtcttactagcttggagggtattgtttttgcctcttcattattatatatgcattacttcttcttcatctgttttttggcaccttgcttgcaaaagtaagttctattacagttgttaaatcctggaggactcagtgaaagatttagtaaactttatgttgctactgcaattttgttgtgggcttggtgaaacatgtgttctgctgatgtatgagatgtattggctgcaggatttgattcgtgatgttgatcctgatatcatcattggttataacatctgcaaattcgatttaccttatctgattgaggtacttgaacattagattttacttttattgacggatcagtatcacctctggttagcagaagcgtgtttttctttcttatagcattctatatgtaatattatgctatgctccgctgggtcatatggcacatgtatatgtgatggatctttaacctagaaaatatgctgttttctgattctcagagagctgctacactgggaatagaggaatttcctcttcttggtcgtgtaaagaacagtagggtccgggtcagggactcaacattttcatcaaggtgatgtaggagtaactggtgcttgctaacttccatcgctttctctattgtttttttgttatgcttcatgctttttgtgcctcatgagttctctaaactcgcatcttataatattatattgccatgtttcagacaacaaggaataagagaaagtaaagagaccacaattgaaggaagatttcagtttgaccttattcaggttttttgtccttaacaaattcattttggttgagtcattcttagattgtttatttgtaacatcaacctgattcgtcttttaattattgtaggcaatacacagagaccacaaattaagttcttattcgctgaattctgtctcagctcactttctttccgagcaggtgaaaccgagtaattatgcttagaatttcaggttatttctactttccatgtggctaacctgattgtcttctgcagaaagaagatgtccaccattctataataactgatctccagaatgggaatgcggaaaccaggaggcgtcttgctgtttattgtttgaaggtacctacttttatttattctggagtagtgctgtctatgtcctgatgcattgcctgttattagataactttaagattttctaactagctatcaagcttgtctaaccacctaaaggtcctattgcatgttgtcccaagctatgatgggagtcccaagtcccaccctttctagtgtaaaagatgaacattgatgtgtgttttaaaaacttttttagtaatctctgcttatatttttgtacgtgtggcaagaggaaaccttgtagataagggtgtatagaaatggttgctcatatgtccattcatgatttttttgagcatgctggaatctggatgtgaggtaggcttgaaggacttctggcaattgctggcgatatttgtgacacatggaataatgtgtttcgtaggatgtgtggaaggattttcagacactaacttagctgcttctctattaatagtcaaccaactaaatattacaagaagctacaacttcaccacgtttcttttctctgttacaggatgcatatcttcctcagaggcttctggacaaactgatgtttatatataattatgtcgaaatggctcgtgtaactggtgtccctatttcatttcttcttgcgagaggacagagtatcaaggtagttctcaacttctagtttctggatgtgtttcagtttaataaggtggctgatatattgtgtctttgcttctaggttttatctcagcttcttaggaaaggcaaacagaaaaatctggttcttccaaatgctaaacagtcagggtccgaacaaggaacttatgaaggcgcaactgtaagtgggtgatttatggatctaacatttccttttggcctatcggttgcattaattccactgttccgacatgtttgttgttttggatatgtcaaacgatattcaggttttagaagcaagaacaggtttctatgaaaagccaattgcaactttggattttgcttcactgtacccgtcaattatgatggcatataatctgtgctactgcaccttggtaattcttttgatattttcttttcaatttctatttattttatcatctattgtttatacaccttattaatttgggagcattatttccatgttcttgtctttgaaggtgacacctgaagatgtacgcaaactgaatcttccacctgaacatgtcactaaaactccatcaggggaaacatttgttaagcaaactttgcaaaaggtttccgcatttagttagatttttattatcctcaagttccgcaaattctgttgaatgagttctttcaggaaatacaaccaattaataaattcagggaagacagcagtttattaacaaaatgaataatttatttcagggtatacttccagaaattctcgaagagcttcttactgcccgtaagagagctaaagcagatttaaaggtaaaacatttgattccgaagaaactcttgcagtgtgtgcgtatctgtatacagcctttaactactactattgaaactggtattgtctaatctaggaggctaaggatccccttgagaaggctgttttagatggtagacagttagcgttgaaggtgaacttctttactgccagcttctttaacttggtcattcagaaaaatgattacaatcctcggaaaatttcgaacaatatcctccctgtaaattgctcttttacatttgttttctattttttctcagatcagtgcaaattctgtctacgggtttacgggagccactgttgggcagttaccatgcttagaaatatcctcgagtgtaactagctatggtatttcttttgtgaaactgcaacttttctagacacgtagccttttaggttcgttctgatggatttgtatctttttgaaggtcgtcagatgattgaacaaacaaagaaacttgttgaagacaaattcacaacactgggagggtatcaatacaatgcagaggtacatgttcattgaattattcgttgtattgaaaagacttgagtgaatcattaagtttgctcttagatttctcgaatttgatggactatgatgtattaggtcatttatggagacacggattcagtcatggtgcaatttggagtatcggatgtagaagctgcgatgaccttggggagggaagctgcagaacacattagtggaacttttatcaaagtaagtgattttctaggagcatgtcttaaacttctccggttctccctaatccttggggtagaggtgcaagattacgtgatttcttgaaaacaaaatataacaggctgaatcgttctctgtttcttgattgtgtatgatgtcataaagcccatcaaattggagtttgaaaaggtctatttcccatatcttctcattaacaagaagaggtatgctggtttgctatggacaaatcctcaacagtttgacaaaatggacaccaaaggtaaatcttcgtgattttacagcctctctcttattcatttcctgactaaatttcaatatcaccgactttggcaggaatcgagacagtacgaagggataattgtttactggttaagaacctcgtgactgagagtcttaacaaaatacttattgatagagatgttccaggggcagctgaaaatgtcaagaaaaccatttcggatcttctcatgaaccgtattgacttgtcacttttggtgattactaaggtaatatgttttacttgatttattgtcctgtgatgtttgtatcgcctgaaagtgtattttaatgattaaagccatctgttaaaactaaaacaagaatcaaatggataatgctcctgatgtgtttcctcaaatcatagggtctaacgaaaacaggagatgattatgaagttaaatcagctcatggtgaacttgctgaacgcatgcgtaaggtttgtggtactctttatctattttcgtctatcatttgcaggattaagcattttcattacatgttaagataactcttgaccgtttccgttcgtgaagaaacatgtacaaatgtgtctaggggaattttcgttcctttactctaattccagcatctcatggacactctcaaactgaaaaatgggagtgctaaacaattaaattttaatttttggcttgtataatattttaatatggttctttggtcgtctttttatagctgcacaagtgcagggatttttcttaagtcatgcataattttgctgaatatatgaattttttttccggctttttggtgaatatataatatcatacaaaggttgctctgaaacttagatctgttttacggtgtctgatgatctatcatgtgaatatgacagtgtttgcttacatatgtgacagagggatgctgctacagcgccaaatgttggagatcgagtaccgtatgttatcataaaagctgctaaaggtgccaaggtagttttcatgtcaagcttgtgttagcttttccataagatgttaaggtcattctcttcttccgtgcttatctcattttgacgtctgataggcttatgaacgatcagaagatccaatctacgtgctacagaataatatccctatagacccaaattactacttggagaatcagattagcaaggtcagttcaacatggcgtttgtgtataagtttattctatactctttattctggtgattgtaggttaaaggagatgttgttttcagccacttcttaggatttttgagccagtcctgaaaaatgctagcaaggagcttctccatggaagtcacacgaggtcaatatcaatcactactccttcaaacagcggtataatgaagtttgctaaaaaacaactgagctgtgttggctgcaaagttccgatcaggtactttgtggtcccttgcctatgtattatctgttttcatatatgggatctgtttatcaatattcgcttttaacttcaaccagcaatggaacactatgcgcaagttgcaagggaagagaagccgagttatattgcaaaaacgtgtctcaaggtatgctgccgtttttccctttcctatagactctttgatatatctataaaatttgatactttcgttgtgttattcagtggctgagcttgaagaggtttttgggaggctgtggacacagtgccaggagtgtcaaggctctcttcatcaagatgtcttgtgcaccaggtttgcttatatttttatcgatatcaatttcttttagaaatctttcagcaggtaaataggttctgatccaatttcctttctggatttcttattggtcttttacagtcgagattgtccaatattttaccggagaatgaaagcacaaaaagacatggctgtagccaggcaacaactcgaccgttggagcttctaataagtatttaaggttgtttttagctctctcttttttccattggtatcgttgctgttacactttccgcttgatttagaacttgtaggtctctttggaatgttataaaaaggacctcttcggcttatttgtacgtagctgttgattaatacaaaaagagaactcttctcgcatatctccttgtttcggcaggctaagaattacatatgaactacaactcgagatttatgctttacaattcttctgcttggactgtacaatgttctacagaagtataaacatgaagctcaagtgcttaaccatataatttgtctcatctctaagaatttttccgagtcaagtgtacagccttatccttgttgttattggttgtctgcatagtgggcatgttgtgataacaactccgcattccttgcatgtctttatttgaaataaaaagtatcggagatgtcacaaaatcgatctagaagcagtacagttcatagaacaagtaagagtataattgttcctttgaaattttcacataccgtgtgaccgcagctaaaagccatgtcctttggattcgtcaagcaaatcgggcatacctttttgaaaaacaaaaggaatgtaaatctcagtatcagagaaactgagtatactcattgacaaaagaacagaaacaaaggcagaaataatagagtatttaccggcactgtggaaggagcgagtctgtcacttttctctgcagtttctgtcatctgatttggcaccgatctaacagcattgtcacgctctataacctctggtggtggcgggagtggcttgtggtgctgatgggaactgcgcactggttttctactgttcataagcacaatcaaaggttggtttagttggcaaagaatctaatgcaataagaccataaacagtgagtgatacaagtagtttccaacggtaaattttttattgcatttacttgagacttaatgtagccttgtattgaaaagggatctccatgagagctgcgagtgcgaaagcagcctccttcttagccgcatctttgtgctctgacattatcttcgtgaagtttacaaactgtggaacaaaacacagtttttcatgattcatgtttcaggaacaaaacagagctattcagggttttattatattacctggaagttatcgaattcacggtgaggaatattgtcatcgaattgtttcattgtgtcccatggtccatctcctactccaaccaagactatcgacaatgggtaatggctggaaaatttatatcaaacatcattagtatacatatgaagtctgatcatgaatatgagcttattgaatagttttacctcgctgccattatcgagttcatagtagcttcttcctgtggactaagtcgaccaagcggcacatctggatttcttgtgacctgaccatctgcgataatgacgagaacatggtattgcatattgttctgctcaactatgttgatggcagcatcaataaccggtgcaaacgaggtaggacctgtgagggaagaatacactgattaatctttacgataagagagaacaaaactgctccatttttgaaagttcaaaaataccggacaacttcaaatgtgggacaatctctctatatcttttaactgcgttttccaatccgtcgcagcttttgttctcgggataaaagctgaatacatattgatctcgcgttgttactgcaggaagaagaaaacataaaaccattaagaactttggtttatcttattcattcatcttgaaagcaagaaataagaaactaaccatcgccaaaaccgaaacaaggtataagatcatcttcatcaaagggagacaaagtacgaccaataatcgatattgctttctcatatggattctgtcttttaccaatggcatgaaggctttttctattgaatgaatatctccctgcaatgaaaattcagaacattaaccaaaaccattgaatcttttcgtaaacatgtgtagcattttttatcaaatcaaataattacctgtccactcattgctcttggtaaagtcaattcctagaatcagatttgaagattcaagtccagcttctctcagagaagttatcacctaaaaagcaaagttcacaagaaattcatcactatgaaagagactaaaatcaagaaataactaagtaagtttatgagacctgatccaaactgctgaaatgatcagcaatatacgaaggttgctgattacgtttattgctcatgttcattgaaaaaaccctgcagcacaagaaccttcagaaatccaatctttggagaagaaaccaatcaaaatcaagaataaaagatacagttacacaagtggcaagtatatatcaacctggagtttgttgaaaacacaaaagacttctcggaatctttcttgtaagaaaaaacttttgttggagattatcttctgtaggaagattaaattattaaaaagatggcacaaaagagaaatatgaacatataaaaatactttagcagaaaaaaatgaacatataaaactatagaaagtgggttttgttgaatcttgaaagttagtggaacgtgaccctttgcttgcgccggcaaataatcaaaacgtattttgctctctcacacgccatcatcaatctagaaatcttttttagtcttgtctctgcgtcattaatgatttatccataacccaaaatcatagaccaaatttcaacatgattcatgtggacaacgtggcaaagctgtagctcttgtctgaagaaaattatttgggcttttgattccctcaaaatatattaacccagaaccgtttttattgggcttcttcattcatcaagaagcctttttgtatcttcaccacctataaattcacttatgtttcaaccacaacatccacgtgcgattagcccaaaactcaacaaccaatctacgaagatcactaaagttttttatttttatgattttcaccgtttgtacttgttctttcaattggtgccacatggacccctaaaccaacagagcaaatatggcctttcttgatctaaaataaagtttagggtttaagttcagagaataaataagtacactggtgtaaatgggaaattcaaaaaagtaataataattgtctctgcaatcagaaaatgtgaagacatatatttatcttcttgaaaagcgaatgatgtctataaattgttttcgaacagcgaaggctccgcttcaatcatttgtagcagtaagaacgaattcgagacctagaaattcatcgaaccgtctcgtttctgtattcggacgcaagtcttcttctccttcatttgttactctcagagttgtttcatcgatggcttacgagaaagagcttgatgctgctaagaaagctgcttcactcgctgctcgtctctgtcaggttagggttttttcgattcaatcatgacccatagattctaaagtttgattctttaagaaacccattttgtaaatcttccaaatttcgtttaacattttgtgtttattgtgcattgcatctgtaattgggaatagattctagtgatatagtgtaatggtcctctacatacgaagctcgtgtaaatctttgatcaaaatcttatctttgtgttttgggtttgtttcagaaagttcaaaaggctttgttgcaatcagatgtgcaatcaaaatctgataaaagtccagtgaccgttgctgattatggttagtttgttatacctgtccctgattagaaaaagctcttctctttgaatgttactgagattgttaggaaatcacttaatttgatctgtcttgtgttgaatttcaggttcacaagcagttgttagtttagtcttagaaaaagagctcagttctgaacccttttcattggtggctgaagaggtgaaactgcttaataaatccttgttagatgtctcacactttacttatctttgagtttgtgtttatggactcacattgtctaaaatgatctatataggactcaggcgatctacgcaaggatggttctcaggatactctggagcgcatcacaaaactcgtgaacgacactttggctaccgaggaatcgtttaatggctctactttgtctactgatgatctacttagagccattgactgtggaacatctgaaggtggtccaaatggtcgacactgggtcttggatccaattgatggcactaaagggtacgttttaaaactaactagcctaaagtcaaatcttcttatttcagagaaaatgtaaatttgatagaatgttgagtcagatgttatgttcctgacactgagcattttcatgattttagatttctgaggggagatcaatacgcagtagcactaggattgctcgaggaagggaaagtagttttaggtgtgcttgcttgtccaaacttgccgttagcatccatagcaggaaacaacaagaacaaatcttcgtcagacgaaattggatgcctcttctttgctacaattggttcagggacatatatgcagctcctagattcaaaatcttctcctgtaaaagtgcaagtctctagtgttgagaatcctgaagaggcatcgttcttcgagtcattcgaaggagctcactctctacatgacttatccagctccattgccaatgtaaattgcttctttccttccatgtgattccagctaatagctaactaattttcctcatccatttgatcatgttctatgttgtaatatacagaaactcggtgtcaaagctccaccagtccgtattgatagccaagcaaagtatggagctttatcaagaggagatggagctatatacttacggtttcctcataaaggataccgcgaaaagatttgggaccatgtcgctggtgctatagttgttacaggtaacattaaagcttactctctatgaagctaattttatagtgtcgacatgcggatgtaaatagataaggaatgcaaggttgattcttctttttggtgcagaggcgggtggaatagtgacagatgcagcaggaaagccactggatttctcgaaagggaagtatcttgatttggacacaggcattatcgttgctaacgagaagctaatgcctctgcttttgaaagcagttcgtgactccatagctgagcaagagaaagcttcagctctctgatttgtttttttctctcgtacgttctttgtttctctgtaactgttgtttcattttctttcaccgaatttcaccagtgagaatttcttccattttcgaaaaagaaataaaaatgaaattctgttttgggctaagtataaagggttatgtagagaatttaatatggaccagtaacgggccgtaaaaaggccttttaagggttacatgcatgatgcaccgacgtacgtgtctacagtgcgtagatactttatcttaatacgaaagtaagcgcgttaagtagaaaatctcttcatatagaaataattaatatggtgtaaatagtttttttttttctttggttatagtataactaaaatattattgtgtaccatcttacaaaaaaatatatattattgtgcaacttttagaaattcgtgattttattcccaataatatcccattcacgatgaaaggaatcgttgagactttgtaaataattaaatgtagtctagtgatctagtcaaactttataaaggggcgatcacaaatctactagtcgcacaattttttttaatcttttcatgtgaataatatatactagctgctttgtttttaatccatgttacaaagatattttgtgttaataatgataagttgttgatataacacacaataacctgttttcagcgaaagatttgacaagacctggccacacaaaaggtacacacgtcatttacaatatctataaaagcaatttgcaatataatttaattaagattagcatacctctaattattaatttagtaagctagtataaaagaagagggaaaaaggaagaagaagcatataacctctttggaataaaagcatatcagaaaagactaaacaaatacaacgaacccaaaataatttaattagaaagttgagaatcatatactatttcttgccaaacataaaattaatcaggattgttatcttcacctacaaaaagaaagcaaacttaccgaaattacatatatattactaaataaaatataaaaatctgaattcatataaaatgaaatatctctctctaagaaaatatcttcctattggaccaattcattcttggattgtttacatgtatttatgttttcctcatttggattatagcagttttgcaatatgccatctgaaatctgcagagtattctaataataataaaactttttaaaatgtacaaaattataaaataaaaataaaactattaattaaaaaatagtataaaattttggtgagtataataaacaaaataaagagaggaatgagacaacgtgagagaaacttatcattgtcgcaacggtaggggactctatactttgcctacttttccacaacggtagagagattggcaaataaatacattttaaataccaaaaaccaaactatattcaatcaactaattattattttattagtattacgtatatttctaaatcaaaataaaaattgggaagagaagttgcttcagagtcgcgagaggtttttccattcatatcataaaaatcgattctttcagagattttcttcttcaacttcgtggtactcttttgctttacccatttttcaatgtcttacgatgagatgctttctgctgcgaagaaagctgtttctctcgctgctcgtctcagcaacgtacgatcactcgtttcttccgtcttttggatcatcacatgattgattctctgcgatttctcgatttacattttaaaccataaattcttctcttttttcttcttcttattgctcgttgacatttgcgatacgtgttcgaggagagttagatgttttctttgaactcttttgtggagttaaatgtgtagactttttcttcttgtttcctgtaaattgtcaactgatatgagtattttcgaattaggatgtgaaaatctgagattttttatttatgaaaaaatatgaaatggggatctagctagacgtgactgaaatcttcgatcttgttatctcttcggtttcaatgtttataggaattgggtttttgttttgtattttagtcagattataacaagtgaaattgatttgctttttttccaggaagtgaggaaatctctgttggtaactgacgtttggaacaaatcagatgatagtcctgttactgttgctgattatggttagtagtaaaattgtgtatcactcagaaaaatgatatctttctctgttatactctttagatttcgatatctttattggctcattaatgaaacaaagtcatgttgttttaggttcgcaggcggtggttagccttgtactggaaagggaactccagaatgaacctgtgtctttagtggctgaagaggtgccaaacatatacaaaataatacattgctggtttttcttgattgaactaagatggattttgtttatgactttgtaatttatgtgtaggattctggtgagttaaggaagattgctgctgagaccgttttggctcgtattacagagcttgtcaaagatactcttgcaagtgatgaatcatatgctattgcttctcctttgacttcggatgatgtgctcaacgctatagatcgtggtaaatcagaaggaggtcctaagggtcgccactggatcttggatcctattggtggcactagagggtgagttctcatatgttgttgatatttcactaagcacaaacttatagttagttacttttggatttgttttgcaacttcatctcgtttcattgttcaacgcctgtgtcagagactaatcaatctcagagtattgttgcattattgaactgtcgtcatagatttgttttgcaacttcatctcgtttcattgttcaacgcctgtgtcagagactaatcaatctcagagtattgttgcattattgaactgtcgtcatagatttgttttgcaacttcatctcgtttcattgttcaatgcctgtgtcagagacttatcaatctcagtagtattgttgcattattgaactgtcgtcatagagcatcggaacttaaatttaactataacctgcgaatttccattttgtagatttataagaggagaacaatatgcaataggattagcattgttggtggaaggcaaagtagtactaggtgtaatggcttgtcctaagcttccattggcatcaactgctggtaatgcactcaagtctttacctgaaaaagttggttgccttttctatggttcggttggcaatgggacttatgtccagtctctcagtgtcgactctcttcctgcgaaggtaaactacttgaaaccactctgtttccatgcatttactatcaaatcttttcatatattgctaaagaaatgatcaaatgcgctattaggtggaggttagcagcatagatgatcctgcgaaagcgagtttcttcgagtcataccacacacctgtccccatccataacaccattgctacggtaaaacatcttcctcacattctctatacgtatcttcttgcttactctaaattttactctgtttccgcggtgacagaaattggggataaaagaatctccaatcaagatcaacagccagactaagtatgcagctttatctagaggagatggagaggtttacttgaggtttactcgcaaagcaagacccgaatcaatatggaatcacgctgctggctcaatcattgtttcaggtaaacccatttagctcttacctacatagcttttggtctattatagttcatgaatgatcacacaacaaatccttgtatgaaactttcagaagcaggagggaaagtgactgatgcagcagggaatccattggacttttcgaaagggaagtatcttgattacaagagaggaatcgtcgttacgacgcagaaactgttgccaaggcttttaacagcagtaagagaatcaattaaagaagaagaagaggaagaagaaaaagctgcttctctaaaacttcactaacacgcaactgtaatatacttattattgttgtctttgggtatactctgttgtctctgtgtttttcacagtctatttattgaaaaccagaaacaaaaaaaaaactcacctttgatatatataagaaacactaattctcttttgaatatagtttttgatgttacgaagctcgtttaaaatgtattttaaatagtttatgtctgtaatctgagatacgttaatcaattttgaaagtttttaggaaggttggtaaaactagggaaaaaaacaaaaaacgtacgtagctagtgcctagtgattgctatggggataattaaactcgacaatagaaaaaagacagtgcctttttctggcatatatgaaacagacaaatgagaaggacctttcttaataagaaagacaaagaaaatttcttaattatgaaatagattactccagtcgaatcttctgcgaagtttcttgtgaaataattaaaacataatgtagtataaagaaagattagtgtattgattaggttaaaataagcccaatttgtttttttttgtttttttttggtaaacattttttttttctaagtatgttaaccatttctgatcagtcactctcgtcaagtcgtcttctaacgaatataattaaattatgacaaccgatgcaaaaaaatccgtgaaatattctacagaataataatccatattctttggtctacatattctatccatcctcttctttttttagcgtcaacttgttgtgtataattacgtgaaagatggtttgcaccaactccgtctcacacgatacactcggttatattatatcattcaacgatgttgactacgtcctgacttagagtacggctataaattgtttcaatatataaaaccattattagatagaataagcttttacatagtctattcttgaagcttttcaatgtcttatgagaaggagctagccgctgcaaagaaagccgtcactctagctgctcgtctcagccaggtaacaagctactgagctagagtcagagcatggagcttatatgaatcgctgaaactaaaacaaaccttattatgtaatgaatcaggaagtgcagaagactcttttgcaatcccaagtttggaaaaaatccgatagaagtccggttactgcagctgattacggtttgtacctcgtcgtttgcatacccgcgaattcaacttcaagtttctgtttttgctaagttcttgttttctctataaaatcaatcaagaaaatgtcttttaccactcccattaacggatggtttcttcaggctcacaagctgtggttagtcttgtattggagagggagctccaacctgataaactgtcattagtagctgaagaggtgaaataacacttgaaaacctatattaatcagaggttttatagcgtaaatgttactcgggttttataacggggaaatcttacaggaaactggagatctgcggaagaatggaagtgaggcgtttctagaagatattgcaaagcttgtgaaagatactctagcctctgaggaatcgtacaccagctctcctctatccacagatgatgtgttaaatgctatagactgcggtaaatcagaaggcggttgcaaaggttcccactgggttcttgatcctatagatggaaccagagggtgacaatctctctaatctctatgctttctctatacttaatcttttcagccacttaaaaacatggttgctaaacttctctgcttgtttagatttgtaagaggagagcaatacgcggtggggttagccttgcttgtggaaggcaaagtggtgcttggtgtcatggcttgcccaaatcttcctttggcttctgcggtttgcgcgactgataattcttcccaggaagatgttggctgtcttttctttgctacaacgggttcagggacttacgtgcaatcgctcaaaggcaattctctgccacaaaaggtatcattcacctgtccaaagctaaaccatgtgataaatctgcaattgtttgaaagtgttaaagagatgttgtgctgacacaggtgcaagtgagtagcaatgagaatcttgatgaagcgaagttcttagaatcataccacaaaccaattcccatccatggtaccattgccaaggtaacaacttgttttttttctttctattacaatgtgctcgtaagtaggccataaccaagtgggattctttccactaaaacaatctgtttacggttagagtagaaactcgggattaaagcattacctgtaaggatcgatagccaagctaagtatgcggctttgtcgcgaggagacgcagagatatacttgcgtttcactctcaatggataccgtgagtgtatttgggaccatgcacctggttcaataatcactacaggtacagtacataaaacctttttaaacgctgagatctgttggctctacttcactttataacttaacatgttactggctagttatcaaacacataagggatctagatttaatacccacatgtcatttttttttaatgtataacgaaaatacaagaggactatacatataaagaagagaacaaaataaccttgtgcagaagctggaggcgtagtgtgtgatgctacagggaaatctctggacttctcgaaaggaaagtatcttgctcacaaaacggggatcatagttaccaccaagaaactcaagccatggatattgaaggcagtcagagaatccatagaagaagagaatctttatttctgaggcacaacagaaactgtacaatacagtatttgtatttgtctgaactagtaattggtgtatattcttagttcatatatcgtatacatcagatatgaaagatatttttgcttagataatgaataatgatactaaggaagattcgattttacttcttttccaactttcaaaaacttctaatatatgtgtccacaaggaatctaagttaaccttacagattctttttacaaaaacgaatcaccaaaagaggagaaaaaaaaggaaggacctgggaaattatcatgagcataaagcataactccccaggcgattcagtttgttcaggctgttccaatcagccatcctcttcttctgaatcctgcagaagagcaccccgtttacgggttctgcaaaaatccatagcaaagttttcagacaaataattaccgatattaatatggatgttgcatatgatgtttagagaggagatgacatgtatatactaccttcggtgagcaggtactcgtttcacagggttttttgtgttagcttctcgggcagattggttggctgaaacaaaacaaaaagaacgagggagaaaacggtgatgttgaagattattctttccatatgagattttcaggggaagaaggaattggagataatttactaaatgtgggtaaacagcaaacaggactaaccgggagagtcttgccggttatttgttgatggagccataacatctagctttctagagtatcgttccagttggttataggtagcatccctcttatcctggtcacaatacaaacgagattttccaccagagtaagaacagacaattgcagcagtgttaagaactgttgattagaaaaacaccattagaacttccagaacaaaagataccttttcatcagttgctgcagctgaaaaactcacttctcctgatgaaaattcaaaagtgtggctaagcattgttccttgggaacatctatactactatgaagagctgaaaaaattaccttgtaggtgctgcttgctcttgaatgctctgaacaactcgagagacagatttgccattgcttcactagcagatgattccaccatctttgttaaaggaacatttatgcgaggcattcctttggctttctgagaaactaatcgcgcagttttgacacctgaaacattatgtgatgaaacacacagcaaactattaaacataagcacaaggaggctactcaacacaacaattaagaacattcaaaaagttaccatttgaaactgaagtttctcccaagagaagcttcacattgtcggatttcaaggaagcaacagtataatcgacgaactcagaccacgaaccaccaatcccaacagtatccctctgtttcaaatcaagtttttttaaaaaatcaacgtgagtaaaacctcaagtgccattgagattcagcaaatcaatggttaatcaacttcagaaacggagagaaaagattgattgagcaaaaagaggataagaaagagtaaacgaaccatatcgtctagctgcgagacggagaggatcgtcgtccagacaccggagatgaagtcagtgacatgaactgttaagttatacgaatcggaagcgtagacgtggaagagacatcgccggagtagacccgaacccggatccgaacgttcgggtacgacttctccaaatatgggttcgaatttctcgaaactcgccatgtcaagaaaaaagctcaagcattcgcgagtttttgacacaaaagtcttcttctcccgtaaaccggtctttaaaagccaattccatttatcaatttttaaccgtcccgatatcgtaccagatttcggttaagaaaaagattgtttcaatttcaatgttctcgtgtataattaaaaaccagattgtgattgttacagatgaatcatttactgacaaaccatctaaaacctatttttaagaactgaaactttgttattctcccaagaaagaatctgaaaaaaaaacctttctataacaaagaatcaacagagccaatccattgagctagctttgtgtgtgtgatgatgttgaatacttcaaatctgagcaatgaaaagttcattccaagtatctgggatccctggtaagcaccaatgcaagcaatcgttgatcgttggagttgaggtcacgttacttgccttcttcggttttcggggtttgagtttagaccctgagatatgagcttcgtctcttagctcagaaagtgcagttatgtcaagaatcttgatccttgtcccgttcacagcactctcaactgttgcatcgatcgatccatcatcccctgtgatttcgctgcctctagacaaaggaaccgtgttgttacagtttccacctgtattccaatctccgtttttaaaatgcctcggagaaattgtcctaaagaaagctttcaaccgcggatgcaatggaagctgtgcatcgagccacttcgcaacgctgtgtattgtaaaatccttggcgtttctgatatctttgagatattcgccttcgacctgtgttccatttacatgcatcacccaatggtttccttcaatcttacctctgttccaatggtgaccagtgtttagaaccaatacatcgaaacggtgaaggtagtttctcatgaatgctggtggacgatctagatgcattgcagtaagactaggtggatctgtattgttcatgggtaccaaatctgataagctagctgaccaataatacaagatcgtcgtgtttgtggttgggaaccgataagcccaaccatcaggacggagagctcctttggctttcaccaaaccgtactcccatcccacgttttgaacctctgggctatcttcaccaccactggccatacacattagggattgaaactgttgccgccccaatgagtctcctataaatgctatcgtcttgttctgcattctaaaaaacaaaagcaaagtggcagtaagcaaatttgagatattttcagaaacttgctctgctaccacatattctcataaaatccaatatacagagaaggaccatgtataagaagaatgtgtcattggagaaaaacttacataccttgtcaagaaagtgaatctgtcaaactgtggcatgttgcaaccttctggctgccaacggtaaccctcaaatgagaaatcgggtctgcccattattctacatgaccacatggatgataaccattgtttacattcaaaaccagaatacaatggtctcttccggtcttcaacccattttccctttgcaaagttacaaactgaataataggaaaccaaaatgtatcagaaaaacagacaatgaaattctgaagataacaagagttcaaaagtttcgaccattataaccaaaaaaatgaatactaaaagctgtgaagcgcatataaatacctgaagaagaagaagaagaagaagatgaaaactgacgttttacttcaaagagagaatcacgaagcgggttttcctcagaaaccaggagtataatgaccaaaagaataaggacgatcaaggccagtgatacactccctctgagtatatgactttttccaccaaacatcttagagataacatcaactctctcaacaaagaaagctccttgctatgttgttaagttcaagatcctaagaaagaccagtcagatagtgtaacaaaatcttgtcagtcgttgaatcattcaaagacaaaagaaaaaggtttcctctttgttttaacaatcaaaatcccaaattctagcaattgaattttgtatagttttaaggatggtttcttcttcaatccgaattcatccaaatcagaaaacataaccaaatcaggaaatttgattaaacccatggataataaacagaattatatccttaaacccaaaatcaaatatctaactaataaggttctccacaaaatcgagctcgaagatgattgaaatcatttaccggaaacgattgatgatgattggatcttcaacgagcaaggatagtgaagtgtagatctggagagcaagcaaattacgaatccccctccgaatttggatctctcacatgttcgttggtcaataaacaatattcattgtacgagtgactcatcaaattcaacgttgatgtttttttttcttttcttgtgtttggcttcttgaatttttcggcgcaataaagtggtggtaataatttgggtgattcatgttcttttcgctttaactttgttcccataaaaaaaagatactataactgatgcgttaatttctggatggtataattagttaataaataaataaataaaagttctatctcttcttcttttacaataaaacaatctgaatggaaagaatggttcaataccataccaatcaaacaacctgttcaatcttcaaacgaatagttaaaaaattgaaataaaatattattcatcatttaaaaaaaaaaaaatcatcataaacaaattacttatttaaatgcatcaaactaatcattttgttaatatatcacttattcatgtttacattttcaaaacatgatttcactataatttttttatccatattaatatctaatacacgtattcaaaatataacttaaaacatgaaagaagaacaataaccaacaaaatctagtttatatatatatatattatttagcattgaataaaaatctacttaacattacttttattaaaaagtattaactttttgtatattcagataacatatgaatatgtgtgtatttagtagttgacaaatgaaaacgatgtgtgtctttttagtattactatattctccaagacgtgttaagaaaaatagatgaaataagcaaagacgtggacattgggtctgtgtgatttaacaaaactatagagtctcgattgttactaatcgaaaatatttggtctctctaagtaaaataaatgacctttacatcgttggagtgaaattgaagggatctatatccctacatcttatttggtccttcaatattttactttaatcgttttcatgccaaaataataatatctctcatccaaaaaaggaaacaaattgtattgtatctaatcatcgaattaattattaccttcaaaacatcataattaagacgtataaatatggcgaaactgtatcttttagaaacgtcaaaactttaaaaacgcaagacatgtatcattttcacctttcttttgttgttaatttaattttgggacattatggtaatcgacaaagaggtgacaaaaagattagttctatgaataatcaattataaaacaaaatttaagctagagtaattatcaaaacaaaaaaagcaaagaaagagtaaagtttaaaaagtgttatattttattttttttgcttttagctaaaatcatgccgtagtaaccacttctcaacaacttgatttaatttattcatatcatgatgatataaaattccaattagtaaattataaagtcttaagcaattgactaaactagtcttttgtccaactaaaataatctaaaaatgattttaataagattttcgaccactactaaattcacggctactccgtacttctctcattctctctgcttattgatgaagcatctaaaataagcaaaatttattaatatgtcttttgatcactaataaagattttgttgttgtcatgtgtgtgtaaaatcaaaatcgtaaagatcagaatcaatattctcttgccacatatatcctttatatatacacctttctctcccgcatcttcaacatatatccagtgccattgcaattttctcgagaaagtgacggaaaatggctccgcagctgcaaaattgagattcggattctcccttctttcgtcactctcattcattctcgcctgtatcaggtccgccttgtgcacattcctctctattttttccttgtgtgatttttttttttgtttagcgttggatgatctctaggatgtagaacaatggtgattcttccgagatctgttacagatctacagtttttttcatagttattgtgttgatagatttcttgtttttgttcttgaggttttttgttgaacggcgttgtttgttccttgattatcttaacttgaaattctatagtttcgtctgcttgatcctttgtgtttgctctaggatgtgaaattccatgttgtgagtgtaacttttagtagtgattttgaaattttatgtggccgtgacaaagccactcgaagatttcgtttctcggcggtatctgggttatactttaatggcgagggtttaagcagatctgctgacattagccttttgtttcgatctgtgttacaattaccaatttgatctcgttagagaaaatcgagctgatatatgcatgcatagatcttcaagaaatttgatagttttcttaactacacttgccttgctgtgtctttggatatgatgatactgattttattgctcgcctaacatctgtttccttgttactctatccgtgtaggcgtacacgcgttgttatcatctgttgcttatatttgaaccatggcgcaaccaaggtacactaggatagataacaggaggccctcatcaaattattgctctacagtgacagtagttgtgtttgtggccctatgcttagtcgggatctggatgatgacatcatcttctgttggaccggctcagaatgttgatgaggtttctctggacaacaaagatgggataaagaaacagatgaccccacctgcagaggagggtaatggtcagaagtttgaagacgcacctgttgaaacaccgaacgaggataaaaaaggagatggtgatgcaagcttgcccaaagaggatgagagctcaagcaaacaagataaccaggaagagaagaaagaagagaaaactaaagaagagtttactccatccagtgagacgaaaagtgagaccgaaggtggggaagatcaaaaagatgactccaagtcagaaaatggtggtggaggtgatttagatgagaaaaaagatttgaaagacaactcagatgaagaaaatcctgacacaaatgaaaagcaaactaaaccagaaacagaggacaatgagttgggtgaggatggtgaaaaccaaaagcaatttgagtctgataacggtgagaaaaaatccattgatgatgataaaaaatccagtgatgatgataaagaaaacaagacaggcaacgaagatactgaaaccaagactgagaaggaaaacactgagacaaatgtggatgttcaagtagagcaagagggtcaatccaaaaacgagacctcaggtgatctttcacctcctggggcacaattagagctactgaatgaaactaccgcacagaatggttcattttcaacccaggcaacagagtccaaaaatgagaaagaagctcagaagggttctggtgataaacttgattacaaatgggcactatgcaatacaacagcaggacctgattacattccctgtctcgataatgtgcaagccattaggagtcttccgagtactaaacattacgagcatcgtgagaggcattgcccagacagcccacccacctgccttgttcctttgcctgatggatacaagcggccaattgagtggcccaaaagtcgagaaaaggtctgttgaatctgttctctttcccatttagatattttaatttgctaagaacctaatacaaccattttcatttacgcagatctggtacaccaacgtccctcataccaagcttgctgagtataaggggcatcaaaattgggttaaagttaccggtgagtatctaacttttcctggtggaggaacccaattcaagcatggtgctcttcattacatcgatttcatacaggaggttggtattcagatgtaattcttttgttagaaagtctgaattggattactgctttgtataatggttttattacccatacacatgtttcttttatgcatccacttgttttctactcccttattttgttagaaagcctgaattggtttgtactttgattactttaggggtaatatttgtgcttatgaagttccccttctgttgaaactttgatttacagtctgtccctgctattgcatggggtaaacgctctcgtgtggtcctggatgttggatgcggtgttgcaagctttggaggtttcctctttgacagagatgt

SEQ ID NO: 957 - DNA, 48622 bp, Arabidopsis thaliana
gatcactatgtctcttgcacctaaagatgaacatgaagctcaggtgcaatttgctcttgagaggggcattcccgccatttctgcagttatgggcacgacaaggctacctttccctggcagagtttttgacatagttcattgtgctcgctgtagagtgccatggcacattgaaggttagcaacatagccacaatagatatagagtctttgaatggaaactcctcctggatcttaagtcttaacagtctctttcgagtgatccgtcaaactttttggtatctgtttctgatgtttgtgtgcacaatacatgggcaggtggtaaacttctcctggagcttaaccgtgtattgagacccggtgggttctttgtgtggtctgctactcctgtttatcagaagaagaccgaagatgttgaaatttggaaaggttgtgaaaaaacattatccttctttatctaattgcattggatcaggttttctcacacgtcatgttggcgacttttgcagctatgagtgaactcattaagaagatgtgttgggaactcgtatccattaacaaggacactatcaatggagtaggtgttgctacttacagaaagccaacttcaaatgagtgctacaaaaacagatcagaaccggtgcctccaatttgtgcagactctgatgatccaaatgcatcttggtatatttctttttcagatgttaattactgtgcttaaagaatcagctggtctaggttaacgaatacatgttttgatgtgtggtttttgtaggaaagtgccgcttcaagcatgcatgcacaccgcgccagaagacaaaacgcaacgtggatctcagtggcccgaacaatggccagcgagattagagaaagcaccgttctggttatcaagttcccagactggagtttacggaaaagcagcaccagaggatttcagtgctgattatgagcactggaaacgcgtagtgaccaaatcataccttaatggtttaggaatcaactgggcatctgttagaaatgtgatggacatgagagccgtttatggagggtaagtaaaacatgctttcctctccgctttcaattgaattcaaataatataaggtcaatcaagaaacactgtattgatgtttcctgcatctttaatgtttgtgttgattctcttgttgcagttttgcggcagctctaagagatctgaaagtgtgggtcatgaatgtggttccaatagattcaccagacacacttgcaataatctatgaacgaggactctttggtatctaccacgattggtgcgaatctttcagtacatacccgagatcatatgatctccttcacgccgaccatcttttctccaaactcaaacaaaggtttgtttgtgtaacaaagagtctctgtttcaaacaacagaaacataatacttaacaaactctttactttacaggtgcaatctaactgcggtgatagcagaagtggatcgtgttttgagaccggaagggaaactgatagttcgagacgatgcggaaacaatacagcaagtggaaggcatggtgaaagcgatgaaatgggaagttcgaatgacttattctaaggaaaaagaaggtttgctctctgttcaaaaatcaatctggcgacccagtgaagtggaaacactcacttacgctatcggttgagaagacttacttcaagtcccactcttttttgtacgtataaaaacactcttattaactccatatcatccctttttttgttggttcgtcttttaggaagttctttttttttagctgttgagtcatttgtttgtactattcgcacatttttgtgttcttgaaggtgaagaactctattgaggttctttggtaaagttagattacagtgatatgtgttactctatggtttcttctatttgcttgcattggtgttaactccgtaaaaccaactgaaacttcttcaatgaacatgtatgtattcagtcaggttttttatcttaggctgaacttaatgcaaaataatgcatcctaatctctcaatagagttttagcttgatagattcaaatggatgcgagaactttcatgaatagagagagatagatacattgttggatttatataagaatagatgaaaacaaacaaagttcttcaccatttccagaaaacattggaaccacacttgtacttgtccttgccttcgcattccaaagcaatatcttctgagataaatggaactttctgcaaaacagaaaacgaacaagaacatcacaatctcttcaagttaaatattattcccaaagaaaagaaaacgttgtggatattagacaaaccttttgcttggcaagatcttggcagccagtgaaattctcagggaacttgcagcttccgaattgaacagtgaatgctctcgcaaagtttgctccacttgttgccaatctcttcttatcattaagttcctataatcaaaatttcaaaaaatccaaaactttttaggatctttagcaatgtcaagattgaggcattcaaagacttactttgttggttttgctcctctcgaggtattcgtcaatgacgccagcattagcagaagcagaaacagcagcagtggagaagagtgtagctgctaagaaaaccatggctgatcgtcttccattagatccatcaacatcatcaccaacaacgcgttgagctttgatcacaggcataatcatctgtttcttctgaccaaacccaactgatgaattcaccaaaccaactttctggttaagctctaccgagccagagccagcaattgcgtagctgcaagtgagaacactcgagttcatggccgccattaaagatgtctttttcttttgttcttgaaaaattcaagagttttttgagtttgattggtgagtgagcaaggaagagattagattttagtattagagatgaatgaggatgatgatgatgacgtggactaagatgtaataagggattgtggttggagtgtggataaggtgagatttcccttcagtcctattggcaaaagtccaaaccttttcttattactcaaagcttcaagcttttaaagtttgagtttttcagattctctcttccaagtgtttatgtggttagattcacttcagtccccaccacacaaactctctcaaaaatcacaaaaatctctgtttggtactctgttttcttagtctgatccggtttaactgaactttatcccggtcaggtaaagatttcggattatgactctaatttggcaaagcctatgtttcatagaaagaacaaaagagagcttttaccattataagattttatccttagagagaaagtacagttaaacaaataagaaaaaaaatgaccaaaaaaaaaacagacaaagaagaaaatgttaagaaaacagagcattgaaagcaaattaaaactggcctgataatgttacaagctctctggtttgttcctaagtttgctttgctgatacattataatctacaaatttctttgtgccatttgtttcgggaaacaagaaatgcacgaggaatcaaaatctctgggctgtctttctctcaccaactaaccaaatattgaaggaaaaaaaaaaaaaaaaaaaaaggggagttttctcaggttgatactgtggctgtagattcaagaggcacactctcatctttgttcaaagcttcccagtctatctccctaagaatcttaaaccgttcctccatggacacaaacccagcttgaggaaccactataccaggacttccagctttgtaaatcagaacaatactggtgcccatctcaggaccatggagttttcccgttaacaacactcgtagtggcatgaaaagtgatttaccctgtaaccagcatcagaagaatctcttgtaaggtttgttcactcaagtaaagtagattttgtttcggtattaactgcattagagagatgactaactttgcgtttcaaggatttgccaaaggctttcacccatttctgccaagcaccttgtccttcttctaaagcgcttggaatctctccgctgtcataagcagctatgaggctggctgctacttcatgaagtttgtcttccacagcaggcttagcttcagggctgcatcaggtgcagcaaactcaaatcaacacaagcgcagagctccagaaaaccgtaaaaaatatttattgaaagaaaagaggtgatgcaggaggaacaaacggtttgatagttacctagccaatgtagcgtgtagaggatatgaaagcaagttcaaaagtactttgtctgaatctgtcaccaactcaatcccatccttgagaagctcgacagcttcctgtacttcaacaacaagctcaaactgggtaagtctatacagaaaaaatctgttgttcctaattccaaagctttatgttaggatcagaagaaagtgcggagtcatgattagaaaccatacatttacaaaactcccctcggattctgttaagataccagcgctcttccatcgctcaccaacaagttttgttagtttctcatttggaagtgccctcagatgttgaccattcatccatctttgagtttataaatatgccacattgaagctacttataagaaaaaggtagagaacaaacagagatacgaaaaacaagagagaataagattggataattcaaacagctaagtaaaatctataatcaccttaactttgttgaatcaaaaatcgcgccacttttgttgacacgttcaatcgagaatttttcaactgcaaatcaagaacaaacattcaatgaagaaatcagaaaagctagggatggcaacaaagtaactacagtcaacaaaaacgacctaccaagatcctcgagtgtgaagaattcattttcagtcccgtctccccaacctaagagtgccaaatagttaaccattccctgaggtagatatcccatctctctgtactgttttttcgaaagggacataaagcagaaattagatgaagaatcagcaatggagtaatctatgatctacgagcagtaaaggaaataacagctataatcacctggcctacagaagttgccccatgtcgctttgataatttacttctatccggagctaaaattaaagaaacatgtgcaaattgaggcatcgggaacttaagagcctgccattgattgatacagacagcaataaatcaaattcttcctcctatattctggatcacataacttccgaaagcaattggaataaacaaacataagctagtgcttaccttgtaaattagagcctgcctcaaagtattaggcaagtgttcttcagccctgaaatgaaagttaatagatttgatcaagataacattcaaacatgttaagagaagaaactcaaattccaaaagaagacactaccttataacatgtgatatagccatggtagcatcatctaccgtaacacaaaagttgtaaacgggttggccattacttctcattaccacaaaatccccaagagtatccaagttccaacagaccttcaagacactatcacacatggtcaattacaagaaggtactatcgagctttaaataacagtatctaaacatagattgatgattaagcacacaaaaaaacctataatactaacctcgccacgaatcaggtcattaattttcaaagagccttcctttggcacacgaaaccggtaagtaaaaggtgttcccttttctaactcttgctctatttcagcatcagaagctgttgcccatttcccggtatatactggaggcaactgtttcaactttgcattctccttcatctttacaagttcctacataacataacaattgatcaaaatcaacagcagagtcaaaaaaaccaagctgaagttgttcagcgaatttgaagataatcacctcacttgagcaaaagcatcgatagacatgacctgactctaaaagcttctctgcatattgtttatacaaagcatttctttcagattgccgataaggaccaaagtctccactaaccccaggacctgaaatttcaaatcccaatttcattacaccaccattggaaaaacacctaaattagcacagagaagaagaagaaaaagcaaccttcatcccaatcaagaccaagccatgagagatcctgaagaacagctgcttcagattcacgtgttgatctctccaaatctgtatcttcaattctcagcacaaatttccctcctttagacctgtagaaaaactccatcagttacaatccccaaaaactctcaatattgttctgctctatatcagatcacaaacctcgcgaacaagtagttgaaaagagcagtccttgctccacctacatggagattaccagtaggagaaggcgcgaaacgaactctgacagacccaccattgttgactggagtggaacacgcaaccaccgcgaagcttcgccgagaacagtaaaataaagaagattgacgccgtctgagaaaagctggagcaagctccggtaaagatctaaccctaagccacggcgtcccgtagacaaggctcgccattttcgttttcttcgaaagttgagatttttcagaggataaaaggatttgattaatcggaaagatgaaagtcgcaaagcaaagcaacaaattcgattaaagcctcataactgttttaattgtaaaattacatccccatattatattttcaacctatttactccccaattgacaattgtaatgctaaaattcacttattaggaaagacacgtggactatttgaggaacgacgtcgtcttgtcgtctggtctggaaagtaacattgttctaaaagaccccataacctttgttaatttctacttacatcctcgtactatgtttgcgaagcaaagtcaaagtaattgtggcattgtatttccccaaacgacgacgttcgttcacattcatccttatagcctgtgactgaattttaatggcattatcattgaagctaagctaagaatccatggtattacactagttaaagcgaaggtctttgccacatacataaatgatgatgaaaatctaagactacagacaacgcagttgcagaaacataacatagaaagctggctccactactggacggtttcaagttactgattcatggttttgtctcttctttcgtgcagacagagatggcaacaatagaaacgttctggctaaagcttcacatgtttggtctctgtttccatggagcatcagaccaaagcaagaaagagcataagtcagcacaaaatacttaatcgtccttagtctgaccgttgcttcttgagtcatcaggaatactagcttgagctggaggagaaggaggatgaggagtgggtgactgtatcagatcctgtagctctacgacttggtcattgctcaggtcaaacattccactgaaattgccatctcctaagaacaccggagcttccttgtttacaaaaccatcaggatgtcttacctgtagtttcagaagcaatcaaaacaagtttcttttcaggaacactgaaatctgattcatcaaaagcatgatgatgcagagacagacttacctcattatggtagtcgaaatcgtcgaaaagtaaacagtcgtcattgtcaacagaaaagagatcaagcatcgaatttaactcgccaccatcgagagatacttgaggaacctcaagaagaggtgaagaagaaaagggattgtaagctataacatcacttgttagaggtggaagcactgtggcagttagtggcggcacatcagagacgcaagattctgagatcactcctgtcaaaccatccttaggagcgtacgagtgtgaggccttagcagctagactggtttctttactaggaccagctacaagatgattctgagtatattcttcttccttatcactccaatcctcttccttaaatggagcaccatattgagatccatgtcttggtccaagtccatttttcttaaagagaacgcaaagcacataagtatcctgcagggcacaacaagcatgtttagtaaacttgcaaggaatcaaaacgttaaaaaaagacaagaacgaatcgtcattacctgaggaacattcttttgagccagtactttgtcttcaagtctatattcatgtatgacccaatcagtccgatcaccgcgaggtattttcccgtagtgataaatcagagttcttatcttcccagtgacttcgtcattataagaaacatctctgtctctccctgtggtcttccagtaaccacattcagtagagcggtttgccttaccgcctttgggatacttcttttctcttggacagaagaagtaccacttaagatctccagtccctagacatgatttgtctgtacaatgtaaagaaacctctgttagtaatcaggaaataaataagaaagcatgaaacagaacaaagatttctgaaagaatgagttagttaccgggtaaatcaggaggttcgaacttgtaaatgtcgacctcagcaatggcatcaacttggaacttttttcccataactttcctcttcaagtagtatctcacaagttcaacatcagtcggatgaaaccgaaaaccaggtgccaagttagttttccccattggaagacaaggggaaaactttcactacactaagtaacttccctcaccagtaaagcaaaaaactcacaataacaagatctagcagagacaaaaagctaagaagaagaagaaaacatgatggtctgaaagcaccacaaccttcctctgctcatatatccacagtcacaccaaagaaacgatggattcttcttgcagatatcaacagacatctgctgtacaacacaaaacgaagcacctacacatagaagaagacacttttcaatgaatgggactgtaacaacaaaaaacaaattctagggctaattctgattttgtaattttgttgtaactgatcaaaatttggtaagcagatagataatctccactgtagaatttaatcctttgatcaaggggaagcatcaaagttgatggagctaagatcaaacccagaaatcaaaaccccattttcaagaaacagagaagacgagagattacatcggaaaccaaaacgtacaagtgagaaacatttccggcgttaaaataaacaaagagagaagataaaagagaggagaagtcgcaccggtaggggaaggagaagcggaggaacagaaaactttggtcggaggagagagaatgagagtatagcttgaaggagaagccaggggtagagtaagtgagtgatggggtttagggtttatatagatctaattacgcgtttattattacagaaataaattattttgcaattcaatgataaatcataaatgtaatcggccaaaaaccaaaatgtataaaagttaacttttttagtgtgttttttttcttttacttctagttgtgcgggttccaaaagctattaccatataccataaaacaaaaaaattataaacgtttttaccataagttaatgatttgtaaagtatataattcgatagttcagtctattttttctatagtgttactggtttacaacaacttgaagatttgtgatattaattttatagttttaatcttattttttgaaagagagattttatgactatgatcaaaaaaaaaaaaaaaaatttgtataactataaaataaattattgatttccgatatgatgattcattagaataacaataagagtatggatcttagaataaaaaggaaaattggtaatgagtatatttcttttagaaatttgattaaaattcatttattttgaaaacgagttatgttgtcaaggtttgagaaagatatatgcaaatcaatttatgtatttaaaaataaattggaagctaaggaaccgaaagagcatccctctcattggcccgatgacttcacccgcctcagttttgcgctcccctttttttttttggtaaatagttttttctccaacaatttgactatgcttgtttgtttcattggtatgaaatgtaaaaaggcaatgggaaaattcttttacgatttttatttcctttttctattttgtagatctccccaattacatgtaacaaatttgctattgttttgtaaacagcgagagtaaacggtagacttttatacggtacgttctataatagtacgatccttgtgtatcagtgcatgaatcaagacgtttcaaattttttatgaaaatgaatagccttcaaaatatccctagtaataaactgctagttatgaccatttttcttgtctcactttatttttattccaatataacccttgttttgtttttcttttgaacatcaattcaaatggagaagctagtgaatcctacttaccatttgatacttggataagagtcatcagtgaacaattcgatacgacattatgaaaattgagtatatgtgtgaagagtgatataacacacatcttaatgaaatatcatgtatgcatgttctgtttggtttttccgtgctcagactctaattttaacacaaaggaaaagaagatgatacacaatttatacaacaatatcacatcatgagttttgactagaaacaaatttaaaacaaaacattaccctttttaacctctgtaaaagggctttgttttgagcttttgggaggaagaaaatttcaggcttttgccttcttttctcctgcaagtagagcaagtaagtaaagataacaatcaaacctctgcaaaaatcatactctgtacacaaactgtagttttctcctccacgtgtgaccggtttcttctcccatgcgtgcacacacgatctcttcaggcatcttcccccacctttggaaggattctgattgctactatgaaaagggttcctcaaaaaacgtattgttttatgagctaacccaacataccaatgtatgttgtgagttttttacccttattaggttggttctttggaacatcacaatattccatttaagacccgttggtagtaatcatattgtcgtgtccgccaagcatctaagctactgctgatgagagagaggaccaacgagacacattgctggttttgtgattgcccccaaaaaataaacaaaaaagaaagaatgaggatattgtcgtggatcatgtgaaatggattatataaattgatacgacaaagataaaagaaaacgcttacctcttcagttaaacttagatggaatctttttcttaggttttgaatggttcgtggaccacctttgaagcaagggaaacccgaatcctaatagaaacaacaccagaatatatataattcagaaggcaaataattaggcttgctgcaatgttataacttattcgggtatagtaaaaagaagctagaaattatgaacctgtaacatttcaactaagagaataatccgttccgcgtgctttctacatgtaaggaatccttgaatgcatagcacctaattaagaagagttgacaattaacggccattccacatatatatgaaacaataatagtcatttaaaagtgaaaggtgagagggtaagccatgcagataccttgaaatagtcaaagaactcacttggaaccccatcagcatcagagtccatgacctggatgtgacaaacatttttttttgtaaattttcaactgcttagcaaggaaacatgaccaacgaaaacttagaagagacgacgatccaagatatgagtatatgaactggtgtctacctcaagaagttcacgggttaacttaaacggggcactctcaaagtttacgccaccaggagaattcgaaagcataaaaccaaaatcaatgtgtataatgtgaccctcttcatccaagagaagatttccattatgacgatcttttacctaaaccgaaagattttcaaccatggagcaataaatgtcaaagaatgctattcatgaaactgaccaatggcatcaaaacgtgcaaaacctatagatgaatacacaacgtactgagagaaggggtcactaagacatttacctgcagaaggtaacagaccaaagaatatccggccatactttccacgaaattcctctgcaaaagaagccaattcgctaggttatatacacaacatggcatccgacacaagtgggtagttatgcacataatcctcaaagtttgaaccaagcagcttctttccttagattaatccacaaagaaactatcttgaaagtccaatgcaaagtatattcccaagagaatgcaacttatgtattccccgtttcacaataacatgtttaacagacggaagtctagcaaattcctgaaacaaaaacatgctggttgaatgaaactatttagacctaccagcagtacattacctgggcgagcttaaaacttggagagttttctttatactttgcaacaaagaaatcacgtaggctcgttatgttgggatatctacttttgatagaatgaatagaagcctgcaggaagggtaaatggtacatttatcacatacgctttcaatgtaagaagattgattacaggatacaacaaagcaactaaacagatgtgcagaaactttgttgctagtacaacagaagagttctgtatatatcattaccgtatctggaattgtttctataagggcagtataagaagatgtaaccaagacttcataaggacgtaaccagaggggtagacctgcttcctggaatatatctagcacatgaacaatacagttactttataaggcggaactatccttatcttaaataaataacagaataagaaagcctgaaaaacacaaacgagaaggcataccctacgaaataggatattaagatgttggtagatttgaaaaagtatcacctaccataaaagtgagaaatgagttgcacagcaagatgctcctgcctacagtcgtcaccgctcttcacaatgatctgcaaaaatctagagttatttaataatagaggtagaaaagaatatcatatggcataattgtcaacacacaaggacacaattcaataaagattaaacacggaaagtatctaacatctttagtaacagctttttaatgacaatacaaatttggcaggacatacataagcaaagtctacattattgcaggctgggaagagaaaaatgcatgatcaagatcgaagtagtgtcatatagttcatagttacttttcaattatcgggtaaaaatcgagctcaccctagaccttaatattccttaataaacattctggaaagtctgcagacaaggaagattagcggtatcaacccgaataacagaaaccttagagtactctatcaaattgatcgaggccttcaaggcccaaaacatataccgattctatttcatcaacaaaagaacttagtttagaggattatactaattgggaaacagcaaaccaaaaaaaaacggtatggcttttgtagcacttacagaacgcaggtcccaaccaggtaactttccatatattgaagctttacgtattctgtctcgctttccctcccaaagttcacctgataaggcatcaccttccttcagcattccaccattggcctagtaaacaaaacaaaacataaatacataaaaggttcaacatctaaaacaggaaaaagaagaagataacccatattctatgttaaacatgcatatacccttggttgtgcatccgacgaatcctgacccgcccctttgagaggaaggcctggaggtgcctctcccttcgctgcagcagcctgcacaggtgatttaattaaggattaatgacgggtcacaacgccaaacagaacacatacaatttcaatatcttgactttttgaacataaacgccttaataagaaaatgaagtgtatagcatgtcggaaggacaatagcaagcacaggcactaaaaacatcgactagttgagtataagaattattccaacaacttgaaagagacatgaagtatcggatatttttgtgaaaaaaacataaaattagttgcctcctaaaagttattgatcaagaaacactcaccctaacttcctccatggcaacagtacttggaacacgacgatgttcctttttacgtgggactgatggatcaggaatgctttccattctaagtcctgggtcagccgttacgaccacccttacccattcaagatcattgttcagcccagtccttggggcttcccccagaacatcatcaattggatcgccaaatgattcaagagctgaagtacgatcctccactgagagacttacattgacaagtttcaccttcacctctgacttaggagtcatcgcttgatcaattgcttgagcagtggataacgacattcggtcagcactgttgcgataaacctcctgagtagtccatagtggataagcccatggaggtggcttttgcaagaatgcgtccccgtttgccaatggaatcccccctttagaaagcttctgggagttcgatgattctttagcactgacgtaacaatatcagaaaacaaaaagaacaatgggagagttttatcatgaaaagtttcacacttcgtatggttaatgggatataaaaaagaaggtaacttcctattaaaagaagtagattttacctgggtgtttctgctttcaaaacttctacggagatcatgtatggcgccttttccctagaattcaaaagaatgcattcgtcttcaggaatatggaccacacgaaaaactcctctccccattggaaaacaaattcctggaaggttatttgaatttaaattatgaatagaaattcaatttgataacaaaaacatttaccacaacagaaacaatgttgacgaaatataaaataaagaattcaataatccttaaaaacgcggaggtttagatgccaaaaagattggaccagataattctctcaagaaagaaacacaagtccaaggaaatcctatacaagagaggaaaataagtgataaaagagcaaggatggaaaaacatagattcttcaaacaagagtggaaataaatatgatataacggacataatactaatttaagacaagcaacacgatgagcactcagaaactttaacagggcatgaaacgttcacatactatttcagagaaaagcatacatggcctatagaatatataccggctcaatatatttgagctacacatataaagtagacctccaaataataactcttaaaatataattttagaaaaatacctccagtgatttcagcttccgataaatgaaaattgatctctgcaagagactaaaaccaaacaaaagaaatataaaatttagtcagttgctacaaaggtagaatttgacataaatttaattatcaataagaaaagtcagtttcacctcccgaagaccaatcttccgatcttcgatgggaaagatatctaccaaaccatatgacgtttcacataacgcttgtacaaactccaacgactcgtggtaagcccctttcctgaattgtgatgcagtattgtttggtagcgggggcttaccagatggagtatcatcccgctgtttaggtgagcctggccgtttctgcaatggttataataagaaacattggtatgagataatcaagctcatatgaaagaaaaaaagtctggcatagataaataatcaattgaagtcgaacaaccaccctgtttcagccaacatttgtgtcaagtaaaattcaaaagaaggaaagacatatgattgtatcctacaagaatcttgataaatgactctgaagatgtggatcaaatgaaaactgaatgtcaaaacagtgcaaatgcaaccagtatatgcaataagacagaaacacaaaagaccaagtcaaacgagaacaaacctccttgtgtttctttgatccaaacagttcagaatcttcaacagattggtcacgatctctgaacaacttgcggaaaaagttttctgtcccaggactgctttcaactaagccattgctgctattttcattttctgaagtaggttttgcatcttcgggatgtatacggaataatcttttgaaaagagaaaattctggagattcatcaccctcactttcattcccgtcatcaaccttgacaatgtctttcttgtcatcagatttttccttaaagaattttttgaaaaacccctccctctcatcctcttcaccagatttcttatcggcatacactgttccattggcttcattcttttcactaccatgtcttttgtcatcatttttttccctgaaaagtttcttaaggaacccatctttgtcctcatcatccacttctttaggaactttatcatcttcaggtttgctgtcacggaataatttcttaaaaaaaccttctgagtttgggtttgactcctcgtcctcgtttttactctcccgtaacaatctcttgaagaaactgtctgaatttgcacccaattcctcttcatctcccttattatctcgtaacaaccttttaaacagcccatctgaactcgatgtcaattcctcgctttctcctttactactcaagagcctcttgaagaacccctcggaactgtttgttatgtcctcatcttctgatttattgtctttcaaaaggcgcttaaagaaaccctctgagttaggtattggttcatcaccctcacctttgctgtccctcaagagcctcttgaagaatccttccttttcactctcttcatcatctttgtcagctgactttctaaacattaaagcatctctgactttaggacttgggataagtttcttaaaaatcttattgtcctcagcaggtaactgactaccatcatcctgcacgttggtccctggcgaaggtgagaatgacaaagacttctgggtgggaggagatagctttaaggagaagagcttctgttttgatgacaaaagtctatttaggacctgattcttgctccctggggttgagacctcgttctgtggacgcatgagaggagaccactcacccatcaaagtagctgcaatttgacacttctcttgaatcctgctgatgccttcattatcgtcagcatcctccagctcagccaacaaaaaccaatgcactttcagtgcgattttcagtgactttccacagatgtctataacaaacttatcaagcgatgggcttggtttgtgcaccatcatgtagcaaatctggaagagataactctcaatacctgataagggaagcgtatacatcctattgcataagtaatccctaacaccagcatgagggtgcttgtacagataactaacagcaatccactcacagaagaaagcagaatcgaaaaacctaataagccaaccattagaaccagtatcgccgatgatattactctgtgaggtaatctcacgaggtgactcagccgagtctcctcggaccaaagatagaaagcgtcccatcggcatcctaatcagccaagcataaaaagccctagctcacagacccaaatcatccgtcgagacaacagatccaggagactcttccaacaaaccagattaacggagcctctctcttccccaataactaaaccctaggattacccgtaaaaccttaactcaaaaaacctatctataaccacccaaagctcaaaatctcaatgccaaatcgacgaaatttggctttataatgcttaactttcctaaatcgcgaaaaaaacacagaaaatagagatttctccgtatcctactcactccaatcgccgtaaaccgaaggcgatcggaaatttctccagaatccaaaactaaatctcacgtagagaaccaagcgatgagctaattaatcccgttcttcctgctatccgagaaattctgcttgttaaaattcagagcagaatcaagtaacagaattagccggagtagatcgccgtcgtctcagccggaagcagtttgtggtggaagatacggtcgtcgtcctcggctgttggtggcagacagagagagagagagagaggggaaagtaattatcgttcgcaatacttttaaattattttcatttttttattaattttaattttttggtttttagtaattcgtactatttaattattattttggtttggcgagggaggagatctaacgtgcgctggaaagtccacgcgatcataataaagttgaaaatccttggtgggaagtaaacgtgatttgtccacaacgggacacttggacagttgattaacttttgttgacagttgatttttcattattttctttcaaaagattattactattgagattttgaattttgaatctgataagctaattacaagaagtaataatctgatttttaaaaaatacgatatatatttatatctttcacgatgccacgaaacattttgtttcctttcactttcacgtctctaattttcttaacacatgcatttccttttcagatgaagaaattttgtactcgtttcatagaacaagttgtaattggtactatagtcaaactacactgtaacaaaatataaatatgatactcttgacaaaaagttgggacttacttactgacaatgacgatattatgagaaaatttcatctactaaaatgatatcatatgatttcctgtattttattacacagtttttatgagaaaattaaaacgaaattaaagaattttgttgttagtcattgcaatattacaccataattttcttaaaaagaatatataaatgttacttgtagtatttcttttttgtatagtggactttgagaatgtttctgcctgagcttttggcgaatataactatgagggtgtgagagaaaacatagatgaaggaataagcgatagatcgaataaaaggaccaatgttgtgagacaaagtaataacataaactaaaagagtaaacgctagtaatagagaaaccgatatggtctaaaaacagaacactccaaaacatacatagattaaccctaataaaaaccattaatcaatttcatacagccaaatctagctggtgaaaaaagattcaggtttttttttacgcactagagaagaacaaaacgaacagtacggcactgagtacagttgtgaacgaggtcggaatcaaagaagatccatcgttccctgaagaaggatttggagctagaaatccggctgtctcaggtccagcagcagctactcctggagcaagacctgataaaattaggttccacattaagaaatctcaaaagcgtaaaacatctcaacgagaaatcacataactaacatggagaaaaagagcagagatttccaatcactcgagcaaatttttacaaagaaaatcacaaataaggaattcacacaaatttttgtcatggttcgtattaattataattttttgtattgtagaatcttagataaatcattttcactttaagtgagaacccagatgatcaaagtcaaacaatcgacaatttttatcttttcaaaattttcaagtgggaatttaaaaacacaataaagcattgcatgagacaaaacttaagagtaaaattaaaaatcaaccaagaagaaagacaaaatacctggagcagtacttggagcaacagacactgtaagaacaaaaataaaataaaaaagcattataagtaatttaatcaacatcaacaacaacaaaaaatagaatcttaaaacagtttcgaaaaatctacaaattattttcttaattaaactgaaaaaattagaaaaaatgtggatttaagaaaccgctctcgaagattaagcataacaaattaagatctacaaaaccggaagagatctaagaaacaaacaagttaagaaatgaatagatcttacatccacaagtagcgatagaaggagcgtgaagcttgcatgcggcgggaagagtagaagccttagtgatattcaaagtaactccaagagaagcactgctcttaaacgcttcacatagacactgagagtcagctttaagcaccgtcttaagaccagagcaacatgtaccttccggtttcgccaccgtgcctccgctcgaaacgaaggataaacagtcagccatgttgagtatgagagtcgaacagtctacagacggagccggcgccgttgcgtggtggtgagatgcgccgagaactgagacggaggatagggatagaagaacgatgagaaagagaggtgttgttgcggtgaaggaagagtgtgttgccattgtgtgggattttgattcttcttctcttttttttgctcttttgagtttttgaggagagagtagagaggttttttaatggtggaaaatgagaaagagtgaagaggaagaagaagggattttgtaggtcggttttggggttttggggtaatgtgcaaaaacgatgacgtttaggtatacgtgtctctttgcattttccatatggatgcgtgatcgtggggtctttcaccaagagacctgccctttcatctttccttctttctttttttctctcttccttttcaagtttttactcatttgttttttaattactccattttgaaaatttattaactttactaggaaaaatttattagctttcatacactaactaagaaaaaattaaatgcacctccgaattctttgttctttcgctttcctattatgcgaaatttgcgggatatttctaacaatcaggggtttccaaacaaaaatctaaactaattagtaattagagtaaaaaaattgagaaaaaaacaacgagaataattgatcgagaaaaataaactattgtttgttactatgttagtgtactctcttgaaaataacaaaccacatttaaggaaatgttttatcctcaaacccttattgatgtttggccttttcagtttctatgtggttgtgagtctgaggccgttcattttttaaaccaccgagttaagtcatggaacttgttgtttgcctctgaatggaatacttagcatgtcaaattatcaatattgatagcttaatgtacgcaagtgaatagataaatattacacgtaaaaaatagaggaagattaatatgagttctatatttagcctccacgattcatctacagagaaagaaaaaaagtaagttacttcgtcttttgttttaaaacgaatttggaaggtcgagagtagagacatatgttattatataacttactctttactctttagctccacacatggatttgtatttatactcgagatgattttccattgtatgataaaagcatcaaatcttatttccaaaaataaaaaagattccggttggtgatttggtcgacgtgtaaagagatcacagaatcgtagccattcggatcgtcaaaaaacactacctaccgacttcaagcaatactgacggtaactaatatttgggccgtaaaactcaagcccatacaatatgggctcattgttctctactcttttgaaaccgatggcctattgtggcctagttgaagagtaaatacataacaaacccacctcataacttttattatcttcccgaattgccccattagaaacaaactgtgtaaatcagtcctcatcctgaaagaaacaaataatttcaatctttgcttctatatcggtactcctaaaatctagcgaaaacttctcttttgtctctcaagtcagactcaattcccatggacttctccgtcaaaccttccggcggctcaccttctccgtcatcttccacctcttcttctacgcctcatcgtttcaaatccgttaccacaccaaccgctactgccgctgccgtctcaggattctccccctccgccgccgctgatcgagatccgatgcattcctggtgggaatcagtctcaaagcaacgttctcgcatcctctctctttcatctcttctctccggcgattctcactttgaagacggtgacgtaactccgatctcctctcttgcagattccgatcggccggcgttatcgttactctcttctcgtgctgcttactctttgatatcgaattctctttgcaatccagcttctggttctggatctgatccgctttgtcaatggctatacgaaacttatctctcctctgatccaccacttcgtctcgttgtcctctcgttctttccgttactcgtcggaatgtacttgtctcgaattcattcctcggattcgacatctcttccttctctatccggattcgaagctgtgcttctcgcaatctacgccgctgaggttaaagctcgcgcaggtaaacctatactcgtacacattccagatctctctcagccatctctttaccacacaccgagaaacggcgttgacaaatcgcgtgattccaatcccaccgcctccgtcggagtcttgtctccgcagcttgagcctcagatcgcggttaagtcaactaagcgagccagcatcgttggcgtgggactacaatgctatttcaaggagatctcacaaatgccggcttggtctaagcttgaattctgtaagttctctgctagttgggctggtcaagactgcgattgcaaggaaaagatcgatgaagacgaagacaaagtcttagcactaactaatggttttggagattcatcctctttcaatggaagcagtggacgtagtcttgagatcgaagaggattttgatagattagcaatcagagagaacgaagaacaacttagctctaatggcggaggagggggagtaggaagaggcgtgaggattccacttccatgggagctgtttcaacctacgttaaggattctaggtcattgcttgcttagtccattgaatactgaagatgttaaagatgcagcttccaatgcagtaagatcattgtacgcaagagcctctcatgatctgaatccacaggcgattttagctacaaggagtttagttaaccttgatacaagcgcacgaacctcgggaaagaccgtagctgcagagactgttaatggctcatcgaatgtgaacactccaagcaaggcgaaaaaacctgagattcttctggcatcaaagtgagtgtgtagtagtgtttctgttaatctgatattgttttggtttgtgtaggttatgatgtatagttgagtttgaaacatgtgagaaaaatttgcagattgatgtagaatctttgttgtggttttacattgttgtgatgcttgaggattaacttggtttgggttagagaagtttgtgagaaaatgcagtggatgatctttgtgttgtacttgtatgatcttaatttgcggttgtgacaatagtcttgtattcttttattcttgttttgcatttgagattgtttgtatcaaaagaatcttgttatgtttctctaaatcgttacttgtcctttgtgggttgagttgtctttgatctgcaaactcttgtgtgataccaaaactgctaaaaacaaaacaaaaagtgagcccaaatctagaaatggcccaattgctaatgaaaccctaaaagcccgaatttttaatttggaaggaagaaactacgatcattcgttcgtcaatttatgatcatgttgacctcttttgactaacttattttggcacaaaagcgaaccaaagatcagtatacatcattctcaatcgatctaatatattccagaaaactttgatgatgcatattcttggttttattgttgattttttttttttggggcaaaatcaattcatctcattcgaaaaagttagggttccaaacaggggaggaggagagcctcctttgcgaaagcatcagcctggctattttgactatgaatcaattcacacaaattggatagccataagtgattcctttcgattttttaagtggggatgatagcattgaatatgatagcgtaaccgcaattcaaaataaaacacacaaatcttgtattagtagtaagttaaaacatcattgtgaatttgtgatacataatgaattaatgattatttagaagaaaaaaaacatatttagaaatttgttttctttgtcccaaacaaaaaaagtcgtttcctaattaggcattttcgataaatacaaacttaggataatgattagcgattgtaacttcgctggaatccacaagaggtcctaacttctctaatccatgaattgtccaaacaacatcatatgtatatttaatcttttcagataatcaaatatcaactccgataatagataagcttccattaatcaaacatattcaacactttttccttgaaaagttcgttcatttaaacatattccgtacacgagtgaagaaacaaataacacttttatataatacattttttgtttacaagtacaatcttacacttgaaaatcaaaacgtaaccatcgaccacaaaatgctgtagcaagcttttatttaaaacaagtgattattaattaacgaattcataaatgaaaaacaaagctcacatttgtgtttttttaaatcttagttgatggcggaacaaacccgacgaatctccccatctgatccagtcttaacttctatgagactcattttgaccatcgacttcccgaactcggttccgaacctcaaggatggtcggcgtaatcctaataaacgttcaatgatggctcgggtctcgggatccttccataggactagatcggattggagaaccacgcgacttgacgtcaccttccttaggaacgatgtgtcaaacttgtcaacacttccctcgtctaactccactcgggtgcctccattttgagggcactgagccagaatcagcggcacaaaactcgggtcgattgatgggtcaggttgtcctgtgccgttgaagttaacgaaccttccccttactagaccgcagccagcagttcctattgtgtgtccgcctggtcaaaaccaaaactcacttagaaattagctactaggaaattattttctgaataacttacaaagtgttacatttaaaccatatgcaatgacaacgtaccaacaagagtcacgaggtctaatgtgttgagagttttagcagcgaagtcttgcttctgcttagcaacggagtcgcttggtccgggcaagttcacgtctgaggcttgcgagattcggccgtcgagacgtcccaagggcacttcccagcgttgtccaccggtctgcataaaccaatattaaattaccgctaaacacgaccatatatatatgttatatattttaatcatgtgaaatacacacataaataagaaagtaagaaatcgaatgaaatatgtaatgcatgtaataatttcagtatattaccaaaacgacggcgtctcgggctgcaagggtgagaatatcagcacaagaaacggtacgaggacaagccttctcaagccgagccttagcttcttcaataacttcgaaccctctcaatgaacggttcggaactgcggttctctctgaggtgttaccagcgaggagaaccgagccatcgcagccatggacaaagcaatcgtggaaatgcattcgcaaaattccaggtgcattagccgggatagaccggacatgagactgaactacagatctcacaatagactctacgtttcggcatctattcccataaaacccaacatgtggtcttcgaccaccaccgctgtttgagccacggttcccttgtgcggttacagctgcaaccaatactaaaaacgttactagaacgaatagcaaattgtaaccacgacccatttttctttttagtaattaaatagaaactatttgagtcttgtagaagttgtgtttgttgtgtgttttgagtttgatgttaaagggtttgtatatataggcaaaaaaagttgtgggaataacaattgtaacgagcaacttcggcacacgacgcagaaattatgggaatttaataagctgatttagtaatcatttataaaataattagtttgaataacagtgtagatgagtcggtccattgaacatatatgtattatacatgttgtcattatttttttctttttgagcgaagctatcttggttttaagttgtagatgattggtaagagaatcaaagtttgttcaaatcgtacctagctataataatttggatcaatagttttggtcgaaaacaaaatgaaaactaatataaggtgaatggtataaacgtaaagcatcttaaaactctggaagaaaaatcgattagtgtttttcgacatgtagctaaatcggccaaaattgcagttgattaattggaaaaaaatgaacgatacattaagaaaagtgatcaaatctattcaagaaacactaaaatgtgattttttttttgtaaaaactaaaatgtgattttgaaaaatataaacgcaaattattcgtgacaaaatattaatcagttggcttaaaaagtaaaatctccgataccagttggtaccacaatagtgatgttttattagggtcaaatattgcttcatagattagatcaatgagttacgtggcgataatatagattacaaagttttggtcagaacgttagggatgatgaaaatgtaacgggcatagttgactttttaaaatgatcaaatcgtctattataatggtatatttgtttctctactcttttggattagccaatatataatactactatttattctttgaaggataaaaaacattaaagtattcaccgccatggaaaatttgaaccatacaaataaaataaaaaaattgaaccattgaacaataatagactaagtaggtttctgcatggggaaagtacaaaacaaagagaatatgtatagtgatggctgtagttagttattcagttcccttaattaaagtaattaacgagttacaaagtaatacagtataacattatatgatatacttgcagctggcatgcatatgtatgtgtatgtgtaattttctgatgacggaaaaacgtgtgtgaccgctaaatcacaacttgtaaatgaattcgactttaaaagtgtgctgcagagaaattaccattttgaaaaatattaactaaaaacaaaactgttacgaattaatgaaaaccgtatgaaactagtattttttatttttttttgtcaaaactgttacgaatttatcaaagctgtaaagagataagcttgatgtcttgtttaatgtttactagatagtcggtgggtaaaaaaaaaaagagcatataattttgactgaggaatgaggatgtcttgtttaatgaaaccaccaagagacaacttcgaaggcataatatcattgacttgtctttttctttattgtcaaagtcaaccactgatatataattatccttactattatccctttaatcattttccaccaatgattagattcatttcgaacagtgaattcaaactgaatcgttccaactttgattgacttcactaattgtattttatgttttttgtaaaagtcttattcaaatttcactttacagttaagagttatagattaagataaagaaaggaaccaatattcacatttcaagtataattaagaacgataactttatacaggacacataattttaattaatatcggtctagttataaaaaccagagacggagaggacaaatttcacccatcaccgagcacgtacatgtacattatacaatatgagatgagactaatattcatcacccagttttctgccggaaattggcgaaaatctcgtgataccaaatatactattttatgaaatttaacttcatcttgaaaaccaatcatccttattttcattacatcctttattgaattaaaaaaaaaaaaactttcattgcctcgagttggaaactaatgtacatatttagacgttatatatattattaactcaattggttaattttattgacctaaatgttattctattttacgtttgcgttttttttttttgatatatccattaattaattgtttctgtttatagtccaattttttttttcataattaacagccataaaatattctaaagtaggagaatttcagtattacacatatatagcttattttaaattttcttaagagattacaattacataggatttcttttttcttatgtgtgatttaaacacgtattccctcacactcacatcgtcgtaattaaacctcttagtcacattaaaagaaaatgttaaactagctggtttattattaaaagctggagagtctatataatctccatttttattcattactttatatcatattgtaatggttaattaatcttatattaattagttaaccgcagaacaaaccctacgaatctccccatccaaacccgtcttgatctcgatttgactcatcttggtcatggacctcgcgaactccagtccgaaaataagaaacggaaaccgtagtcctagaagcctttccacgatgggtcgggtctcgagattagtccataggacctgatcagactcgaggagacctcgaccgttcttcaagttgttaaggtacgacgtatcaaattggtcaccacttcccgtgtccagcactacacgagtcgcggggtcaccattcagagggcattgagcttggatcagagggacaaaactcggggcgatggttgggtccggacttcctgtgttgtcgtagttgaagaatctgtccctaaacacaatacatccggccgttcctatcgtatgtccagctgttatataccaagccctctatgtgaattagccaggtgtcttcatgacaatttcaaaatatgtaatttgtaacatacagaaagtatttattatctcctttgaatgttaagctagctttgattctttgtttacgactttacgtttgcagaaatatataaaaaaggtagaattttcacatgcaaacataatcgaaaaaacaatgttttaacacaagcgatcgaggccttataaaatcactacgtaccagcaaggacaacgagatcttgggtattaagatttttttcggcaaacctcagcttctgcacggcaacggagtcggtaggtcccggcaaaatgacattcgaggctagagaaattcggccatcgagtctccccaatggaactggccaccatggtccaccggcctatatgcatacgtataaaactttcatttaatcacgttgtcaatagatagacatatatgcatgtgacgttaaaacccaagacgcacgatagacttatgtatataattaagtaaaattagaaaagtaagttataccaaatggacgaagtcacgtgcagcgagtgcgaggatatcagcacaagagactgttcgaggacaagcgatctcaagctgagtcttagcttcttcaatgacattaaaccctctcaacgatagatttggaatcgccgttcgctcagagttaggtccggctaggagaacggaggcgtcacagccttgaacgaaacaatcgtgaaagtgcatacgcaaaatgcctggagcattggctggattagcaagatagttagactcaaccacggaccgaactatcgattctacattccagcatgcactaccgtaatacccagtccgtggccttgggaggaaattgtttgtatgtgttgcattcgtggctaggacaaggaagaacggtaagagaacgtagcaaggatttaaattagtaaaacttctcattttggtttcttcttagtttttaaccaaatggtgcatatatgtatatataatttggattattacttttgatttgttgcgtttaatagtttgagaattgtgtgtgtatatatatttatagtggaaaagagtaaaagattcgcagagtttaatgagtaagcaatgccgggctactcatcaactaattggagctacgttgtatttagtcgtgatatttaattctttgttgatttattttgttaatattgtaattaagcatatgaaatatggtccatgtatgtgcctaactacctataagtagatttgtgatttgttctctctcttttaacctaattaaattttatgctatttagcttatagataattttgggaaacattagtattatttgaaccacaatcaagatcaggtgctgtggtgcattgatcaatgactcaaatatgtgtgtatataaacttaataatatcataatcgtccgttcaagattaatgggtttgccctgaaatgagtatgggatttaattataatcattgcattgcttagttaatagtcaatatgcgttaagtatcatacacgcaacgcatagggttaataatattttgacgagtcggacaaccatattaaatattgatttttttccttcaatttgtgtttgtttgcgaatgtttgtcaacatcacgaaaacttattatatgcggatcctatagatatggatttgagtttgacggaaacaaaaaaaaaatgaagaagaagaagcagggatatatcatatagtaccattaatgtgttgacaaagaatataaaaaaagaagttaataaagttggatgtagttaactatatatttatattgcaactagtcgatcaagtaggcaaaaaaattgatgttgtaacgggacgactagaaagtttgaaaaattttaaactaaattatctagcatcaaaatttgatacctctttgcttgaaagaatttctaatttttgtatttcttaaatatctttacaattttgtaactaatcaaattaaatctatgatataattcctcataaaaccactggaaaaaggaaaatatactataaatggataagacggattgtcggccattttctctggtaattacgtaaaaatcacgtatcgttattatccttctttttctaaagtacttctcgttattttttcacgcgttttatttgtacgaaggcacgaggactgtcttcaacatcaattcttaaatcacttatgcaatcattaatattaagttttcaacacacagtcattataacgagaacttaccctaaaagtatagtatatatgaggataaaattctaaatatttatgtgtttactgctattttttcttgagattttaaacatattactaatatactttaaaaaatgaagtttaatactcaatactgcgtgtaatactatgtatcagtcaatattaaagtccccatcctgactagtttagggtttaccgcttaaaaaataatttagttttagtttagccttctaaattccgaaactgctactttggatatagatggtatacgacaataattaaacacgaaagaagtttgagttaaataccgagaaggttctatttttagtcttttgatcgtaaatagtactaaatacatggacaaccccaactttatttcaactgtttgtcttctgacacaaaagtcatcaaattttgtcacggggtatatttttagaatttcggaaaaaccatgtacagcaatcaaatcaatccatcctaattataacacacgtttgaaaatacacaaaataactatacattacgtacaactttaagataaatatacttcttctgtttctatataaatgtagtttaaggatttttattttttttcaatttaaatgtcgttttcaattttctatgcaaataataaatgtatttaatattttttaaccaattatatttaatcatctattttttattggttaaattggttataataaatgatgtttttatataaaagaggtaaattaaatgagatttttataatttcttaatttgtgtgtaaaaatcttaaactacaactaatataaaacagagggagtatgaaaatacacaaatcaacttatttagttcgttatcacaactcaacttctttagcagaaaaaaaaaaaaaaaactcaacttctttagttttccataatgaaaaatgtaaataatcaaatatcagaaaagaatgtttttagtggtggtggtggagatattcgatggtcaatgactcaattggattatgtcgttctatttttttttctaaaatgattggagtacgattgaaaacgatattaaataaatggaatcgttgaaacgatagacgttttacacggatgatatcttcaactcaaaatgtttctgagtttttagctttgaatcaatatattggtaaaacgcgtgaaccacgccaaaaaaaaaattaaaaaaaattgatatcctaacatcaaaatctacactcgttgatttaccttatgaccatttgttttggaatctagttatctaataataatccggtttctgatccaactcaaattttaaaacatattgcgaacaagacatcaattcaaagactaatataagctagttctttaaaggtgtgaaaagaatttttttcttggtctaaatcaatacagctaatacattcacttaatatagaaaaaatcaaacttagtaacgcacacaccatgtattaactataatagcctatataggattgccaaagtttattgattcatgcatttgcatgggaaaaaaatgacagtgacaagatgatggagatcaactttgcctgattagtatataattatcatttaagatctcggtattgtgcttttttctattttagtatttactatttagctagtatataaatccataaactaaatatttgtcagaaaaaagcaatttgttttcctgattataattcacacacgtacatttcctggtttaacataagattcaacatatgtaaaaatatctaacaatatacatacacagatacatgcatacttaggcagttagaccagagaattttcacaatgcatgcaactaataacagggatttcaaagttagagagatagggacaggttgactaacatgttttgcaaattattgaagacaagactatttggccgtccttgatccttgagattctgagaatttcaaaagattcgccagtttgatcaattcattattattattattattattattattatttttttttttttttatctttttttgcgtttgatatcgttgtaaatagttaattagttatggtgcatgaatatgattttcggaattgaataatgtgttaacataggttataaatttaagaatccaaactaggaccaaactcattataatatttttgtgaagacattacagttttttttaactaaaaccaaaagaaatcgaataccaacaccttatagatacaattttcatcaacccacttttgggttttttctttgtatgtcgttttctattggtttatttattgttcagattaaaaccacactcgaaacaagtactttgcgtcatgaaagtttatcacgacagattctaatcggttaattaattaaccgcagagcaaaccctacggatttccccattagctccggtaaccacaccgatattactcattctgaccattgacctcgcaaactcaacgttgaaggtgcttctaggagccatcaattgttgcactatgggtctagtggctggatcggtccaaaggacttgatcggattggagaactccacgcccacggcttaggttgttgtagtaagaagtgtcccaagtgcttccgcttccggtgtcgagatccacgcgcactgaaccgtcgccgttttggggacattgtgtttgaagctgcgccaaaaatgttgggtcgatggttggatctgcggtttgtccggtggtattgaatagcctgttcctgaatacaccacatcctgctgttccgatcgtgtgtcctcctgtttaaattgtaattgatttagtatatgttgctattattcaaatactgaaaactgataaaacaataaaattattttaatatttttaacagaaattttaggcgggaaaaaatggagaattgttacgaatttaaaatatatatttaaaaattagcgattaagaggtttaggtgccagacgttatcaagtgtccaacgaacaaaattagttttttaatgttaatgttttggaataatggtggtttaattatatatagttcttgaatggcttcttaaattgtgtaaagtatagactactgaccgacgaggacgacgagatcacgagtattgagtcccaaggcggagaatttctgttgttgaacggcaacggagtcacggggaccagggagattgttagcattcgaagccaaagaaactctaccatctctacgtcccgttggtacttgccagcctgttccttgagtctgcatgcacaataacccatgcatgtataacgttatatacatgtaaacttataaaagtaatgataatgcattaattacgtataacgtttatgaaataattaaggcttacgagaatgactgtgtcacgagcggctaatgctaaaatatcagcacaagagacaactccaggacacgcggcttcgagctgcgttttggcgttgtctatgacttcaaatccttggagattgaggttcggaccggcggttctctcggtgttagctccggatataaggatcgaaccgtcacaaccttggacaaaacagtcgtggaaatgcattctcagtattccgggtgcgattctggggtcagaactgaaaccagcattcacggcgtttcggacaatagtctcagctctaggacacgtagttaagtaaaacccaatcctagtgccggaaacaggaccaggccttgcggtggcttggccatgaaccgagatgatgagacaattaaggaaggttattaataagcacaatgatctaaccaaacccatcttgtgtttaaattttagggttttagagaagatgaagtgtgtgtttaagttatagtgagtagagttagttcgttatagagtactatttatagaggagattgattagtcaaagaatgacgtgtgagtcaacaaaaccggctttggtgtttgtgggggatagatgaaaaacgacaccgtttgtgggagattcaaaagcgcgtggtgttggtcagtgcgttgtgagctggtcgactggttgactttaaaagcattttcttttggatttgttcgttttgatacttttttttttttttttcgttttgatagttacttggtgtgaaattgattgaattatgtaacgaatgatggaaatatcgtttacgtataggagttttgaatttaggttcatgcctaattgatgtatagcaaatatataattaaaaatgaggattatactattttgttattaggaaatttgtatatacatccattttttggtaggtagatctcaatattagaggattaaaacgaacatcaaattcttctttaatttacaaagtgcaaaagtctgccaagtggattttaataatggaaatatccaaaggtttataaattctcactataaaactactggtagtaaatgaattaacttgtgattggaatcatgaagcaatctggttcttccacaaactttagaaattaattactctgaattttggttcaagattcttctgtaaaaaaagaagaagatcaggttaattatgtttctccaaactcttactatattttcacggcgaatacagttttgtaatttacaaaatgataatacactctttttttttaataaaaaacttcttaataaactattgctaatgattataattcaaagtttttcccttgtgattcacgtacagttcttatatatttgaaactatagaaagccatgaaccttattagctatatcaccagaccacattttttcaatgtgttatttattgtgcaatgatcaaatgagagactaataaataacgtaaaagattaatggttaaaggaaagggccgaggcagttcatttaagaagtttctacaaaccaaggtccctagcttatatggagacagatgtatttgttcttctaacgacttgtgctaagcgataaattgtactattcagaaacctatcttggagacaaaacacattatctccaaagactagtactacttcaaatatatgtagattacacgaaaaaaaaccttaattgagatagatgaaaattatatatatatatttttttttgtatcagtctcatatagtatcattgttatattcctcaaattgtgaccgctgactttataagataagatctaaacgatcatctttccttgaggatattatgagctttatttgtctacgcctctctaaatatttttttttgttattgtcaaaagctcgatttatgtttttattatattagttcttcaaccaatgaactaagattgagattatgaccgtgactgtgtcaaacaaggatattgtttagcatttgcgtttacatgtattaaaaaaataatgtaatcatattcaaattttgaatgcatgcagaacgaactattttcaaagtatgacatgtacttacagcctatgtaccactgtattacaaatgaaattgtaccacattcctatcatattgttgtttctaattatacaattatctttattaatgaatattgttttcatatttttcttctaaaagggtaatccacagtataattttcttgtatatacgactagacgtctcacatttttattttttttgtttgttaaaaaaacgtctcacatccgtccgtgatgtatggacattcgacaaaagacttagggcttgtggttttaagagataaataaatacattcgaaattgataatgttttggaagctgactttgagcgaagtcataataagaagagtcgataacagactgcggaatccggcaattagtgggatagttttggaagtatctccggtttaagttcttcgactttcttatgtcacaaaatcttccggatttttcgcttttctgatgtcagtggttgaagtttcagtgaatcacacgattgtgtatctatcaatattttcgatctgatatattttgagtttttgaccaataactaaaaatttaatacctaacttgttttagtttattttatatttgagaatgtatatgtgttgtattggttatcatgtttttatttaataaaataaatttgactttgatgaacaccactacatccaaccagacaattatccactgcatggcctaaccgattttcagaaaaaaaataatttgagtttgtttttgtgcggaaaaagaagttttagacttttgtttttcaaacaaaattgatgaaataggcgactaaaagagttcaattttttttaaaaaaaaaacagatttgaaaaagatagttgtcgtatgcctcgattaaccctaactagaaaatatattctttctgtatcaaaatgaaacaatgcttatggttttgggatttttgcacagaacttaaaaaatcatttagttatttagaaaaaaatattttaaagactataacagtatttataaattagttgaacgaatgataatacaaattaaactagataatataaataatcatatcacatataaaaataataatttggtagtaaaactatgaatcacgttacaataaaataatctcttcttaacaaaaataataataataataataatctaaaacactacttaatagatatgagataaatacgaagagagtgataattgaaccatgataatatatctatagatggtagttaaatacttaaatataatcggtatcttcagatgatccaaaaataacatgttcatcatccttatctcatgtgacttgtacacatagtagtagttagtgaaactctactaccaaatgaatattattaatctaatgatacttatgatagtgacaagagtgatgtttaccaagtaaataacaagcaataaattaacattaatggtatgctagagaaaatataacgtgtaccattgttaattaacttaattttaaccaaggacactcctcgcaataggagatttcttcatttgcatgaagaaagagtttactacctggccttctaactctaatgttatcgcatgtttaccatcatttgtacattagaagttacgataactttataagcgtaagtaaatattagccgatgaaagataaatcagatatatattatattaactaatatatattttttttgtcaacaactttaaataaaaaaatactgtcaaatgagccaatccaataaattattatttaaagtttttttgtcaacaactttatatattatattggatttgctcatttaacaaaagattagctaatatatataaatttttaggtggcttctcataacttaaattcaggtatgaccagagattccggaccaaaagggtaaactataatttctcgatcaagttaagattttaatgaaagccatatctgatgtttcaaatggacagaaaatatccgattataacagacttcttacacaagagttttcatacatctctctgtctctctacgcctcagttgcctgaacctccctcggcctgagcagctcctccatctgtaacaataacagatccaacaggatggatcaataagtctgtaacttgctttgggatggagatgataaaatgaagatatttaccttcaccaccctcagatggagcacatggagacttcctgtaacgtgtctgctgctgcgttggctgcaaaacaaggacaagatcttagaattggaaacaaacagcataaaaaaaaaacagctgaaacagggttcaagctcatttacctgtaacttgggacgaagggcttccaggggtccctttggcttcgcaacaccttgctgttttagacattaataataacactatcagagtgggaaccttagagagagcttttatatggtaactcaaaagagacaatattcgtgggttaaaagtttaataatagtttacctttccaagagcccaatcagctgagtcaaagtatgctcgctcatgatcctgattataaacacatctcagaaaaaccaagaatgaaaccccaaaatctcttattagaccagttacttcacttaccttggaaatgagaggtggtttctttggcatgagccctccatacttcttctttacaacagcctcctacacaatgcaattaaagaaagagttaggtcacgatattgtattcattacggtatttgatcaacatctagtgtgagaattaaaaggaaacctcctgctgtgatgatggcattgacttctctgcctcgttggtgaggtttccttgctctttcacatcctctgcgctagacatgatgatgtctcaacgccaccaaaaccaaaaatgctgcacgagtatataataaacaacattacttaaacgaaaatacgcaaacctcatgaacaaataacaaaagcagactcgagggttcatcaatgaagcgcatatatcaatcaaaggaagctaattaataattgaacttcctatttgatactagttccacaatcctgtgaccacacaatctgttctgaaaagtgtagttttgtacagctcaataaaacgaatgaacctaactatgaaacttaaggcagccaaaacaaaaaccctaagtacaagaacaaatgagtgtatactccataagataggaaaagcctccaaaagcttatctatacatgtaaccaaaacagcatccagaatttagagttcagattcgacattgaattcaaatcaatttccagattgacatcaaggatttacggtcatatggatcagatctccacaatgcatatagacaaagattgtataaacctagaatttaacctaaacaacggcaaatgatcagatcacaacaaaaacgacagcggatcagatacacaatcaaaactcaaaattcaaatcagaggcagctcaaacaaagccctaaacgataaacaatcaggttcctatgttgcgagattgtaaaaaacgacatgacgagatagagaatcagagaatttgaatctcgatcatcatcatcgagataagaaaacgaagaaacgaaacggagaagttaaggtttataaaaacgagatcgagattagactcaccaggaggaagaagaagaagaaaaaggaggattggtgtggctctctgagctcgttgggacgtttcttcgctgtcgtcaatggagaaatgggagaagaagaagatcttggtgaattgattatataaagagatgtgtgggagacagagagatatgatttgggtaagaagaaacgcggcgcgagggttaatttggtaattatcttcaaaaaagggttaaaacacgtgattacgattcgtttgagagaggtttgacaaaaaattaaaaccgttgagagtaaagacattttaaaagcgttttcgcttttctttgttataagacgtgaccaaattaatttggctgattcgtgtgtatgtttgcggttttttaatggcataaaattgttgaatcgattggctcaaatgttttcgttcttttgttcttagcttacataacatttacttactacgtgttttagatgtttgtactatttgaaatttgaaattgtagtttttgttttctaaaatttttttttccgggtttttaaactgttgatccaataaacgttatatttaatgtcttttaggtacttttcactatttcaaatttcaaattgttgttttgtaagattattttgcgtggggttttaactgtaaaaaccgttgagccgataaatcaaatatttatgttttagttttcttttcttgatatctatttaccatggccttgtagatgcttcaataacttcaaatttgaaattgttgtgtgtgtgttttagaacttagaaaaatgatgataattgaaaaattagacatttaagacataaatggtaaaagaacataagtcaaacacataaatggtataaaaattggtaatgaataatgacaaacaaaagtaaggagtaaattacaaacaaacacaattacttgtgaaaggataagaaagagcaatgaagtttgtaatcgttttgtaaccaatcgtttttacgtttttctttgtagaaagatgagcactcgtccaacggtacaaaattgtccagcaaaaaaaatcaaatccgaaacgggttaagctaaaaaaacaaaaatttaactataacgatcttatctcgaaaagcttgatttattcgaggtcatatagctaaacctgacttctccttgggcaaaattgttcaacaggttatacacgtcacaaatgatgaataatatatacctactcctaattacaaccctatttaagtgattgaaattactgatggcacattttcattgcgtcataaaagattcattcctagatttcaaccattgtcttaacaaaacctcaagtaattaaaacaaagcagtagaaaaagaaaagagaacttgactacaatgccaagaaacaagagaccatcaaaatgtaaatcttggtaagacttttgaaagagaattgggatatggtggaatcaacggagtcttctagcttctctctcggactcgaggagagtgaggacatctccttctctgacgggtcctttcacgttcctcatgatgaaacggtctgaatcagtgaatttgactctaacctgagtgacctgaccacgagaaccagtcctacccatgaccttcacgaccacggcgtgtttgatttgagaatccattctgcattttcacaaatgtagaatgtcaagatcttcataccaaccagagctcaaattgaaatatgtgattgtattaagaaggctaaatcttttatctaagaaaaaagttgtagaatacatgattgttactgttccacagatcaaatcactaaaaccaatgcttatgttcaacacaaaacaatctgaaattacacaaaaaaggctctataactcacaacacagagtagttcgacagatctttctcgatttgtggattctctaactcaacctaatcttatgctagtacgatcgataatcgagcaacgtgttaattaaaaaatgtagaacggacaactatatacaaaaccacaaggagagatctaagaaattcaaactccagaaacaccacgcaatgattctacgaacatgtttaggatgagaatcctaaaagagaagaagaagcggctgaagcacgacgatattaacagagcgacggaacaatggaacgaacctgtagacggaagcggcggatgctcagaagaagctaggcgaaatcgagtttgccaaagaaaaaccctagaatcggaaaactgagcgatggatttattggtgtttatatactctaaatgggccacacttaagaagctaacgtcaatttttaagcccatatttatattttatacttttgagagttagtatgaaatacaaatatgggcttttgagtatggtccttttaagagaaaaagcccatactttagataacatatgggctttttaagtccattgaaattcacattagcttctacctttttgtcggctagcttctacctatttcacaggtataaagactggttcgaaaggcgcgtctagccctcttgatgaatgaaagaaagggtttctgagccctagccctgtaagcccacacctgtgtagagtagatcgttcaacacctgcggcacaaaccaatttttgacacatcacaactcacaagtccttcattacccgttcttaatcaaaatctctaatgtatcgtttcaaaatgtgtattttctttcacaattgactagtttctaactaactacttccaaattcttccatgacgattccgttatcataaggtcatgattttgagaataataacttcacaaaaggcatacagtatttagttcaattagaagttagaacacatatagttcaattaaattattagtactgcaagtatagggagcaaggaaaggaacaaaaaaaagaaaaagtattgggaagtacactacagcgagttgtgtaaaaaagctcagagacgaaagccagtcacgaaccgattgattccagcaaaatcagaaactatcttcaaatcagagaaacagtctttgagatcactggtcatcatgtaatctacgatcatcttgctttgcttctctccattagtctgcatcatcataaacaaataggattaatctttcatggttgatgtgattattagtatatacgcaaacatcttccaaccaaataaacatataatgaaaattgaccaatcaagactttgatctttgagtggcaatcataatcttcttagaacgccaaattcttactgataaagtgaaagcaacaataagcaacaattgtttcttcggactcatacacaagaacgattatcttaaatctcttttcaatactaacatttccggttttagtatcagagacaaagagaaaaacatagtaaacccaaacgattgtatctttctactaaatattttggagaaacagagtgaaaataaggtaggtacctcgaaaacgaaaaagccaccaggttgaagcatccgagaagccccatgacagagatgaaaaagactatcagttccatcaataccaccatccaatgcaagtttcggttcgtgtctaccaacttcagcttgtaggcctggaatgtcatcacttggtatgtatggtggattactcacaagccccacaagttttccttcaagatctttcaaaggctcaaaccaagatccttctctcacttcaatcatcccctggataagtccaatttcatcacaatggcaagaagtaaccaaagctgaagaatctcatacatatatcaaaattcacaaccaccatgagaagaaatcaaactgaaaattcttcaatccacaatatactgcttttatctaccaaatcctctaatccattacaactttgatgttgaaaattcccaattccatgaatacaattggtataatttgtcatgattagctttagcaaaaaaatcaactaacctcaaggctgtatctctgcacattgtggccggcgacggcgatcgccaccggactgagatctgtagctataactctcccacggcttcccaagactttagcaatgccgatcgcaatagcaccacttcctgtcccaagatcagcccaaatatctttcttaaaccattcatctctcgttacaagctcctccaccatatcgacgatcagttccgtctccggtctcggaattagaaccccttcctcaacgcacaacactagatctctccaatgctcgcatccgacgacgtactgaaacggccgacgcttctcgatcctctgcctccataaatcgtaaagctcctccaacgacgctctcaatttcacattcttctcgccgttgtccgcgatttcgcttctatgaagaatcactaaaggatcgtctacgattgagtcttcgatcagccattttagctcacggtggagaatgacagagtcaagagtatcttcggaattcttcgaagattcctctacggaggacgccagatctttcgcccagtcgtgccatttccaaacctccgatagagaagttgcgtgcgacggcgtcctaaggtatagcggtgtcttgggagttatgctgagagacttagtcggccgagaggattttgactctgtaagcgacgtgtattgcggtggttttttcgccggagaagatgagcaaagaggtttagcggcagagagcaaagaggttaaccgtagacttgggaagattcttatcatttcaaggtttttgccgcacaaacagaccaaatcggtttataaatatattaccaactaaaccggataatccggttctgtttttagccgggttttgaaccgaggattgaaataagattaacaaggaatataaggggctaaagcataaataaagaaaagttcttcttatttttgtttgcggctccgatagatctttggagcaacgaacaaacatgagcttgacgctgcttcaaggctattcttctgctgaagaagaagaagcagaggagagagcttttggggattacgacaactccgacgaagatggggataatgatgttcggagatatgaatcgtcttctgtgtttgatttctctgcatctgcctcctccgctaaaaacgccggccttccttcagctgacgacgttttctctcaggtcttccttctctttgattttgattttatacacctcaattcatcgaattgtcgttttccttgaggagattcgctgtgagattgaatggtttctttattatagatgaaaataagttacttggatctgtagatttgatgtgatcggaatttagggttaggaatcctgagactaggttaggtttggggtttgaataataaagagatcttctgatagtgaaaacttttcagtgttcgttggcttggttacttcttactcgaaaagcttatagtgaatgattctttgcttctattgaattttgcagatttcagggccaccggagtttctaaacaaccgcacagaagcagataatgaagcttcagctagagatgcagaacatgcaaatcgtattagtcgcaaaaagaagaaagttaaaccaaaaggtagccacaactcttttgcatcgtcttagcattttggttatagggaatggtacatctttagatgatgttgaagaatttacatcagtaggtttaaagttcacaagattacggatttgtatctcgaaaatatatgtgaatgtggatttagctttagaagcttgttttgatacttaaagcataaacattgtgaaatatgaaaccaggcactttgtgttgtaatctctatctatccagtttcacagttctgtttatggaactgttgttatctctcgatccagcctgatggtttccgtttattggcttgtaggtgttgtcatggaagcaaaacctcaactagtaggaatccatgagagagtaagaaacgatattgatgcacccccatcttcagagagtggtgaaaagcggatatctactgcaaccaatcctaatgcagaagaatctgcagatctcttgaggtatgaataacccttgccctcttcttcattctttagtataaatttgcacaatgtgagcttgattaggatttctatgatgagtttaggatgtgtgtgcaatgcggtgtaccgaaaacatatacaagcgcaagaggaatggtatgcccgatttgtggtgaccggccattaccggacgtagacgcgaagaagaaaggctctacgatcaaagataaagagaagagcaaaagaatgagaggacaatcttctcacgcttcttggaaaagtgaaaccgagatgcagcttaggcaaactttcgattagtgtttcttttaccttttactacatttgtaccatccaaatccaatttctgtaacgtagcttgtgacacaaaggttaatcttataatttgcttcggaatgtctaatttcatcattattgaaatatatatatttatgagatcatcaaatatttattggaaaataaaaccctaaaattcgctattttgaaaaaaagagagtaaatacacagcagaatattttatcgcattacaaaacgaactaacatctttatctacagaattgctatgtctctacttcttcctctacttaacaacttgaacagattacaaaggtaaagaacatatcttaaagacctggttcgagcaaccaggtgtacaatcaggttcgagcaaccaggtgtacaatcaggttcgaaccgaaatctagaccagaaagttatctcaacacataaatacaactgtgttacaaaatccatgattctaatgaagaagcagtcaggattttagtaactaacctgagcaatttcgcttagccaaaatcgagattagtgttaacaacaatatctcgaatgcttcagcaatgaaagagccagttttatttgacatcattaattgttgtcacttgttacaacttctgcttcgggtctaagttctgtagtttcctcttgtttctctatcctcaggctcggactactattgggctgaggaatctgtgtagatagtgatgggtaaaatgaggcactgtgttttgcacattaaatggcggtgtaagaatcgaaggtttaacttaccattggatgagatttataagacagaacattgttatcggatgaaagagatgagtctgagggcctgtgaaacagcaaatgagctatcgatcgatctatcgggtttgtatcagtttcgatatccatgaatccagcatacctggatgagaccacatacagatatcaaagattagaatctaagagaaatgaaggacgagtacaagagcccaagtggaagtttctaaagaagagagttactaaatctgtcaagactcgagtctaatcctatataaagttataagttggcatcaagaactttacttagcaacaggtgataaagggtgaacatattgaataattatgtaggatgtggtgcttacttgtctgcttcaccagtcacgagatgcgagcctgcgcctttctccggtctgtttccaccatgatgtctctgttccgcactttttgctaatcggtataagctgtctcttatgcaaagctttgtcctaacatccaactggagcaagcaagtgtattatcaaccaagtaagcaaatgtatatgtaaatttattaacatatatacactttgatatcaatcacaaaggaacagcaaacttttaccgattcccaggaagccttttccttatatcaacaattatctattgacaagttgtacctgttctataacttgttgaagctggcgaaaacttgttgcttccagtgaaatgtcatccacaacagagctaacacaagaacttccctgcatatttgatgtttccaattcagttgcagcttttctgtggtcattctcaagcccaatcttctggataggagcagcatcaggaaacaccatggagtctgtcttactactcttcttggtatttgcagcaaaagaaggaggcatatcttgcccaggcagcaagttggctctcgtttcaaagaccttcctaaaccgatcatcaacagttggaccttgtaagctctcgattgattgtgcatgatttgatgtgtatgactcatttgaagcagaggaaggactgggtttgttctcagatttaataccagatttactttcacatgctgatacttgaacggaaggctgctcacaattgaaatgcgagtatggcacatctcgctgttggaatgcggagggagggtaatactggttggtatccattatttcccttgaaataccactgtgctgtaaagtaaaactgttctccgagaacccatcacttttcccatccagatgatgaagatgatcagtctgcttcttctcaagatttgcctgtataacaaaaatttgtactgatatgaaattgctggaatagtgtcaagatttcaacagtacaaatacttatctaatagaatatccacttgcccttaacgaaaccataaaccaccattgtaaaaagcgtcatatcatagttagaggatttaactgaggaaaacgtgcaactaaataagtcatcatagaaggtaacatcccatgtagttaatggttgcatgtgccttggaaggcgcaaacaattctgaaataagaaattgactaacctctacatccagcatcaatatatccttcttttgcaaacttgtatcgaatacattttgtgatgattttccttgagctgaatcgtcctcaatagtatatccatactcatcttcaacagcatggttgggctcactgttgttcaaaaagtcttcaacctgcaacatagcggttctttgattttccaacattttgtctggtttgagatcatctgtcatcgcgcctgctgtctcctcatttggctgggcagaagagaaccaccctaagtcaccttcattattaagactatccaagccgaatgttgaatcacaactcctgtgcgtccaataaacgagtgtaggctcagacaaatgttaccatgtttctcccataagcaatgatccccaatgtgataagaatatatagaaaagagaatatctaaaatgttacctaagcatgttgtccacatcctcaaaatttcctatgtcaccccagccatagaagagatcatttttttctttatctccattgtcgaaaaagctaagatcattttcagcatccggaatgctgttgagggaataattatatacgccatcattcgttgcagcggaagtgtcacacaacatgg

SEQ ID NO: 958 - DNA, 83594 bp, Arabidopsis thaliana
gatccccagtggagaaattttcaaccacatctacgtggccaccattgaaaccatgatctgaagtatttgtatcctccaatgtcatatcctgaacatcttttcctgttcccgtatcacgagaaaccgaagagccaccactatctttctcaggccatggattttttcctaacatgtttgcctctctcttgataaaagtattactctttagatggtttgttccactacccatatcatcatttcttcgtttcttcctgttactaactagaattggaaactgacctccatcctcatacgctgagtctggcactataccatcatcgttcccatgaaattcatccgaaagataatcgcctagctgaaaggaaaagaaaggaaagaaaacttcagccaccaattagaaatccacattaccaagtcaaagaaaaaaatgactagggaaacatcaaaccgagtagactaacaaagtatccccaatcctgcacagaacacatccaagtggtagcgataacaagaagtaaaatatgagatgcaagaactgtcctatattttaaacgattttgaacccaataaaaaaaggaaatttcacaacagttcattttccgggaacatacgacaagagcaacaacgaaagatctaaatccatagtctcatagaaaaaagatacacacacatatatgattgtgactccactcacctcatgaatgtacaagtccgacattcctcccaacttcagactctttaatcaccactaaaatcatgcacattaccccgatatgtcatctctattgcaaaacatgtaactcccacaaacactatttctggttctggataggaaatataaatatattaaacagcttccaataatagagaaatcgaacccagcatataagaaaacttgacttttcttatccagaatcaaatcccatgaaacccgaaatacatgtaatccaaaccctaagagttaacccattctttcaactattcatgaattccagaaattagactcaaattctacagccaaaaagtcaaatctcatagcaagtagcacaaaaacaaagtaggagaaaaatcagatagtaggattcaaccattttatgctcgtaatttctagcaaaatcgagttaaactatcattattaaaccgagagtttacaaaaacaactaaaatccagtgaaatgaggcattcaatgaaactaactgcaacaaaaaaaaaaacaatcaaatctgagaaatcctcagctaccgctgctatggaaacactgaggataagaaccaaattttctaattaaattcaatcgaaatagattccatcaaagccgaacgaaataagctcacctgtgagacagattcttccactagcaactccagaaaactccacagataaaattgtttaccagaaaacaaaaaactcagcagatagaagagattgtatcaattcatcgaagctagatcgaaaaaaaaaactgtgtaggactttctagagatgttcggcagaagacgatgaaggcttcctatttttttttttttgacaaacattttaaattttaattaaactattgtttttgtttcgggagaatcaaaagacaagtgaccatgatatcaacacgtggcaactaaatcaaaaggtttaacaggcttgggtttttaatatcagaattcgtggacgagagagcagtgtgagatcctatcagttccagttttattattggtacacgtcattagtaccttctcgaaactgggcacgcctcatcttcttattggcttacatcgtaatgatgacatcagcctttatttacgtataacaaattaccatgcggttaaaaaaaacaatagttatatgggccgaagaaagcccaaagaatctttagttgtttttccgatcgatctgcgagtcgagtagtttttttatttgccggcgccgggagagatcctttgatctttttccgatggaggagcaattcggcgggagcgatgagagatggaaaggatcattggagaatataacggagatggcatcgaatctcgattcgcttcagaaacttctcctcaagaaagcagtcttcgttgaagaagacactttctctagagcttctctcgtctccgagcaagcccgaacaatcaaggttaatcctttttcctgtgataaaatttgaaattatagagcttaattgtctgaattttgagcttcttttctttgactttgatgattgcttctgtgatttgtggattcgatctagttgatcacgatcgcactttttagtttgctttagtactactatagctcagtgtaatagtgtgattctggaattgcatttgacggtgaatttgggaacttgtagttgatcataaattttgaatcttcgattttgtgatctgttaatggtacaaatgatcaccaaatccttgaagactggacttgaggtttcactatgaaaactcccaagtgcaattatgtgtattaagtagaaattcttcatgttgtaagtaaaaaaggactgtgttacatgtttgagataagggatagtttcagattgtctcttaactctgttcaatggtttgttttaggttcttgagcaaagagtacaaacactagaaagagaactagatgctgccattacagctgctgctcatgctcggtctgagaaacgccaagctgagtcctctcaaaaggctgctgaatcacgtgcccaagatgtcacaaaagagcttgaaaacaccacaagtatgcacttgataatcacttcttgagttgatgcctggtggcaccattctctcccgcacgtttatctgcgttccagtttcatattcactctcactcactgacttatacaactcttggtttcagaggttttcaagctgcatatggaagagcttcgaggaatgcaagaacagatatccaaacgcgataacgagatcaaactcttagaagctataatccaaacgctcggcggcaaagagcggttgggaaaaagcgacgtgaatggatgatgatgatgcgttttttcacttgtaaaggtttgtactcctgagtttgtggagatgtatcacttcgaagataaatgtatttttgtctgtctatttggtacgttttagaatcttgcctgttctttcaagaaatgaatgttacatgggcctgaccctataaatgggcctaatgtgaatcgatcgatactaaaaatgggttttataggtgtgtgtgtgtggttttcacacgtttgccgccgatagtgctgcgatgccatccagattcagtaacgcggcatctccaggactccagccgtgtggagcaagaaactacgtaaatttgacagctgaagatgcaatttcacaaaaagagaataaaagaaacaaaagaggattatgaccaatttagaaaaaacttttttcaaaaaagtgatgcttcatggtttttagcgtgtggggtgtctctctatattatctaattttttggtagaaactagtgtacaatatctaattttgataaaataccaatgaaggaagttttgactatttctgattgctttatttttgtttgctttgttatagtatatacaagcatataatttttatttttaaggctcgattaagtaaggtaagaaaaatgaggattgtgtctaaaactaggtgggggtgaaccaaagaaatacgtaaagtaataaattaatgcaaaggccattgttgtttacttcacgctgcgaaagtggttaaaaagaatctatggctactaattattctcttacaaattttctttatacatttggataaaagcaagaacataaacactttctgattatgacaaagaatctgaatttcattttgctgttactagtcaactctagtcaattgtcatgcatatcatagcacagtaaaccatctctatcgactatcatattaataaagagtcactaatcaaatttccaatattcaaaaaaatatatcgtaatcatgcaacatttaagtttcgataatcattcaatacgagtatatccaaacccttgatatatgaaatatgtattcctacgaaatggccaagtttattattccacttttaactaatttcaagcttatcacttcatttttctttttgctaaatcctgcacatgattcaatgttcttgaccccatttgacgtacaaatacaatataacgtgcatctatttatacgtgtatatatatgcaatcaaacctcaaacacaaccacataacaaaaaaaatgatgtccgagaagttccctgatgtattcacttggatacaaaacatcccacagatcaccaaatggcgcacaacttctcttcccttttgcatttgcccttcaacttctgattttccaaattcaaccctaaatctcacagcacaaaagagccctagccctaaagttgtcactttctccatcatcgtccaatccaataatcattctcctttgtatctttggaccactaaacaagagctcagcatcaacccaaactcaccaaaccctttcgatgaactaacaatcatctctctcctcttcaatttcgtcgaaactatcttaacctatacctctaatagttccaactattcaacgatcaaaatccctaactccgattcatccaagatcggcggtcttaaagacatagtcaacaccgtgattctcactctctcgttcgttgtttgcgtctacgaagctcctctgtatctccgtgaaaactgcctcaataccctcaagaaccatttgattacttgtcatacacggcgagctactatatctctgatgaagcttctagggtctaatttggaagagcagtggatgagaacagtgaatctagcgtttacaaattggatcatcgagcagcgtcgtagtcagtcaaccaagatcacaacaactcctttgttctcttacgctgtttcggcttatggattgtggaaagtgcaattgtattgtcccgttgaagccatggaagtagagagatcgagcaacccaacggctgattcgagattgttgttctctctcaagtttaatcagcttgaaggtgtgatgcagttcaatcacaaagttgtagttagagacaattggatcgatgtgatcgtgaagatagacaacatcaggtacacatatgttactaagacactcttgttttgttaaaatggcctaaacagtaaaagcttctattttcttataaactcttcaaacccatttgtgttgcaagattgtagataacgagatgattctttcttttatgccaagtttctaattgaaccaaggttttagacattttgtaataaaacgatcaacaatcatgtgataactaatggatgcagatacgatgtaataaagcttgtaaacgagaaactgatgtcgagaagaggagcaggggagcacgaaaagcatttcccatcaaggatctctctgcaactaactcctactctccaaaccgatttcattagcgtttcggttagcaaatcatcaaacaatccgggaagagagtttgaagtcgagagatctattgaaggctcgttcgatccaccaaactcactaggcttaagagttgctggacgagaagcctcaaccatgacaatgaccccgtggaaattagagcaatctgtgctcggctacacagctaatctaaactggatcttgtatgatagcagcgttggaggaagagaggttttttcgacaaagccgtcacggttttcaataatgagcccaaggtcttggtttaaggataggtatgcaagagcgtatcggtcatttacgaggagaggaggtgtgatatttgcaggggacgagtatggagagagtgtggtgtggaagattggaaaaggagcattggggggaacaatggagtgggagattaaagggtttatttggttgacttactggccaaataagtacaagactttttaccatgagactcgtagattggagtttacacagcttcttaatctcaccattgcttaactttaaacaaaaacatgttattacttctttgtgatctcaactttacattggtaaaggaagagacttcaattgtcagttagttatttggtaatttatctttgcattaggtacttttgataagaatcttaaacagaagatagacaagagataagtgaaactcaactgaactttgatttctcaacttaagattgaaaactcaacgaaccagcccttctaagcattagcgacacaaggatgatactagttaaagcagatagctgtgaccagcatcgatcatctacggtttcataaacagcatcgatcatctacagtttcataaacagccatcaacagctacaatctcaacatggttgtgccatcttcccagtcaattcttttctcgaaccagactagaaaaatccaagacaagccaggggaatggagttagaatgctatgaattccaaaccagagaagattcaaataaaacagagactaaaaaggctgttcaaacagtaataattcttgcacatgaacactaaaccagaacgataacaggaaacaaagatacagtcagtactcagtagtttgagggcacctacggaaagcaagtaatactacagagggtagacgttccagtgcttaatgatgaaacatcatcagtacaagcaaacgtgtttttcatcatacaccgtatcactttcacaagtggctgcagtcattcctgcaaacaaaatgtaaacaaggacaattcagacatcaagtttcattagtgatacacatctgaaacacagtgtttttgtaacccaccgcagcataaggagattgacttcgagaagcagcatcaactttgcgcagaggagcagggctaccaggagatggggacctctcattgctacgcctttcaggagacatctccttagaaggagaggccttttgcaaagcagggcttcttgggctgaggctgcgacgaggagatggagacctctcattgctacgcttatcaggagaaacttctctagcaggagaggttttctgtggggaggaacttctagggctgcggcgagcaggagatgcactgcatgtcaaaaagttgaaatcaggatacacagtattgtggagcaacaacatgaaaaaaagaggttcacaacggaagaaacctcaaggaacgactgtgactgcggctctcattatcataacggcctctgactctgcgtttttcatctgggctggcactacgagacctagtgcgacgacgatgatctctatccttctcctcatgcctttcacgcctgtcatagcttctgctcctgctccgcttccggtagtctttttccctatagtcatctcgggacctacaagttatgtaactcggatgagagaattattcagacaaatactgttcttaggcagagatggagttctttcataaatcaagtaacaaaagctagttgactaataacataaccattattaactcccactagttcacctaatcatcataagaatgcagattaaagaagaaactcacctcctacgaggactgcggcttcttctgggactacgacgtctaggcgggctacggctcctcctaggactacgactccgcctaggactacggcttctagatcttcgtgacttcggcggtggttccacaactcttcctttggaactgtcatgaatcatgataataacaaacgaatcaaaatacaattacagatgcagctttttacgtgatagaagttccaattgcacaaataacggaaacggtctaaagaggaaacattcatagtgagctcccgaatatcaagagtaaacttgaacaatcattggcaaagaaagaagcttacattttttcagcatttggcccatatttcgcaaactgaacagttatttctctgccatcaacaactcttcctgaaacagagaaagaagcttcatgttgaatccaggcaccaaaagcacacaacaaaaccaagaacacaagagagataagaagatctggataattataccatcaagcctttccactgctttgtgagcttcgtctttatacttataccgaacaaacgcaaaaccacgcgaatcaccagtcctataaattgacacaagactcaatgacagaaatcaagaaaccctaattcctcagtcggagaagaagaagaaattggaccttcgatctctgggaataaacacatcaacgacctttccatactttgcgaatagaggatagagatcatcagcagtcgtacctacacataacaacaaaacctaatctcttagaaacccccagttcacgaaaattgattagaggttgagaaacagaaatagggacttgagagattacggaaggtgatgttaaggacgagaagtgagtaggtgtcgctgatatccggtggacctgaccttccgaagtgcgacatggttttcccgccggcggagaaattgggagcgcgagagagagacgaagtgaaattaggttaaagcttttctgaaacaatggaatctactagatacggggacattttttttaaagcttgacgttgttgttaattacatttgtaccccttgacgaagacacaaaaaaaagaagataatcgaaccggatgataccgagtttggttcgtatcggttcagcagcgattgggacggttgagacgcaattttattatagtctgaaacatttttaccaaaacaattctgcaatttacaaacaccggtacatctctaacacctttaaaacatattttagcacattcaaacaaattcatatccaaaatcattaaaaaaaacaaacagaaaaactccaagtaggatactcttttgaaattggtttagtgataaccaatcggagctgctgcttctcgcaactcttttccttgattgcgaatgtcctgcaaataactcacaatattaacaattcaaaaacaccacacaacataacaaatccacagatttttaaaattcattgatttatattaaaaactatgaacttgtatgtatccacacaccaaatgtcgttgattctactacttatatcatttgttattttaatatcaccgaaatggacccgaagaaatgtatgaaactcgggagttttggaaaaaaaataaaagggttgttgttttagactcacagaagcaaaatggttgacatctcgatgatgagcttcatcagcacgaatcaccgttacaacatctttcaacgtagcatctttaggcaatctccaataatcaatagcaatcgcgggcgcggcaacattctcgatcttcccattgtcgatatctttaagaaactcggtgtaagaatgtatagcttcttcctctaaatatccaacgaccctatgagctaaccgcggggaaatcacgtaacaaacgaaaaaagagttgaagaatattccttgaacaagcatcactagaagacgctcgtaccatttgggtttgactaactccatcatcgtcattagatgcatcctctcgttctctgcttcttcgagtaatgctttgatccaaccgccgctatgttcgaattttcggattgattttaggtgaagaagcattcctccaaccattcctggtactgcagctactgtctctagcatcatcgctctgcatccatatcgtctctgctgaccaaacatatatttaacattaaggaacaaaaaatgtaaaacattagcatgtgaagtgaaacagtgaatccatacgtatgtatatatgtgaatcatggtaggataatatgtgcatacaaaattacaaaccaaaccaaaccgaatcagctaaataaaccaatgaacatattaaacgaatcaacgtttcattttaaaatttgaaattacagtcatgcctgaaaaaatatatcggtgggaatacggaggagcttgacaatccggtaagcgactttgtcggcgatattcttcggaacgtggtgcttcttcaaatctatcgacagatttgcttgataagtctcccatggctgttcaaaatatacttaagtcatatatctactacatataaaagagtgcttaatttgtctacgaactttgggatgtgtataagtttaccataaaacagttccaaggccaatccgatccatctttccgagtaattttcatctttgctgtctctattccccaataacttggaaccgctactgaccccccgccgttttgacccttctttaccgtcaaattttcatctttcttctccatcgccgatgcagaactcatacccatccacctcaagttaaaatttcctattcaaattttagaaatatacaaatcctaattatcatgtacaattgttataaggttgtatgaggatcatctacagatatgcacaccttgcacatgcttagagccgatcttgaaatcgccaaaaccgccgcaccagtcatgaattcgcatcggtgccgttatctcatacggacttttcataacagaggtggaggaaacagaactcacgaacatgttacagtttcctctgccgcagacaagcagaactcgtaaagctgctttcgtaatgagttgactcatcttacgacactctctcgtatacttatagattcacttctcagataagaggcttgttctctgactgaaagaaaatgattcaactctgttttttctcgaaagaaagtgtaagtaggggaaacaagaaggaaataaaaaatgacgttatcagctgatacgcggcgaatactgctgaatacacgtggctcatatccaactgttgctttacttttaagataactatttttaaaaaaacgaatgcacattttttaagtttgtccgaatcttgaagtggcgttcagcagacagagcgcacgtgaatctggtcttgactgaactgtccggtccaatatcttttggtttggtttaattcggattaatagattgtctccttaagaaaagttcctaaaaggaacattaattataattacattcatgaatcaatttagcaaaagtacacacattgaataaaaatttcatccacgtgtccacgtgtaaggtttgtattggataaaaatgttttggttcactaaatttataaaacaacctccaccatatcggcgctttccttccgatttcgtcctcccccagaaaatagagaggaaaaaaggaaaaaaagtaatcatcgattcgctttcacaacctggaaagctcgaaaagaggaaaaaaattctaaagagcttatcaagctcacttcatacacctagatcgatttagggttcgtttgatttttttttttctgtgattgcgacagctagagatctatctctggtggattttgggtttatgttccatggcggatcgcggatctttcggatttgctcctcgattaggtctctctaccatttcgccatatctagggtttttgctatcttccttttcgtgttttgtactcctttttagttgttttggatctgatcattactagtttttcgttttgttgcattttagtgaagggaaggatttctagcttgttgaattacgatttatattttgcttcttagttgttcccgcttaagttgtattgctctgttacatttgatattttgattgatgttggttagtgcaagagagtgttagtggatgtttagctacagagttgtagtatcaatgtgtttcttacccttttatgaacttgtagatatcaagcaattgctgtcagaagcacaacacaggtggctgagacctgctgagatttgtgaaattcttcggaatcatcagaagtttcatattgcgtcagagcctcccaaccgaccacccagtatgtttcttgctgattttcttcatttttgtttgcaatatattcttattttttgagctgtacaatcaatagatgctgaataagttacattagcttgggttttatttctgtcttgctttaacgaactttatgcttgacgtgttcactcccccgtttatcctgttagtcctgaatagttcagaagttttgcgtgttgtgtgccttgacaataatttattgcggtttgtcttctctaattaacagaaattccctgctcttctaggtggttcactctttctcttcgataggaaggtgctcagatatttccgaaaagacgggcacaattggaggaagaagaaagatgggaaaacagtgaaagaggctcacgaaaagctgaaggttaatatttctatttatgtgtcctcgttaaatattagtgcagattaatgcaatgaccttgaaaccaattccttggttttactactgatttttctagctgataatgcaacatctcaatgttagagagtaataagattgtgtaagtatacacaggtaggaagcattgatgtgttacattgttactatgcacatggagaagataatgagaacttccagaggcggtgctactggatgcttgaacagtgagtctatctatgtttgtccacatttcatatgttttgctctgtttagtatcataagcgttagtttttcagcatttatgtgctttgtataaagtgtgcatggtagtctgctagtgtcctgggaatggcctttttattgtattagcagaaaatgagctagaagggctatagaaaggaatattattataatttccgagattctgctataaaacatcaatttctaagttgtgagatgaaatcgaggataatgtttatacaagacaagactgaaccaaaggcatttcacgtgatctctaaaatccctatcttctggaatgaaatgtgcttgttggtacttttcttcatttattgtcacttttcagtgttagtgctcatgtccactgtttgtgtgttacatggatacagggatctgatgcacattgttttcgttcactacttggaggttaaggtatagcttttgttttgtactgtactaatatattcttaaaatatgaacttccatcgctcaacactatatcttcctttttaagtggatgctgtctttcctatgtgtggttttgttatagtcatcttatattgtacgtcatgctattatacagggtaaccgaatgagtaccagtggaactaaagaaaaccattcaaattctctgagtggcacgggttctgtaaatgttgattccacagcaacccgatccagcatattgtcaccattatgtgaagatgctgattctggtatataatttctctcttatataatctgctttagtatctttttgtttaagagtgtagatctttcagtgatgagactttgtggttgattgtattgctgctcgtggttctgcttcaacacaaactaatatcattttgacgcaggggatagtcgtcaagcaagttccagtttgcaacaaaatcctgaacctcaaactgttgttcctcagattatgcatcatcagaatgctagcacaatcaattcttacaatacaacctctgttttgggtacttcatttgctttctgttttacaagcttccttgccttaccaaattcctgcatgtttgctgagattgtcttctcttcctaggaaatcgagatggttggacgtcagctcatgggaacagggtcaaaggaagtaactcccaaagatcaggtgatgtcccagcatgggatgcttcctttgagaattcattggcaagataccagaatctaccttataatgctccgttgactcagacacagccttctacttttggtttgatccccatggaagggaaaacagagaaaggttccctgttaacgtcagagcatcttagaaatcctcttcaaagtcaagtaaattggcaggtgatatatgcttgcttatagctaagctattcattttaaatctaagtaggatttgtgcctatgtttgtattatggtgccactgtttaatttgtttacttaatcattcaagcatgaattttctcatcatgaatgttggttctttgaaaatatctgattttgagtttctcttctctatagactcctgttcaggaaagcgtgccattgcaaaaatggcccatggattcgcattctggaatgactgatgctactgatcttgccttatttgggcaaggagcacatgaaaattttgggacattttccagtcttcttggtagtcaagatcaacagtctagtagtttccaagctcctttcacaaataatgaagcagcatatatacctaaattaggccccgaggatcttatatatgaagcaagtgcaaatcaaacactacctcttagaaaagcattgttaaaaaaagaggatagtttgaaaaaggttgacagtttctctcggtgggttagtaaagaacttggggagatggaagacttgcagatgcaatcttcatctggaggtattgcatggacttctgttgaatgtgaaaacgcagcagctgggtcttccttaagtccttctctgtccgaggatcagcgcttcactatgatcgacttttggcccaaatggactcagacagactcagaagttgaggtaatttttagtgttatttttgaaaaaatggttttgtggtgtagcattcagttaagatggtctttggctaatccaatttgccaaacttaaatgaagatttttttttcgtataacacctttgataatcaatctttctgcaagtagtaagcctgtatacgtttaggaacagtactttctttctgctgttctgctctgtttcttcctatttttgagctctttggctttggaagtttgttaggagataactcctttctcatctaccattttaattttcgaacaggtaatggttatcgggacatttctgttgagtcctcaggaagtaactagctatagctggtcatgcatgtttggagaagtggaggttccggctgatattttagtagatggtgttctttgttgtcatgctccgccacatgaagtcggtcgagtcccgttctatataacatgttctgacagattttcttgcagtgaagtacgagaattcgatttccttcctgggtctaccagaaagttaaatgctactgacatttatggtgccaatacaattgaaacatcactccatttgcggtttgaaaacttgctggctctcagatgttctgttcaggaacaccatatatttgaaaatgttggggagaaacgaagaaaaatcagcaaaatcatgttgctaaaggatgaaaaagagcctcctctccccggaacaattgagaaagatctaacagagctggaagcaaaagagcgattgattagggaagagtttgaagataaattatatctgtggctcatccataaggtgactgaagagggcaagggtccaaatatattagatgaagatggacagggtgttctacacctagccgcagcgctggggtatgattgggcgataaagccaatcttagcagcaggagttagcatcaacttccgcgatgcaaatgggtggtctgctcttcactgggctgcattcagtggcaggcaaggacctcagggttatcatttcttattcataaaaacttctaatgatatgagtgacctgtagctctctcttattcattcctcttatatgttcttttaaccgatttgttttaaactctgacagttggttagtattttccatatattactaaatctgtttgtactgctgaacttcagggaggatactgtcgctgtacttgtctcactgggtgctgatgctggagcattggcggacccatctccagaacatcctttggggaaaacagctgctgacttggcttatggaaacggacacaggggaatatcgggtttccttgcagagtcatccctcactagctaccttgaaaaactaacagtggacgctaaggaaaacagctccgctgactcctctggagcaaaagctgttctgacagtagctgagcgaacagctactcctatgagttatggtgatgtaccagaaacactttcgatgaaggattcacttactgctgtcttaaatgctacacaagcagctgatcgtcttcatcaagtgttcagaatgcagtcgttccagcggaaacagctctctgaacttggtggcgacaacaaattcgatatatccgatgagttagctgtgtcttttgcggctgcaaagactaagaagtcaggacacagtagtggtgctgttcatgctgctgcggttcaaatccagaaaaaataccgtggttggaagaagagaaaggagttccttctgatccgacaaagaatcgtcaagattcaggttttaataacttccttctttaattcaagttgtgttttctttgcttctgtctcattgttgggtttttattgataacctattaggctcatgtgagaggacatcaagtccgaaaacaataccgagccattatttggtccgtaggattgcttgagaaaatcatcttgcgatggaggcgtaaaggtagtggcttacgcggtttcaaacgtgatacaatcagcaagccaacagaacctgtatgtcctgccccacaagaagatgattatgattttctcaaggaaggaaggaaacaaacagaggaaaggcttcaaaaggctctaacccgagtgaagtctatggctcaatatccagaggcacgggctcaataccgtagactattgactgtcgttgaaggcttccgtgagaacgaggtaacaattgttagtgtatctgaatctccagaacagacgtatatccacctcaatagttgaaacttgagactcttgtttttgtgaattcttgagcaggcttcttctagctcggcattgaaaaacaacacagaggaagctgcaaattacaacgaagaagacgatttaattgacattgattctcttttggatgacgacactttcatgtctcttgcatttgaatgatgatcactgcagctgagaaagaaagaaagaaaaaccgtacataaacacccatctggtataccatcgtcatcaacaatgctttctaacctctttttttttcattttaggtttccatgtaaatacagctggaatagaaattctctctacatagttttgagtgacgaatttgattgatttagtttggggatagagactttggttctttttcagttgtaatgtacccatagatttctgtcgtctaggaaaaatgcctttgtacacaaaccaattgggttattgaacatttacatggtgattggtttctaggggtttaatttttttcttcttaaagtgttaactaaataaccataaaacattattgcaatttgagttagtctacttcttacaataagcaaatcatgtctgaagtatcttttgattcgctgacagatatcagccacatatctgatatctgtttcttccggttcacggcagttgtaattcaattttgatttttgaactataaaccaaagttatatagcttgtgattcacaaaaacaaaaaacaaaacagaaatcaattaaaaaaataaatagaaaaccgctgtcgattattatataaccaccgacgaacgaaagagacgagagagtttcttttgtaaccgtaattgtaattaaagagaagaaataatggagaagctgtcatcagctgctgtagttcctcagctcctccgcaacatcatcgtcgccgtcgttgttttcgctgatgaatctctccttcaaatctccgggaattcaaagctcctcgagaaactccgtgtatttctcgtcacgtgtttcctcttcttcttacgctctcttccttcaatcgtctctttcgcaaaccctaattcgtcagtcgtctctttcgccaacccttattcatcgaagacgaagaagaagaataagatactggtgatcaaccattgcgaagaatcgggaatcggtcgagcaatttggcagttattgtcagcgatgaatgaaattccggtgagttctagaaagtaccaagtggttcgatcgttggcggagagactaatcaacgataatcaaggagaaaactcagtcgccttgttggatttgaaccgtagggttttaaacgcgtcgtttcgtacaactctaagccggttagagacggcggttgagcgtaaccctaaccggagagatatagatgaaccggttcgtcgtggattaaaccgggttgtcagagctgtggttagagccgtgggagatgggtttatcggttggggtggagaagagacggcggatcagacggcggaaacgtcggagaaactggcggcggaattgctttggttggcggagaagatggcggtttatggattcgtggatgaagccgttgagaaatgggcttcggcttctaacttagcttggcttgctctttcgtgtgagccacgtcttcaatgctctttgatccaaatctctggtaaatatttatttttaccgcatgattttttaatttttcgtaaatatggtaaatactatatagaataatctctttcccaatctggaaaaaagaaagaaaataggattatactctttttctgttcaggatattctttttttattttgtatgataaaaatattttgactttccaaaacaaatttcatttttactgtgaagccttactattcaaagaagccaaggacattaaaaagggaagcgaagaagaagaaggagaggaagcaaaattgagagagataaagaagaagatgcttatttcgtggattccgttgctgtgccgagccagcaacggagctgataaaccggtgttaagaagtgcggaacgagcgtatctagagaaagtgttggagaagatgatatctgaactaaaagaagaggagcaagaacgagttctctcactctggcttcaccattacacacattgcgcttcctctgactggcctgacctcaacggctcttatgttcgttggtgccattcttctcgccagcttttgctcttaggctagtcgtctcatatatctccttgataaacacaagtagaaagttgctacaatatttgcaatagcattgatcttttgtatgtcttaatcatatgtactaagttttgccctttagaaatcacttttatcaataggaaattacttttgtccacccactgatctcatttatgttaatttcctccagaaatttcttgcatgttttgaaggtgttattataccttagggatcaagcacaaaaatgagttgtgggttcaatgttggacatggcttgataaagggccaatattgataaaatcaggtcctaacgctttgtctgttatcagatccaaatccagtccattcataccaaatttcccttgtgctagctttgggatagaaatcaaactacataatcacttacaaaaaatgaaaattgcataaaaatttagattttcatatagtattttataagagaaaaagggaaaacttaaaattaacaaagttactaaagttactaaactagtacagtaattaagtttccttgtgaaatttattttattaggtgatacttataaatatatatataatattcaatactgcctcattatccacgctcaatggtcgaatcgcacggtttagtaccattcggataacgaaaacgggtggcatgaatcctacaaggaggtagcctggaggagtcaattctgatgaagaaagttgataagacgaagagtattaagaggcaacatactacaattcctctccatgtattattcatctcgtctcaaacaacacgaaaactttttattttctttttcaaattttcttttttctgtttttgttgtttgattttcctaaacagatgattatgtgtttaataagaaatgtaatttactattaatagtctggagtgttttttttgtggtgttttttttgtgctaattttaaggttatgaaataggatgcatggtttacgccttaaacatagtattatcgacgattggttatgaacacaagaagaatattgaccaaaaatctgtaattcctacggcctatcaacaaaaaaaaaagaataagaagtaattgatgatctttcaaatgaatgttaaatgtttccaaaataaatatatataaatgttacagtttcatcgctaaatggcttgcaattcttgtgaaagtcaaagaaaattctagcgggtatcattacaatttacaatttagcctagagatcatagtatttgtgattactaaatacaaatgtgaccttatttacgtggtatgtatataatttttggaatactaaattaagtaaattttatttattttcataataagttaaccactaatcgtctcaccttaatcacatgaatttgcattagaacaaaaaaatattacataaatttttaggaacacacaaaaaaaaaaaagatgaagtatcatcgagatagttttatgtcgcaatagttaagttttaaacttaatttattttgttcattagtaataccttttaactgtaagataattttattaaaaatgaattattcgtttgtgttatgaaatataaatgcttaaatattatcaaaagtcatactttttaattattattttccaaatgataagcttatataataagtttaatggaccaacccaaaattgtaaggaagtgactttagtggaatagatacgcgatagactttgacaagaaaaaaaaaaaaaaaaagatacgcaacagagttcaataataaaataaaataaaaactttcaaagaatcaaattccgttccgaattgattcacataacaacatgcatggaagcttaataacgtggacaaatcaacattccacattttattcttttcgtagataagaacgaataatatcattctctttataaactcatcactcaaatgcatttgttgcaattgcaaaaagaaaaccaaaacaaagctcaatcatggctagtcggagagaagtacggtgccggtgcggcagacggatgtgggttcaaccagacgcccgtaccgtccaatgctcaacctgccacaccgtcacgcagctctactcgctagtggacatagctcgcggtgcaaaccgcataattcatgggtttcaacagctacttagacaacaccaaccgcaacatcatgaacaacaacaacaacaaatgatggctcaaccgccaccacggctgcttgagcctcttccctcgccgtttgggaagaagagagcagttttatgcggcgtgaactataagggaaaaagttatagcttgaaaggttgcatcagtgatgctaagtccatgagatctttattggttcaacaaatgggtttccctattgactctattctcatgctcacaggtttttcgttttttgtttgttttccatttctctaattaaaactctctgtttctttcttcctgatgatgagtgttgtgttattgttgcagaagatgaagccagcccgcagagaataccgacgaagagaaacattaggaaggcgatgagatggttagttgaagggaacagagcaagggactcactagtgttccatttctctggtcatggatctcagcagaatgactacaacggagacgagatcgatggtcaagatgaagccttgtgccctttagaccatgaaacagaaggaaaaatcattgatgacgagattaaccggatactcgtgaggcctctcgtccatggagctaagcttcacgctgtcatcgacgcctgtaacagcgggactgtccttgatttacccttcatttgcaggatggagaggtaaacttataaatcattctgctcacttctacttagactgaatctgaaaaagaaacttgtggtgcgtttgtgaaaaatcaggaatggttcttatgaatgggaagaccatagatcagtcagagcttacaaaggaacagatggtggagcagctttctgtttcagtgcttgtgacgatgatgaatccagtggttacactcctgtatgcttccattatatcattcatcatcatgcaactaagcacacatacctctccgtatgttaactggatcatttcgtgctgtttcaggtgttcacggggaagaacacaggagccatgacttatagcttcataaaggcggtgaagacagctggaccagcacccacgtatggccacctgcttaaccttatgtgttctgcaatacgagaggcccagtctcgcctcgcctttaacggggactacacaagctctgatgcatccgcggtaagttaataaacaacttgtattatctgaaacttacattctgaatgattgaatatcgtatctcccaggagccactgctaacatcatctgaggaatttgacgtgtacgcgacaaagtttgtactctgaatgctgtacatatgatgctgcaaatagctcggaaacgtttctatgtgtatgtatcatgtaatgattatgttgcatagcctctctcttcttacgagcaataaagctatgaaataattgattcgctaagaaatttaaaatgaaatgaaatgtgtggaaagtttcacaggaaacaaacaaccataagaagtatacttaatccaatacacaaggtctattgctggattacacatgatggacacaatttttctagttgaaaacaacacgagagatacagaagtttatgtaccttatttacattagatgagactattttcatcccgattccaaaagcagtaaagtttatgttttctcatgatttgaggctgggactgcatcatgtagtagtagcattgttgaacttttggaggatcagagcctgagcttcttccacaagacttttcactacctctccagccggtaaaatctccttgataaggcctacgctttggcctgcatacatagccatactctctaagtcgcctgttgtcgtcatgtttggtactgttcctgaaaatcttcttatctccttttcctataatgaatgtgaagctcccttaatcatcagtgcaagaccaaagaaatctcattaaaaaaagaaatatgcaaatgacacaacttacaacgccatgtatggtggaacgtccaataataggttggttaacttcattctcatgagccggaagagacctccagtcatcaaagaaaggcgtctccagaacacgttgaggcgcaccaggccaccttgctcttccaaatacatccgtgtattcggttttttcatattcaatcaacttccttttgtatattgggtgtgcatagctttcatgagtcgccacaaatctaagaaaacgaagattctaaaaaactcagcccaacaaaaagctaatatcaaacttgagaacatgtggaacaaaagaagagcacacaccttgtgcctagacagaccccttgagccccaagtgacaaagctgcaacataaccgcgtccatccacaattcctccagcagcaataacgggaatatcgcgttccccaactaaatccaccactcttggcaacaatgaaaagagaccatccttgccaataacatgcccacctgcttcacgcccttggacaataatggcgtctactcctacagcaacagcctttctagcttcttcgacattccccacctttcaaaagttaactaagcaataaatataagacaagttccttccttttggtaaacatacaaaattagttacctgaggaataactttgacaccggcaaagtgagcatcatccacaagctcctgtgaacaatcaccccaataaagctgcaagacagccactttctcttctaagattgtcttaatgttcaaatcatgaggaaacgcaagaacaacaccgatcccaaatggtttctctgtcaatgtctttgtctttcttataagctctctcaagtaatcaggacactcctgattcattgattcacataattcaatatatctataaacaaaaatcaaagaaaacgaaaaagttgcaatttacccaatcaggacatctgagaagaccaatccctcctgcattagcgacggcggctacaagctctggtccggagatatctggtcctaatggcgcctgaactatcccgtattcaaaccctagaatccctttcatgatttcactttcctctgctataaatctctctcggtcttcactcttcacatcttcgttttatacaaaaaaaaaccagagtcgtaatcgaattttacttggctacctttttttatagataaaaaataattttgtgtcgatctttctaagcaatgacgaacacatttcgaagcttttcgtcacatactacatcactccactctatctatataaacggtttctggaaacattcatcgatcctctatactcttcgatcagctcacaacacacaggatgttcgaaattcgagtaactttttccaggaaaattcgatttatcggttatattcttcttcttaaaagactgttaagaaactactttattgggtttttgattgaaactaatgggctgagatattaaaagggcccattatgttgctcggttagctgacgtctgactggggattttattatgcaacgcattagaaccgaattgtaccagaaaaattgatacgaaaaaacagacaaaccggaaatcggaggagatcatttgcatccggtttctaagtttataataaatcaataaatttgaacatttgaaaaaattataaaaatacaaactctagcctaactgaaaatcaatatacttccaaaatcgcaaatcagttttaagatatataactcattaacacctttttaaacaaaatcttttacgaaattacataaatatggggaagattcagagaaagtggactttttaatcttaggtggtgttaactgttaagtgtggtttatgacaagtctggtcgtataatggggacaatacatgtatacgtaggggttggtcttgtgaccaaatcaataatctgaaaaactggtcggtcggtccacggcaatataagctataagttcgtcataagattggattaattaataaaagataatcataatcccaattcaaatatccacttgtataattgtttgtatctatcgtttgcaaagattacatatgaaagtagtatcttcatcatttggttatttagatttaactaagtttatattacttagatgtagctaggattatataatacgcgaaataggattgtttggttttgtttaagaattaagattgtatatatttgagtattaatttgaaaattaattggctatatgtgtagtgtggaagatatctcactttctaagtctaggaaaataaatattacacagtatgacagtatcgtaagtttggaatacgtccgcttcaatatgtacagataattattatttacgagctaggactatcattatcatcttttcctatacgtcgagtgatataaaagtcaaaaaaattggacctttttcgtttgaaattgttcataaaacaaaaattcggggtcgaaactattatgcttaattattgctttgtcattttcactattgagcatgctatttccgtacgaacaagtatatcatttgccttcacaaaaactggtgcaagtcataataaaaaaacttatcttttcttgtcaacaagtaaaatttttcttttttaaaaaaagaaaaaaaagttttctactaatcttgttttccattgtatccaaatttttttccgtattacctagaaaataacatagagaagtacgataaacaagacgagccaaagtgggtcggcacacaaaacccctcccccagagtcaaaaagttaggagttggaggggaattagcattttaacattctaaatattttagtcggtgaactttgttgactaattccccatatatggggcatgcataattactataatcgttatatgtgaatggtcccttcaaaaatattcaaattctcttgcttatgtagttatgtgtaacacattatcgatgtacttagaaatcatcgaacacacatcatattttatgatttaattagcaagtaggctgagttccgtgtcaaaatcaaagtacctagccaaccatgcaatgcattcgtttctaattacttcccaattttatgaaatctagccaactcctttgttaactaaatatcttattttgacaatgtataacaattgcaataaatattcatacaaaaaacaaacaattgcaattaatgagtgtgtaagattaatataggtcgggtatataattgagacggcctagcgagagatgtctcataaaatgtcgctacaaataattgggacaaacatcaatagtagtacacgtttgtgttaagaagacatgacgtgtcacgatgctaaaggatgatcgtgggtgatataaagaactagtacgagaagcgcgtggctttcaccaatgttttgtcgctttccgtgccgactacgcaagttcccatccgcacgtgagactccccctttgccttctcttttactcctttttggagtattttttttttctcttactatttgatttgatttgattagataatttctttatgggtatcaaattcattaattccgcgttaaacaattctttttagtagtttagtaaatattgtgacttaaaacactgtctaataatcgtgacactaattatatcagttggttatatattgtacatgtatcttatccagtgacataaaccgaaaaggttgagatgatagatacaagaaatgtactggtccttgtgaatttggaacgtcggccaaaaaacataattaactttttgttaatcgtgatacgaaacataattaacctctcacaattttaaagctctcctttaatataaaatgatactgtattcactaaatcattcgactaaactaatcattaatataaagtggacattctttttagagcaagtttatcgtaagctaagtccaccattggcgatgttcctaaaatcgaaaattacttcttcttttttttttcaattcgacgtacgcatagttaaccccgacgctcgaactcaatattgtgtgtttcaaatgttaacaagtcaagtataacgatatataaggtttttactcgacctaattatacgaaattgtttttacgttcaaagcgcaattatatttttaaagaatcaagagccaagctaaatgatgatcaaagtgtgtggttctatcctaccaaaagtgaccggtgcatccatccaagtatatacacgacaaagtaaactcatgtgtcactcttcaaagtaaactcatccaagtaacaatattgtaacttttgctattcatttatcacataactagagtagaaaaatttcacgtgagaagatatattttgtagaggcagagagagagctaaagtggattactacgaatcctattatgctattactacggagtacgtctgacacgtgacttatccttcttttaagttttaataaacagtacttgtatatgggcctcacatcacataccctcgtttgattttctattttttttatttttatttttagttatgtgagctcctccactatagaagaaaacataaaaatcttctttatgccaaaaaagatggtaatacaaaataaaacgtgtttttttttcttagtgtggaatatatacttttcgtataacttttttgttaaatcaaaccaaaaagagtttttcaaaataaagcaagagtggaccctgaagatgtaaaaggcaataatggactgtaagagcgtggttcgtacgctacgtcgaggcgtatcttgcttactacacgactgaactaactactcgagtgcacccgtatatttatatacatacaccttaagctataagtatataactatacataaatacacacactgttctagagtaaaatacgtatgaatctgtggtccccacggagacctaaagggacctcccccaagtaaagttgattatggcacacacacggtatcatcaacctctctgtgtacctttcttaaaatcagtggcgcctctatggaaggaaaggaaggaaccttccctaaataatcccaaatctctttaattcatttcttaatatatagaattcttttttttggtatcagaaccgtattattagaacgagtaatggacttttcttctattatatggtcaaacaattactgctcaatgtatttgcgtatagagcatgtccaataccatgcctcatgatgtgagattgcgaggcggagtcagagaacgagttaaagtgacgacgttttttttgttttttttgggcatagtgtaaagtgatattaaaatttcatggttggcaggtgactgaaaataaaaatgtgtataggatgtgtttatatgctagacggaaaaatagttactcaactaatacagatctttataaagagtatataagtctatggttaatcatgaatggcaatatataagagtagatgagatttatgtttatattgaaacaagggaaagatatgtgtaattgaaacaatggcaaaatatatagtcaaatcaaactggtttctgataatatatgtgttgaatcaatgtatatcttggtattcaaaaccaaaacaactacaaccaatttctttaaaaaaccagttgatctaataactacattttaatactagtagctattagctgaatttcataatcaatttcttgcattaaaatttaaagtgggttttgcatttaaacttactcggtttgtattaatagactttcaaagattaaaagaaaactactgcattcagagaataaagctatcttactaaacactacttttaaagtttcttttttcacttattaatcttcttttacaaatggatctgtctctctgcatggcaaaatatcttacactaattttattttctttgtttgataacaaatttatcggctaagcatcacttaaatttaatacacgttatgaagacttaaaccacgtcacactataagaaccttacaggctgtcaaacacccttccctacccactcacatctctccacgtggcaatctttgatattgacaccttagccactacagctgtcacactcctctctcggtttcaaaacaacatctctggtataaatacctctgtatatctttataaaccccaaatcaaaacctctcctatatctcttcaatctgatataactacccttctcaatggcttctaattaccgttttgccatcttcctcactctctttttcgccaccgctggtttctccgccgccgcgttggtcgaggagcagccgcttgttatgaaataccacaacggagttctgttgaaaggtaacatcacagtcaatctcgtatggtacgggaaattcacaccgatccaacggtccgtaatcgtcgatttcatccactcgctaaactccaaagacgttgcatcttccgccgcagttccttccgttgcttcgtggtggaagacgacggagaaatacaaaggtggctcttcaacactcgtcgtcgggaaacagcttctactcgagaactatcctctcggaaaatctctcaaaaatccttacctccgtgctttatccaccaaacttaacggcggtctccgttccataaccgtcgttctaacggcgaaagatgttaccgtcgaaagattctgtatgagccggtgcgggactcacggatcctccggttcgaatccccgtcgcgcagctaacggcgcggcttacgtatgggtcgggaactccgagacgcagtgccctggatattgcgcgtggccgtttcaccagccgatttacggaccacaaacgccgccgttagtagcgcctaacggtgacgttggagttgacggaatgattataaaccttgccacacttctagctaacaccgtgacgaatccgtttaataacggatattaccaaggcccaccaactgcaccgcttgaagctgtgtctgcttgtcctggtatattcgggtcaggttcttatccgggttacgcgggtcgggtacttgttgacaaaacaaccgggtctagttacaacgctcgtggactcgccggtaggaaatatctattgccggcgatgtgggatccgcagagttcgacgtgcaagactctggtttgatccaagggatgtgagtaagacacgtggcatagtagtgagagcgatgacgagatctagacggcatgtgtagtcaaaatcaagttgcacgcgagcgtgtgtataaaaaaatctttcgggtttgggtctcgggtttggattgtggatagggctctctctttgctttttgtcgttttgtaatgacgtgtaaaaactgtactcggaaatgtgaagaatgcatataaaataataaaaaatcattttgtttctactttatcaaatttaataatgcattcggttttgcagcaagaatgatcaaagcttgtattagtactaattaatttatttaaaggtatctgacctttttaaaaaatgttagtgggtatagaggataataatgttatttgttgtatttaattttgtaataaaattgataactaaagaaaggaagatgtgttggggcctaggagaccaaattgattgctttgtaagtactcgtttcatattattagtaacttttgaatttttttatgcatgataatatgttatctgtaactacaaatctatccttaactgttttaatggcgactaaagtttgttctctttgaactaaacaaatctatctttatttgttaggtaacaacaaataactaaacattcaaatttggaaacttccgaattcttaaagcaatcaaaatacctcaaaatgggggtaatatttattattgtcaggtgaaaaagtaatctagtgaatttaatcaccgaaattcctacaaattttagtaatttaggtattaagtattttctgaaaatggtcagtggggttggtgaagaagttcttctcccttgcctccgttctttatgccaaagaaaactttgaaacatttaagtatcgaaaaggctcatctagattcaatcaatcatttatatgccttttattttatttatcagtatgtagcttatatatactgattttgatcatgacataatttatcatgcattctgtataataataaacctgattaagttgtagtggatccggactttcggctatatgtggaaataaataagctagtgacgaattgaggataatgctaaataaaatacactttgttatatcttttagggttacgacacatatataatagattttaaataaaattcgtggctgtgtgtattaatgattagaaaattatgtaagcatacactttttacaaggatgttttgtgtaaatttgaaatttccaaattcttatggaatatattaatttatatccaaatgaaaatttattttgatcataaattttaaagtacctgaaatagttcatgttgtctctatgtattttggaaaaagtacaaggttattcgtatatttaaaaacttaataaccgaaaaattggctcacctatatgattgaattcaacatgaaaattaacaaaggcttttgtttgcttcgggggtgaaagaaagcctttctagttagtttctattcaacttcaatgttggccaaaagaaggaggtatgcagcaataggtatatacgccagcttatctgcataaaagctgtataccttatctgtattgggcttctaattatctgatcaaatatggccactagaacagacgtagtgaccaaaattataattgggcttatgggctttgattacttgaacccaatctataaaagttattagcccaaattaaaacttgacccgaagtttaagaaccgactcccccacaattggtcggtttcaataactctccaaatcctaaaataatttttttttctggcttcatctggataaaccctagttcatccttttctcacgctctacctccccacaatcatccgcagacgagttccgattaccggtgagttattctccaatcttcgtttcgatatacgattctattctctcgtatttgattgattccgattgttttcaatttcgttttgttttcttctgattcactgctttgttgattttctcagttctttctttttttgctggagaaagcttcgttgagtatctgataatggcggatctagatccagagatcgctaaaactcaggaggaaagacggaagatggaagcagaccttgcttctctcacttctctgactttcgatcgcgatctatacggaggtaacgaccgtgcttcctactcgacttctattgcacctaacgaggaggatgatgcgaatctggacaccactggttctcttgtggctcagcgcctcgcgtcttatactgctcctaggtcaattcttaacgacgtggctcgtcctcacaacgaagatgacgatgtgggatttaaacctaggcagagtattgccgaacgtgagggtgaatataggaataggagactcaatcgggttctttctccggatagagttgatgcctttgctatgggcgacaaaacgccggatgcgagtgttcgtacttacacggaccatatgagggagacggctttgcagagggagaaagaggaaactatgagactcattgccaagaagaagaaagaggaagaagaagctgctgcgaagcatcagaaagattctgctcctcctcctcctgcttcctcttcttcttcctcttccaagaggagacacaggtgggatctccctgaagaagacggtgctgctgcaaagaaggctaaagcagcaagttcagattgggatttacctgatgcagctccagggattggacgatgggatgctcctactccagggagagtttctgatgccacaccatctgctggacgaaggaacaggtgggacgaaactcctacacctggtcgtgtgactgattctgatgcaacacctggtggtggtgttactcccggtgctactccttcaggtgttacttgggacgggcttgccacgcctaccccaaagcgtcaacgttcaaggtgggacgaaacaccagccactatggggagtgctacacctatgggtggagtcactcctggtgcagcttacactcctggtgttaccccaattggtgggattgatatggctactccgactccgggtcagcttattttccgtggtcctatgacccccgagcagctcaatatgcaaaggtgggagaaggatatcgaggaaagaaacagaccattgagtgatgaagagcttgatgccatgtttcctaaagatggatacaaggttttggatccgcctgctacgtatgttcccatcagaacccctgcgaggaaacttcaacaaaccccgacacccatggcaactcctggctatgttattcctgaggaaaaccgtgggcaacagtatgatgtgcccccagaagttcctggtggtttgccgtttatgaaaccagaggattatcagtattttggttctctgttaaatgaagagaacgaagaagagctgtctcctgaagagcagaaagaacgcaagataatgaaactgttgttaaaggttaaaaatggaactcctccccagaggaaaacagcgctgaggcagcttactgataaggctcgtgaacttggtgctggtcctttgttcaataaaattttgccattgctcatgcaacccactttggaagatcaagagaggcatcttttggtcaaagtgattgatagaattctgtacaaacttgatgagatggtaaggccttacgtccacaaaatccttgttgttattgagcctttgctgattgatgaagattattatgctcgtgtagaagggagagagattatttctaaccttagcaaagcagctggtttggcctctatgattgcagctatgcgtcctgatattgacaacatcgatgaatatgtgaggaacacaacagcgagagctttcagtgtggtggcttcagctcttggaatccctgcactcttgcctttcctgaaagctgtgtgccagagtaaaaggtcatggcaggcacggcatactggaatcaagattgttcagcagattgcgatactaattggttgtgctgtcctgcctcacttaaggtctttggtagagattatcgaacatggtcttagtgatgaaaaccagaaggttaggactattaccgcattgtcactggctgctcttgctgaagctgctgctccatatggtattgagagctttgattctgttctgaagcctttgtggaaaggtattaggtcgcaccgtggtaaagttttagctgctttcttgaaggcgatcggttttatcattcccttgatggatgctatatatgcgagctactatacaaaagaagtcatggttatcttgattcgtgagttccagtcgcctgatgaagagatgaagaagatcgtcctcaaggtggtgaaacagtgtgtaagtacagagggtgttgaaccggaatacattcgtagtgatattctgcccgagtttttcaggaatttctggacaaggaaaatggctctggagaggagaaactataagcagcttgttgaaactactgtggaggttgcgaacaaggttggtgttgcagatattgtgggaagagttgttgaagatctcaaggacgagagtgaacagtatcgacgtatggttatggaaaccattgataaggttgtcacaaacttaggagcatctgatattgatgcgaggttggaggaactgctcatagatggcattctttatgcttttcaagaacagactagtgacgatgctaatgtgatgcttaatggattcggtgctgtagtaaatgctcttggtcagcgagtaaagccttatcttccccagatctgtggtaccatcaagtggcgattgaacaacaagagtgcaaaggtaagacagcaagctgctgatctgatttctcgaattgcagttgttatgaagcaatgcggagaggaacagttgatgggacatctaggtgttgttttgtatgaatatcttggagaagagtacccagaagtcttgggatcgattcttggggctttaaaagctatagtcaatgtgattggtatgacgaagatgactcctcctattaaggatcttctaccaaggctgaccccgattttgaagaataggcatgagaaagtgcaagagaattgtatcgatcttgttggtaggattgctgatcgtggtgccgagtttgttccagcaagagaatggatgagaatctgtttcgagcttcttgaaatgcttaaagctcataagaaaggtattcgtcgtgctactgtcaacacttttgggtacattgccaaagccattgggccacaagacgttctagccacgttgcttaacaatctcaaagtccaagaacgtcagaaccgtgtttgcaccacagttgcaatcgccatagtcgctgaaacatgctctcccttcaccgtcttacctgctttgatgaatgagtaccgtgttccagagctaaacgtccaaaatggtgttctgaaatctctctccttcctcttcgagtacattggagagatgggcaaagattacatatacgcagttacaccgttgcttgaagacgctctcatggacagggatttggttcatagacaaacggctgcttcagctgtgaaacatatggctctaggtgtagctgggttgggatgcgaagacgccttggttcacttgcttaacttcatttggcccaacatttttgagacatctcctcacgtcattaacgcagtgatggaagccattgaaggaatgcgagtcgcattaggagcagctgtaattctgaactattgcttgcagggtttgtttcatccggcgcgcaaggtccgcgaagtgtactggaagatatacaattctttatacattggtgctcaggacacccttgttgctgcttacccggttcttgaagacgagcagaacaatgtgtatagccgaccggagttgacgatgtttgtgtgaaagaaagattctggattcgatgtgattctattactctctagtcacctgtagttgttggtattttggctttattgcaaaggtttgctttgtataaaacacagaaacgtttcttttctttttctgataactagaaaacctatgttcacttttggttatttcttattgacttaagtttcatgttatttgtatgcattacagttgcaggttcatgaaataacgtagaaatctgtcaagactccaaataagcagagctgtttagatctttcatattgcgagactgagtgaacatatattactgtggaaattggttgtgtcagtttgttcataaatttggtttactcgttgaaatcttactgaatttggaccgaatttatggtggttgattttggttcaggtttaactgagaattcgctgccgaaggaaaacaggatacatacatacaatgttctaacttctacggtttacatctttaatatacgaacacaagaaaaccaattggtatttggctgtgtgaacctgaatcagataccctcaaaaccgaaattatggttgtgtttggactggtttgggttccggtcaaacgctcagggaatggtttcggttctatatgttcagtagagacccaaaaatttccaccagaaagatccaacacctccccagatgatcgcttgtacaagagccatcacgaacccgactctaaacatatctctcagatctacatacccagctgcagatccagaccaatatttttttttgtaagaaagtgttgaatggtcgattaattcgataactaaggatatgagaaatatgataaaaacttcgaaagagaagaaaccggacctccgtaatataaagcagccggtccaccactataatgtgccaaagcaccagagagattgttgttgaaagccaagcaaagcgctgctagaaccccaggcacgccagcagcgatttgcatcgccaagaaaggcggatagagagctcccgcgtgaccggtttggcttgcaaatagataatgtatcaagagataacaagcctggagaataatgaatgacgcgggccaagtcagggagagagattgtagcagtttggccacacaatccgacatccaagcaacgacaccgaggtttgttagctgtccagccataccaatcaaaaccgcaaaccaagtgagagagtcccaagctgatttgtcactgagacaatcgtcccagtttatgactcccaacagcagaagtgttgatagacctatcatcgcggacacaacacttgctattcctattgcctctctgcaaggagatacgaaaaataaagttcataatatggttaacgttgattttgaaaacttttttagtgagttttatgtagttatagacttatgtatcaatacgtctagttttagacactaaatagttttatgcgatttctcttgtatgatactaatgatgctttgttcaaattctgcaagaaaccgtacccgaaaacccaaagagagacggtgaaagccatagcgccgagcatgatccattcgtttttcgtgatgggacctaatcgttcgagcttcttagcagctgcagccggagcttctggtgtgtgtttcaactcaggagggtaaagcttgtagataatgagaggagtacaaagaagagacacaaacgcaggaacactagcgactttaaaccaagtgatccatggattcgagattacaacaccaacttctcttgctagtttgagacatagcaagttttgtgcagctgatgtgagtagaatcgcaccagaagctcctgaacactgtcacagacaaaacataaacccttcaagatacaatttctcattccaaacatttaatgcttaatgaacatagttgatgttatttccaaagaccaagctatagttactgattagagtctttgagttattacctgcaattgagtttgaatgagaaaagaacccaattttctggaagatgggtctccgggataacttccggcggagatcgccaaagatttaatcaccggcaagaaaacgccaccggctctagccatggtagacggcataatcaaacccataagcgtttcacagaacgcaagaccataagagagaccaagagtgcttttccccagccacttgacgaaataagtagcgattctgtcgccaagaccagttttgatgaatccacgagcgaagaagaaagaaatagcgattaaccaaatgagctcattggtaaaagcggcgaaagcggttgagaaaggaagcgttttggtgacgattgaagcggttaagccaatgaaagcccaagcgcctacagggagaggaccaaggacgagacctgagatggtgaagaggaagattgagagtaattgccatccttgtgaggttacttgttctggtcttgggattaagaatctgactatgaggccgattgagacggagatcgcgagaggaattagcttcgctccttgcggctgcggcggagaaggagggggaggttgaggtttgttttgttcctccggcaaggaagaggcggtggcgcgtagagtgaatcgaggggaagagatggagagtgatcggagtgttggggatgtgtgtacggaaatcgacggtggaagtaacgcaaatgatttggaggaagatcgatggagagatagataggaggctgagagtgagattgaacggagagccaaactctccatcccgggagagagagtgtgtgttctccgatatcaaagtgttactttctcaccggaggagcgaaactctctgtttgttgtctttataaaaaaaagttaaataaaaacgttattcttattttccccattattcatattttactaattaaaagataatttagctaaaactttaaaattaagaagtattcaaaattttcacatttggattaacttgtttgtattttgtatgaccataaaacgaaattaccaaattacagtatgtgttatcttttcgaaaattcagaattatttactgaatcaagtaaaaactcatgatcgtttgtttactataaatactctctcttgattttcatgattgtttgaagacttgtttagtttctgagatcataaatgttgataatgatcataatcaagataatgatggtgaacatgaaataccatatatcaaaatatatatcttaagaaaaagtgacaagaatcctagtcgttaatccgatatttatccttaagtttatttcaaatttgtcaaataagctgatttattttataatttttttgtaggatttcccttgtgaagttatttttcaagtttttataacatattctatagacattgttgaataacaaaacaacaaaacggtggggattgtaccataaaaacatcatatcatcaaagcacaattaatgagagtgatgcttgtggcgctaacttattttgcgtttagcttcatgttcgttgctctcgaaatttgaaaatcagtccttctgtaataggtaatttgaagattcactccttttttatgactattttctctgttttttattacccagacattttcgttttaacaaaaacgcccccaaaacagattttcatcatgtatcttactctttctccgaaaaagaaacacgatatttcataaagagaacaaatcgagatagatcttctgtatatctatttgacaaagaattgtctgattctctaattgcaagtagaaaaaaatgaagcctcaaaaccgaatgatcaacaaaagaattgtaccggactttgcaaagcttcttcaagaacaactttcttctgaggagctcttagtagagacccaaaaatttccaccagaaagtcccaactactccccagattatcgcattaatcgtcgccatcacgaatccaatcttgaatacatcaggcagatcaacataacccgctgcaaaaagaaacacaagcaaacgcaaaagttaaagagacttagctataaagagagagctctatcatgttcatcaatcaatgggaatacctccatagtagacagcggcttgaccgctactgtaatgagtcaaagcaccaaaaagattggtgttgtatgctaaagcaagtgcagctagaattcctggaacacctgctgctatatgcatagcaaggaaagctgagaagagagctccaacatgaccggtttggcttgcgaaaaggtagtgaatgaagaagtaggctgcttgaagaagtccaaacgcagcaggccaactcaaggagagagattgtagaactttagctacacaatcagacatccacgttacaacaccgaggtttgtaagctgtcctgccattcccaccaagacagcaaaccaagctaatgtgtcccatgccgatttttcgcttaggcaatcgtcccaattaaggacacctagcacaagaagtatggagagaccgatcatggcagctacaacacttggtattcccagagtctctctgcatataatattaaacccatggaatactcagatttttttaatcaacggtatgatacaaaacatgaaagtgatctaagacttacccgcagatccaaagagtgacagcaagaagcattgtaccgaccatgatccattcgtttttagtgacagggcccatttgcttgagtttcgttgcagcaatacctggagcctcaggtgtgtcctttgtttctggaggataaagcttatagaggataagtggagtacaaagaagtgatatgattgcaggtagactagcagccttaaaccaagaaacccacgggtttgagatcactactccaagctcctctgctaacttgagacacagcaaattttgagctgcagcagtcaagaaaagcgcactagagtttccggcgcactgtcaaagatcagaacaaaattagagaagcagaacaaaattcgaaaacttcaaaagtctctcaagtcaaatacaaacaacaagaaagaatctttcatctaaactagaaagcaacctataagaaaaatgaaagattctgcatttgaggtagaaacatcaaagcagccctcagattaagacacaaattgatgcaaagttcaaactttgtttctcaggatcacactactaactaataattggagccaaatcatgaatcaaaggacataaaacaaagaagtaacctggaattgagattgaatcaagtaagagcctagtttcctcgaagaagaatcattcggtttacttccagccgagagcgatagagacttgatgatgggcaagaaaatgccaccagctctagcagtagtactaggcatcgcaggagcaattaaagcctcactaagcgtgagaccataagatagacctaaagtactcttcccaagccatttgacaaagtaagtagcgattctatcaccaagacctgttttgacgaatccacgagcgaagaagaaagagataacgatcaaccagataacctcgcttgtgaaagctgagaaagcggcggagaaagaaagcgttttggtgacgattgaagcggtgagaccaatgaaagcccaagctccgactgggagaggactaaggacgagaccagcgattgttgagaggaagattgagagtaattgccagccttgtggtgtgactccttctggtacaggaacagcgaatcggaggattaggccgacggagattgagagaatcagagggatgagtttcgctccttgaggagacggagacggagacggagatgggggaggaggaggaggagcgttgtcttgcggtgcggcggcgattcgtgtggagaatcgaggaattggtttgagaagagggaaggagagaggttgaacggagagagatcggagggagattgttgaaggcggagatctcgaagaggtacgacggagaagagagagacgtgagggatggtgatgatgatgatgggagagtaaggtggaagtggcggtggtggagagagagtgaagagcgaaactctccatcgccggagattatatatatagagagagtgtctgtgacggcgaagtgtttaattttcgtcagtcgctcgctgtgtttttgtcgccggagagatctcgatcaatgatgatgagtggatgtgtgaagctgaaagtgaaattacactgagaatctaaaaagtcttcggttctaaccaaacaaaccgaaaccatggtaaacttgaaccgaaccactttttctaatttggttcatttttctagccctggtttaccaaaatccgaattcttttggaggcaatcaaaactcaaaagtcaaaaacactatcatcataaattcaaaatcatcgggtgggtattattttttaaatcatcggtttatcttaaatttttgaaatgatatgttttttttttttttttttggaaacttgagaacatctcattactaaagtgtgaagctttgtctgatgtaaaaccaaatgagagattcatgtcatgaaaattgaagagtagaacaatgctccgagtcaagaatgtagtgtcaattcgacggatcatggaagtactgatcttctttgtcttaaacactatatgaatctacccttaaactaaaataaaaaatacacatcctattcgtacgtcccattgttagatgtcaccaccaattttcgtgttaagaataccaacgacgcatatataaactattacatcatctaacaaaacttatagtataaaaccaacaaaaatgaaaaaataaacttaaagtatgttgtatatgtaaattacaatatattatcttgaacgacgaatacataatgttgcatgggtcatccgaccaaagaagcgaggatggaaaaacataaaaatgtgcggttggtatgtcacgggaatgggctgccactcaaatagtttcctatatcacaattatcacttatgatcccaaggattgttatttggaatctcggatggtcattttttttttgacattttcttcataccatacttagcatattagaggatacgatgggatccgattccgatttgtaaagtggaccatatttgtttatcgagttattagcatagtcatgagatcacacatcaatgtaaaaacaataaagaatgttaaatatgtcgtatgtgattgaagttgtactattgacttagatctgtttacctgaatttatagtctaaatagttttgcagtattttcaatcttttgataaaaaacaaaaatcaattgaaactatttttttcatacaaactatatagttgagcaactttgttacgtcaaggcagagacacatcttattatcagtttttttcaacatctgaaaatttaccactaaacttcaatctctatactagtagtttctgtactaatgacaaagatttaaacgacgattattttgaccagtgtttgaagcatatgattattattctcttttgtctccaaaaacataattagagaaggagacttttctttggtgtaagtgtaactaaaaagaagatgaaaatgaattgaaagtctataaaagttggctttgaagagaagagagccaagcaagtgtcttatctcctccacaccgaatcacagagatccttaaattcttcatttttcccaatttgcgccgccattaaaaaagcttagctaatcgctatcgtcatccgcaactaacaagacccatcctctctcttcgctacacttttccccgcatcttcttcttccaatctctcctattaatcggtactgtgttttcttctgtgatcgtgagattagaaaatctacccaaatttttgattttgcgataagggtttttcttaatttcgtctacggatatagaaaatgtcttccatcaatttatcctcatcatctccttccaccatctctctttcccgctcaaggtgaggttttttcttccaaatctcttattgttaccaattcgtttttgctcattggttaattgatgttggggaaatatgattttgcatcgacacgagaagatattcaattctaatctcagcttagatcctgatctaaggatttgtaattgcgcttcagtgaccttagattttgtgatttaaaatcgatcatgacattgagattcatagttttcacatatcgaatgctttgcttcttctctcgtttaatgatttgatgattctgtgcagactaagccaaagctctactacattactccatggactacatcgtgttactttaccatctaaccatccattgtcaaccttttccattaaaaccaatactggaaaagttaaggctgcagtgatctctagagaagatgatctgctctcattcaccaacggaaacactcctctctcaaatgggtctctcattgatgatcggaccgaagagccattagaggctgattcggtttcacttggaacacttgctgctgattctgctcctgcaccagccaatggttttgttgctgaagatgatgactttgagttggatttaccaactcctggtttctcttctatccctgaggccattgaagatatacgccaaggaaaggttcgtttttcttttgctttgtgaaagtcaaccttttttagtttcttttttcccttgattgatttggcggtaatgttgcagcttgtggtggttgtggatgatgaagatagggaaaatgaaggggatttggtgatggctgctcagttagcaacacctgaagctatggcttttattgtgagacatggaactgggatagtttgtgtgagcatgaaagaagatgatctcgagaggttgcaccttcctctaatggtgaatcagaaggaaaacgaagaaaagctctctactgcatttacagtgactgtggtatgtctttttctctaataaagattttgatcttgggccttgtggtttttatttaattttgtttgttctattctttcgccttcgtaggatgcaaaacatggtacaacaacgggagtatcagctcgtgacagggcaacaaccatattgtctcttgcatcaagagattcaaagcctgaggatttcaatcgtccaggtcatatcttcccactgaagtatcgggaaggtggggttctgaaaagggctggacacactgaagcatctgttgatctcactgttttagctggactggatcctgttggagtactttgtgaaattgttgatgatgatggttccatggctagattaccaaaacttcgtgaatttgccgccgagaacaacctgaaagttgtttccatcgcagatttgatcaggtatgcgcttaaaatttgaagtttttgtttctcttttcgtatctaatcttgaagttaaaaagctaaattttctggtttgaaaaatgacaggtatagaagaaagagagataaattagtggaacgtgcttctgcggctcggatcccaacaatgtggggacctttcactgcttactgctataggtccatattagacggaatagagcacatagcaatggttaaggttagagcaatgctagagaaatatatcttgttgatttgtcttcagaacatccaaggacttaagctaaacccatttgtctgaaattgtggcagggtgagattggtgacggtcaagacattctcgtgagggttcattctgaatgtctaacaggggacatatttgggtctgcaaggtgtgattgcgggaaccagctagcactctcgatgcagcagatcgaggctactggtcgcggtgtgctggtttacctacgtggacatgaaggaagagggatcggtttaggacacaagcttcgagcttacaatctgcaagatgctggtcgagacacggttgaagctaatgaggaattaggacttcctgttgattctagagagtatggaattggtgcacaggtattaaccaagatcacattatcatccaaaaaagacaacaattttttttccgggtattttactaaatcttcttgaatctgcagataataagggatttaggtgttaggacaatgaagctgatgacaaataatcccgcaaagtatgttggtttgaagggatatggattagccattgttgggagagtccctctattgagtcttatcacgaaggagaataagagatatctggagacaaagcggaccaagatgggtcacatgtatggcttgaagttcaaaggggatgttgtggagaagattgagtctgaatctgagtcctaagcttaaaaaccaggacgaaccgaatggaatcaagaactatagatataatacttcacaaaaaacaaggaaagaaattgacacagaagaagaggaaaaagacatttgatctgtctgagaaacttgattagattggtttatgttctaatctaatctgatttgatttttttttattttgtctacgattcttgagttacgaaatgttcatcatttgttacttcttgttgtcgggattgagtagttgcatttttttagttgtggagctgtgacaaagaggccagctagtgtgtggaatgtggatcatcatcctttggttgattccttgtagaatcctttttgtaaacatttaaactataataaagtgttatgattaagaaaactagttacttatttttttagtcatattgactctgagccataaactccataaaagtcctcctcgattcaattcggaatttaaacagtttcagttgaactctgaacaagaaaaaaaaaggaaaaagcaaaaggagtccgtgcaagataactctcattttattctctttgtttttgaactatttattttgcacaaattaggattgatattaaaattttaattaaatcaaataataactattaattttgcaccaattaggattaatactaaaaacattaaattaaatcaaataatagcatttttgtttagtaaatataaaatttaatctaaaataattaaaatacacaatacattaaaaaaaaaaaactcaaaaggcaaagcataaaagaagaaacagagtggaccatgtgtccgcgtggaaccaaagcttccaaataactcgaccgtttagtttattggaaacgaaaaaagaaaaatcatggcaacacaacggccataaacatccatcacgcgtctactaaacgaacacgcgtacggtccagattctcaaatgacagctgtcatagagccgttagcgccgtagtcaaagggtttaagcccaaccgcgtttctctttttcacctctttcttttgtagcataatatctcagccgttagatttaagtcggtccttactttttcatatcaacggtcacgattcactaaacacctcaatacagtgtaccccacttcttctctctatataaagaacaccatctcctaggtttcgttaacaacaacaacaaagcaaaaacactcccaaaccaaaaaaagaagaagaagaagctaaattcgaatctctctcttttttgaaatatggctttttccaaatctctagtgtttgttcttctcgctgctcttttgatttcttccgcagtggctcaatctccggctccagctccatctaacgtcggaggtagacggatctcaccggctccttcacctaagaagatgactgctcctgctcctgcacctgaagtttctccttctccttctccggcagccgcattgactccagaatcctctgcttcaccaccatcgccgcctctagctgattctcctaccgctgactccccggctttgtctccatctgcgatctccgattctccgactgaagctcctggtcctgctcagggcggcgccgtttcgaacaaattcgccagtttcggatctgtggcggttatgttaactgctgccgttttggttatctaggttgttccgatcaatgaagcttctttgattttatttatttattttagatatattagagttttgtgagagagatgatgattcattatttttctcttctttctattattttctttgaatatttttctttcttcggctgatcctatgcgcgtttgtatctatccaatatttatctatctatatgatttatcagattttctaaataactttctatggaaatattaacttcaaattattatggtctgaaatctgaataatcgtgatctgcagtacaatcacttaaaataacaaaacgtgtaatttagctcaagaaaagtaatgtagcatgcctaaattaattgtcacaataattatgcatatatttgtcttactaattaagcaaactaattaagtgcaatgactaaggaaaagcgaaacaaaatcatgatctacatgaacaatattgttaatcaattgaaacaaaatcatacacgttattaataatttaacaaattaaaaaaggtgtaaaattacttcaagaaaactatggtaacatgtctaaattatatcgtcagaatctttttgcatataaaagactaactagtaaacaaattagcccaatgaccaaatgaagaattctaccaaaaagtttttttgaccaaatgaagaatttacagcattattatcaaattgacatatccataaaaaaaactgggccttgaggccttaatagtagcccaatagatagtttaattgaataattgaggaacttgaaactataagggaaaaaatcataatttgggtgacagcatacacataccacagtaacattaaccaaacaaattttgtatttagtttcaaaaagctgcattataaaaccttcgtctatcaagtgtttcttggggaataatactctgtaacaaaattgaccaagttctatgatttggaacaaaaccatcttcaataccttcatccagaagtaagcaagcatcataaacaaaacctcctttgcacaaccaactcatcaaagtgttaaacgtcaccgtatcaggcggtattccttcagcctgaagcttcctaaacatcgtcaaaccatcttcgatcctaccggccctacacagaccgtttatcagactgttaaatgtcacaatgtccggtgtcgatcctctcagaaccatctctttctgaaactcaaccgcttcttccaccatcccgcttctgcagagcccgtttataagtatgttgcaggagatgttgcttggtgcatgcccgtctcttaacatcttttcaaacaagcttctcgccttatctacctccccggccctgcacagcccttttatcagactgttgtaggttatctcatcaagcggggatccctggaaaaccatctcgtttactagtttacgagcttctttgatttcacctcttctaagaaacgcgttgatcagcgtgttgtaagtaacagtattagcaacaacaccttctgatatcatatctctaagtaaccacaaggcatgctttatttcgtcgacctcacatagtccagatatcagcgaattaaatgtatacacatcgggtttacagccttttctcggcatctctctgaaaatctctacggcctcggggattctgtgttccttgcagaaagccgatatcaaacagttaaaaccaacagtgttgggtttcagtccatcggcagacatttcattaagaacattgtaggcttcatctatctttcctaatttacagaaaccatcaactaaaatagtataagagtagacgttaggcttacatcccttattcctcatgtcatgaagaacttccagagctaaacctacaagaccctccttccaatatccatagatcagtgagttatatgtgcagacatcaggaacaatgccataagacgtgaccatatctgataaaacagctttagcatcatcaagtcttccgtgagtcacaaacccgtgaataagagtattgaagatcacaatttccggcttcggaattctgtaaaaaagatcttttgcagcatcaacccggcctatcttacatagaccattcatcaaataaccataagttatatcatcaggagcaaaccctctaatcagcatccggttcaccattttagcagcttcgttaatccgatcaaacttacagagaccaaggataacatcgttgaaagtctcagcatcaggaacacatcccatcagaaacatctcctctaaaagctgaagcgcttcgttcactctattacacttcgataacgaatgtataagagtctggtaaataacagagtttgggacacatccatgtttcgtcatgtccctaagcagagacagagccgaatctatctcattaacagcacaaaaagctttcatcacaacaccaaatgtgaaaagcgttggaggaatctttcggctaagcatatcgtagaacacattagctgcaactttatgacaattaccagaaaccaaaatctccaagacaacattgtaagatttaaaagtgggttcacaggaatagacattcctcatctccaacatcaatctcgttgtctgtccaggaaaaccagctttgtcgtaatctctcataatcgaaatgaaaagagattctttaaaaacgattccttcatctttcatctgaattaacaatctatcaatggttttaaactcaccattcgcaccaagcttacctataagaacttgatacacatcgaaggagtgacgataaccgttttgagaaccggtccatgagaacaactccattgaagtggatacattgagaggtaactcaagtagcttatagagctgaaagggagttatcttgtgaaatgaattccttagagaatccagatcgaatggtttaaggagcttctcccattcgtttgctgaatcggtaccaccgatttccggtgagctgccgccgccatcatctccgccgccgccggaaaatctagaggagagacttgcgtagtagcagattctttgcaaagactgtgatcttctgctcacatctagagctagctttgatctcgctagcataaccataaaccccacattaatcagacagaatctctctggttcctacgagcgagaagaactttagaacatcggtaattaccaatttacccttctggtctctgaaaccttataagttagagggctcgaatatgttttattctttttattttgggccctgttttctttgtttttattttgggccccttctgagcccaaacaaaaacaagagaagtaaccttgagttgatcctggccgttagatttattataacgttttccttcagccgtcggatgagtatatcctgtctgatttgaaccgacaattttatattagcttttaacatatgaaggcgacgtggcatttgtattaccacgaccatcatcaataatgtaagccataaaaagatcacatgattattactttgtgtatttaaaagaaaaaagatattgatctcaagtgttttaaccccttgtaacaacaatccaatcaagatgtggccattatataattattatggcattgtatatgtgggggtaagagttttaacgtggtgattggattggttattgaatatgaccatcaatcattttatcatatggaaatgtttctatagtactatctactatgtgattgaaacactttataacatgaaaacataactaaagaggattagttgtacaaaaaagtgttatcattctaatctaattactgaaaaaaattaaaattgaaagtgactaatattgttgtaccatatgaattcacaatttaatattttcatcgtaaacgtttgatggttttcttgtagtaacactagttagatttaacacatgaatacaagctggttctgcaaatactttgcatagaatcctaagttacttggagaattccataacctattttttgttgttgtcgtaggaaattaccattctaatcaaaagttacttggagaaatgcatggtctatatatagtagcaaagagaagattacgactaatacatatataaccatcgtgtgtattaatgtacatagctgacattcttatggaccacttcttctatctcgatctccatttatgtatgtatgaacaacctttgtttttaatgctctcttttaaatttcctctaacttttccttctattatctttgtcatcaaccaacaaccattgaaaactattgtgaatacaatttctacaacatcatatgtttatctcttgaaataatatctaatgtcataacttctcaaaattgatagtatgactttaatctactttttgtaacccgtaggtggttagtgcttttgaaagtaatcactttcacatttcagtatttatagagaactcatttagatgtaacagtaactcaaggtttctataattggtatagaactaatcacattggaaacatttatgaattgggggaaagaaagaggaataatatgaaagaaagtaagagaaaagatatgcaagattgagaagagaagttagggaaatggacccatataagagaagcctcaaagaggaaaagaaagcaaagataccaaaagaaagttaaatgcaatgtacatagagatgattcaacattttatcaaaaaacagacaggcaaagaagaaggaacgaggctttgtcatagttaatgacactcactctccaacttgtccctccccaaatcttatatatatattttatttttttctctacttaaccaactcatatcttcactaaaaaacatactacaatgtcagtaaactaataatgtttaatgtaaaatctaaaaaagacagattgaattatatgataagaatgggcaaaatttatatcactaaatttcaaaaaaattatgataattgaagaagcagagagttttaagcccattacatcacaggctgttagatatatgagagactttggttttgaaaatctctctgagaaaatagacaattcagagaaagctccaattctcgaagcatcccatgtggggataatatctccctctctcttctctctctctttgccactctctctttcatctttataatcaaaactaatcaatctctcttctcttggaaactctttgtttcactttgatcttctcatcctctatatatcttcccttggtcctttcttgcttccaactacagagagtgttaacttgtgtatgatgtgggaatctgagagcgacggtggggttggagttggaggtggaggaggaagagagtatggtgatggagttttgagttctaacaagcatggcggcgtcaagactgatgggtttgagcttagaggccaatcttggtaatatcctcacactttctctacagtctctgcaaaaagaacatgtttccttgttaaggaagttaatactcatatcaaaaacctttgcctatgattaggtttgttgctacggatatccccagcgatcttctggttaagatcggcgacatgaactttcaccttcacaaggtaacttcatattcttgagtcaatatttttaagctggaactagagaaagtttatggatttaaaagtgtttctttcctttcagtatccgttgctgtcacgtagcgggaagatgaacagattgatctatgagtcacgagatcctgacccgacgatccttattcttgatgatctacctggaggaccagaagcgtttgagcttgcatccaaattctgctatggagttcccgtggatctcacggcaactaacatatcaggattacgttgtgcagctgagtatcttgagatgacagaggatcttgaggaagggaatctaatcttcaagacagaagcttttctcagctatgtggttctgtcttcatggagagactccatcttggtcctgaagagctgtgaaaagctctcaccttgggctgagaatcttcagattgtgagaaggtgtagtgaatctatcgcttggaaagcttgtagtaatccaaaaggtattagatgggcttacacagggaaagctccatctccatcaacaacaaatttcgcgggttctagtccgagatggaacgaatcaaaagattcaagtttctattgtagtccgagtaggaacactaatagccagcctgttcctccagattggtggttcgaagatgtctccatcttaagaatcgatcatttcgttcgtgtaatcactgcaatcaaggtactactacacataggttatttttctctcaagcattttcacaaacacttggtgtacatatctcaatcctctatccattgaaacaggtgaaaggtatgagatttgaactactcggagctgtaataatgcattacgccggaaaatggcttccgggtttgatcaaagaaggaggagttgcaatagctccagcaatgtcctccgccattggaggaggattaggtttaggaggagacgaaatgagtataagctgcggaagcaacagcagcggaggaagctccggaccagattggaaaggcggtcttcatatggttctctccgccggaaaaacaaacggacatcaagattccgtcgcttgtctcgccggactaggaatcagtccaaaagaccaacgaatgatcgtcgaatctttaatcagcataatccctccacagaaagattccgtcacttgtagcttcctcctccgtcttcttagagcagcaaacatgctcaaagtagctccggcgttgatcacggagctcgagaaacgcgtagggatgcaattcgaacaagcgacgcttcaagatcttttgattcctggttataacaataaaggagagacaatgtacgatgttgatcttgttcagagattgttggaacattttcttgtgcaagaacagacggaaggatcgagtccgagtcgaatgtcgccgtcgccgtcgcagtctatgtacgccgatatcccgagagggaataacaacaatggtggtggtggtggtggtaataatcagaatgcgaaaatgagagtggcgaggcttgtggatagttatctcaccgaagttgctagagatcggaatttgccgttgacaaagtttcaggttttggctgaggcgttaccggaatctgctaggacttgtgacgatggactatacagagccattgattcatatctcaaggtatatatatattgaaggtctttttggtaaattcgtagaatagttttcaacatttttttggcttaattttgttgtgataggcgcatccgacattatcggagcatgagaggaaacggctatgccgagtgatggattgtcaaaaactatcaatggacgcatgtatgcacgcggctcagaacgagaggttgccattgagagtggtggttcaagttctcttctcggagcaagtcaagatcagcaatgctttagccaacacatcactcaaggagtcaaccactttaggagaagccatgggtacgtatcagcctatgatcccaaatcgcaagacattgatcgaagcaacaccacaatcgtttcaggcaagtaagagaaaacactcatcaaaattcacacaaattccttttttctaattcctctactttgaatgcaggaaggatgggctgcagccaagaaggatattaacacgttgaagttcgagttagagacggtgaagaccaagtacgtcgagcttcagaacgagatggaagtgatgcaacgacagtttgagaagacggggaaagtgaagaacacgccatcttcttcggcttggaccagcggttggaagaagctaagtaaactgactaagatgagtggacaggagagccatgacatatcctctggaggagaacaagctggtgttgatcatccaccccccaggaaaccaagacgatggaggaactcaatttcatgaagtgatagtgatggttttgtatcttcttgattttgattctttgaaaagaaaaagcttttgtttgttcctaatttgtaatgtttattggtttctaatatggaataagtgacataaacgattcgatttttatcacaaaccaaaaaacgccatttgtttattacaaaaccatttaacaatacaacaatagagacacaacaataccagtagcatgtgggttgaagcaaaagacaaaggaatagtttgcattattacagacactcaaattaattacatgaacatgacatcaatatttcataaaaatcatggacccatctagtcatcatatggacaaaagagtgtgtgtgggtcagagatattttattaccttaggggagattcatagatcacgcgagcttgagatgagactttgaatatttgccttttgatttcaccatccacactcagccaaaaaagataatcattgtccatcaatgaccatgacgactttggcttttcattccacacagagagaagaagaaagtgacctcttttcttctttaactttttgaaatttgcagtagcatatataatacttaaaagtagtccactatatacagctaaaaagctggtgcagaggatacgtacccaaaaacccacttcacacgttttaactcgtcagaatctttcacgccttatctgtctgcagatttcttgttccccatgttgtctctttaagcaacaagattggtgacttgtgagtggtggagctttggttcttaacctctgtggagattaagtctcgtttcagcaactttaggtaatcaattgcttcgtccagaagtaagagcgcttcgtttccttttgcaccagggactacgctctcgagtattttcagagctgtgcggatcttgtctttcttcgactgctcgttgctcagaccagaaccagtgtcctctttggtcgatatggtttttgattcagggagctttttgtccttaagaaaggaagatccattgagttgtgtggagctctcagtgcccacaagtgatgataagtcgctgatgttgttgaccttatccagtagtttctgccttttacaaggaccatcgatttcttctaattcccttttgttgcaaactccttcatttggataaggagagtgaccagtgctcattacttcatcatcactctcgcaatcatcatcataatcatcatctgaatatagcaatgcattgatctcctcagtgtcttcatgcatttctgactctgttccatcactcttgtgaaactcttcaccatcttctttgaaagctttctctataccttgtaactcagagagtttcactggttctgcagccgcatgagatggaaaccgtagaggaaatggacattgtaatagacgagtctggtctcctgactgatcgaatatcaaaagtcttttctgagaagactctaatgctccaagtggagtagtagtagtagtagcagcagcgcaccaagaccgcatgtcagaccgtgagaatctttttccataagactccttatcatgactgcacagcaaagactggaatggtggtggctgcaaacagcgagcctgaagcttagctgcatatagtttcccaagctcagggagaggaattctaggaaggacagaccgacctactatatccttgaagcaagcttgaggacttaagcccagaggcaaatcccgttgcctcttatccagaggcatgctcttagcagtttagctcaagggaacttcaaaaagtacaacactgcaggacaaaacagaggcaaaaatcagctcaagaaagataaagtcagtaatatcacaagcgtaattagagggaaaagagcataccgattgttaagttgctcaactgagtgaatgcaatacttcttgtgtccttttcgagaaaatagtaaaagaaagacgaacgaaaaacaatcacagattgaaaaatgcagcgaaatgtcaccaaccaactacgtgactggtttgagtagaagtctgaagtactcagcctgaaacacaaagaataatcacaaaaccacagtgttagaagactagaactatataagctaaaagtatgataacaagagcattattgtctggtacaaacctggcaattatccatcggttgatagcattcaataactctcactacaattgttgattcgttagcgtttccggtctcgtacttcaatcctcgaaatcttgtcttaccaggtgattggcacaccataactttgaggaaatcttgattgaagaaagtagacagataccaaaaccaaaaggaggaaagttttgtttgtggaaggagagtgagcttttagtctagctgattctttgttcacaatggtacacatagaaatgttgtgatcccattttcaaaagtgtttataatataccgaaaaagaagggaagatgaataagaaagaaaaggatttgactcttgaaggtgttgcttcaaaggtgaaacaatctacagtatcacacggcaatacagattcaagctcaaaactttacggtatacggcaatacacatgctgttttctctttctcttcctcttatacacactctaattgattctgatcactcaaacctactttagtatctgtgcaaaaagtcgaaggaagaatctcatcagcaccaaaaatgagctaaatccagagatcaaaaacagtaaaggacatagatttataaacgtctagcaagtgggtgtattcacagcatcaattccagcaaaattacgctacattttactattacaactcagaatatacacaaatcacaatgttctaagctagattcagacataaattacagaactttaccatttcacaaacgactcaaaccgtttttaaccacagtctccagatacacaaacagagagaacagtgacacagactataagagagaaaaattggattttgattaccttagaaaggaatgatctttcggtcagatccagagaaaacgatgagacttttttgtttttttttgagctgaatcaatggaaaagcaaagggataagagagatgaaagtgaccaacgaacaataatgtctaaacggagaatttttttttacgaaatatttctaaagaggtgagtggcaacaagagtaacaaggctttataaaaagattttatgacgcttttgcccttttcattactttattttaccaattcacattctcaattttttcggttttttgtttgttctatatatcgaaattaattttcattctatatttttttaaaagaaaaaaactaagatacgcaaaaggtaacataatttaagttgtacaatttgaatttttaattatttagaggaaaaatatgtgtaacttggaaattaatctagtaattaaaaacggtggcaatgtttatatttgtgctttgcttgaaagaaatgggacaagggggccgaacgtgtatatacgtaattatggtatatatgatgacaaagtctcacggtccataatttcaggttatactttatcattaaataatatttttctaaccaatataattttttaatatatacttaattcgttaaagtaaaagttcatacgttttctcttatttattttaaaagctaagttagtgaaagtgtggtcgagctttattatatccttaattattttctaaataaatactatttcaggttataatccctctttaattttattgaaagctaagttagtgaaagtgtgctcaagctttttttcatccttaattatattttaatagtacatttgttcaggtgcggtgttgtgtgtgtttcaaacacccattgtgacggaaaagaataaaagctaaccactctttttaattgtttaatttaaattgacaatttagcatctatctagcttatacaacgccaaaattagctcaatacttttgttttatttttaaaaatattatgtagactttcatttatgttaaaagttattattcataaaaggacttatgtgattggggaatgtgggtgaaaagaaaaagaaaagtaaaaagaatgaaaatgaaaatggagaaaagaaaaagaaaaaagaagcataagtgatgattaaagaattgcacgggaattttaagtgcttaattacccgcacgacttctctcgcgtctctctcttttttcttcctttcttttgttaacttatgtatcttgtctgaaaaagtttttaactttagtcttttttcttcctttgatttgatattaagaacagtaatttatactgtgttttgaattagaagtggtcaattcaaatttcattatggttgagaccatttgctttgggtctgatatgtcattaagattgaagttttagtttgattcttttgtgctttttattggcattttgattgaataaacaaaaccattttaatcaaaataaaaaaacgggaataatatcataatatagtacaaacattccaactgaaacacgagacgggtcttttcttttatttagataaaaacgttgtccaagagttttagaagagcaatgacatcacaaagttttgttgcataaagatcccagaagcaataaacataaagggttgtttaataatctacccacagtttaggagctggggagatcattactgcacgctcagtacttcgatttcaaagtcgagaacagagtttggctggatcccccatgccggaaatccaccagcgccatatgcgtaatccgatgagcactgcagaagcagataagatcgcaagccaaagatgttaaacatataacgaaacacccaaactatcatgaaagacaaaagtgcttcaacagagagccataaaagcatagatggcaaagaggaacatgatgagagaagcagagtatacatacccgcaagcgagcaacctctccaatttgcattccgataacgccttcatcccatcctgtaagcaaagttaaacaatcgaatcatatgatgttcactcgccaaaaaagaggcaaataggttcagagatatgatatgattaaccataaaacagagtaagtaagtttatacctttgatcacagcacctttaccgatttggaacgagaaaggtttttgtccctcgtcctttgtactataatgatataccaaagaacaaaacacagttaggctcaaggaaataccaaattaaataagtcttttaagacgaaacatattgatttataaactgagtatgcgtagatgataagaacaagtaagtgtaattatctttttattgatcctagaatcaaagcttacaataaagaattatttacctccagaacttctgggatagatcaccatctttccctgccaaaaaaaacacacacacaagagaaataagattctcaaacaaattcatttcaattccacacaagaaactggattataagataaacaagattctttaattaaacctacaaatagaaaatctaaacaagagatctattcgtatgaagtttcagatgagcagacaaataatctcgcagaacagcaaaattacagattaattatgacctaagtgttactatcaccacccagaatagaacataaaccctaattaaatctatttcacatcatagaaaacaaacaaatagcgagtacgactaccacaacacatcaaatagctcttcaacaaagcagatttgtatagatcgatttagcctatcatggaattttcaaagatataaatatgcagaggaaagttaccgaatccggtgcaatggacggtgacggtttggcccggagcgggtttgggaccgttgccgggtctgatgacttgcttctccacacccatctctatatcttctctctgtctctctcactgtttcgcgttctttgcagcttcgaatctcggagtagcttttgcctatatattttgttatttatcaattatcatgctgtttgatctaaaccctatctgggcctaacaataatccaaaacccaattcgatgaaatttaggcccattatttattctttctcaaaggtggataatataatactgtaccagaccgaattaagaagcagaatctagcccaaaactattttttacttcggattcatcaaattcaagcccagacttgtagctatcaaaatttccttcgcatttttgaaagatacatggtcaagaagacagagcaatatagatacaacgaaccttcttcatcacaattacagaaaaaatgattatgtagatatcatgtttagagcctaaacggctaaacagttccatcattaatgtcttaaacaagcttttatgaacagacaatggaaccttcactgcgcaactggagcgtataaaagccagataacgtgcacgaatcacctcttggatagcttctgtatcttctagattctgcagaatactcattacaggtaagtgagaatacctagctactatgactacacaaaaaaaactctacatagccgtttaggtctttaccttagaccccagcaagaaattcttgacaaaaagcttacttgttttccttacctttcaaagcatcaaggatgaatgaagcaagcaatgtgtgttgtcactttccctcttcgtttgtcagtccagaacacaacaagttatctagtgaatgaacagaagcagcaattacgacatggaaaccacctatgttttgcaatttgctgctctatggccttttgagttggaggaacataattcttttggaacaaaatgaaacctgagcaggataagtaactcactttactttagataaggcatttggctagtaaggttttatagtctaataaacccgagaaagataatcttaatgcctttactcagaactcagaagcagaagactatataccagaaagcgacgaaagcatccgaattttgagcaaaataacatcaacagattccaactacagggattccaaggaatcaaaatgctagtatttccactacagttaaacatcaacaggaaacataaaagctaaggcctacaacaacgaaacacccgcaacctaaacaaagagaggaaaaagccttacttcactaagtagccttgatcttatcatctccaacaacagaaagtatgggcaaactattcaagaattcatcaagtccctcaaagaacccaatcccttccatattatctacctccctgttacttccgatcccattgcctgcatttcccccacctgccacaccaggctcttccacttcattactaaactccacattcaaatccaacctccccaggttcttagcgcctgttcccattcgttttctagtaatataactccctggtttagacataaccccagttgaagacccaacagccgcagcatttgaagcaattgaaaccgcgtgattgctagcactactgatactttctacattttggacttcttcaactccatgtttcttgttacttctcacatatgtttctttccctttcccaacattcgtcttcttattcacttgtaccacatcttgccaatcaccatcatcaccagcgtcatctccatccgaaatcgcaacataaatgtcatcatcgtcatagtaaatcctaggaggacccggttcctttctcttctttggttcaccatccaacttttgcagaggacaggcaaagagaggtgaaataggtgaccaacttggagcttgaaattcaccggaaaaccccaatggaaacaaagcccatgagcaaaagtaaacgtcttcgtcgtctttcttatccaccggaggttttggtatcgtcacagcttgaaacgctcttctacattcttgacatttcaaagtacattcttcgtaagccttagggtactcaaagagtacaaagcagtaagggcaagcggtccagaagctcgtcgccataggatccgccgaggtcccagcctggctctgagaccgcggtggcggatatacggcggtgctactgctaggttcccactggaaattttgatgcgattgggtttgaggatggaatccagattgaccgagttgactaagttgcaattctcggtcgtagaatgatttcttgaacggatcagagagaacgaaccaagcatcggagacgattttaagagctcgatcggcgaatgggagacgattaacggaaggattgaggagaagagcgagtctacggtactgagtcgcgacgtgttcagggttttgagctaaacgaccgagtcggagaacggcgtaccagtctggcaagttggaatcacctaaacgagtctctccggcgagaagaatgtcgcagattgcgaggatgtagtctgcagcttctgctcgggtcgggtcagcttcgcatgcgcggatcgcaaatgtctttgctccttgaagatcactagacgctagaagcttctccgatgttacaagccactgatccgcctccactctgttaccaccaccaccgccaactccgccgcgtccgcctaccatatcccctatttctttttgttccctttcgtttttcctctctccccgttgaatttatttattattttatcggtaaagagtaaatacagatctaaaaattaaaaggacgaaaacatgatggatcgtcaatgggccggaacaacaacatgatggatcgtcaatggcattttggtccttttcattttatataatatgtgcaatgtgatggatcgtcaatgggccggaacacttttttctaaatttttcacttacaaaaaatattaataaaataagatgtaatattattctcttaggacagtttctctaaacaattggaaaagtttcttgtaatctctcaaatgagagactcactcatctttactgagagatttttttaattaaaaaaaacattatttactattttatttttatttttgtagatgagagatttgaacgaaaaaccaccaatacagatgctttttaggatgttgtaaagcccaataattcttttaagaattaaaatataatctggtgggctttaggtctggacagcctaactaaaataaaatattacattccgattcccagaaaataattcgtaatcaattgaccaaaccgatcgatcactgttgtcataaaagtcatcgccatcttggtttcgtgatcgaaaaagactcgtgaaaaaatggatcatatgatatcagaaaacggagaaacaagtgccgaaggatcgatttgcggctatgattcgctgcatcaactcttatcagcgaatcttaagcccgagctctatcaggtgacgtatccactccctccaaactaaattactcttctagtgtgtttgatctcgcttttgattagcctgtctaattcgaatgatgatattatggatcttttgttctagtggtttcaagtgtttattttagttatgttgatcagctttaaaaaatatggattgttgatgattggatttgcaggaggtaaaccggttgctccttggacgtaactgtgggagatcgcttgaacagattgttctgccggagtctgctaaagccttgtcttcaaaacatgattttgatctccaggtttatacttcgttagttataggatcagatcattgaacttaatagattgagacaatgttttgatttgatttgatctttgtataaatattgtctaggctgctagcttttcagctgataaagagcaaatgagaaatcctcgagtggtcagagttggtctcattcaaaactccattgctcttccaaccactgctccattctcggaccaaacaagaggaatattcgacaagttgaagccgataatcgatgctgcgggtgttgctggtgttaacatactgtgcttgcaggttttgcctccatttgctttcttttattgaaaagttgttacttcaattgtttttgaccttttctttgggggggaatgaatggttttatcgataggaagcttggaccatgccatttgcattttgcactagggagaggagatggtgtgagtttgcagagcctgttgatggcgaatcgacaaagtttcttcaagaactcgctaaaaagtataacatggtgattgttagtcctattctcgaaagagatattgatcacggtgaagtgctttggaataccgctgtgattatagggaataatggaaatatcattggcaagcatcgaaaggtatatttgtgctaacacgtcttttgttgctctgtcttttctcttgtcagctaatttctattacttgcttggtggcagaaccatatacctagggtaggagatttcaacgagagcacctattacatggaaggagacacaggccatcctgtgtttgagacggtgtttgggaaaattgcggttaatatatgttatggcagacaccatcctctgaattggttagcttttggtctaaatggtgcagagattgtcttcaacccttcagcaactgttggtgaactcagtgaaccaatgtggcctattgaggtttaacttctgattctccactttactcaatttgaagctttctttctttagtaacactgtctaacaatgcaatatgttccttaaaacttgcaggcacgaaatgccgcaatagcaaacagttactttgttggatccattaaccgagttggaaccgaagtattccccaatccttttacgtcaggtgatggaaaaccgcaacacaatgatttcgggcatttctatgggtcaagccatttttctgcaccagatgcttcttgcacaccgtctttgtcccgttacaaagatggtttattgatctcggacatggatctcaatctctgccggcaatacaaggacaagtggggatttagaatgactgcaagatacgaagtctatgccgatcttttggcaaagtacataaagccagacttcaagcctcaagtcgtctctgacccattgctccacaagaattctacataagaagaaaatttcactctgtgaatcttcaaagaagaaaagtccaataatcaatgttcaatcatttgtgtaaatgtaacggtaactgaaaatctgtttgtagctgaatatatgttgatgccaaaaggcagctcctttgcttttataatcgaaccggtttataattgaaccggaatccaattccaaaaataaccgtaatcagatactatgaactgtggggttttctactcctcgtcatcttctattcgttatccgttttgaagcgtactcggatgggattgagtttcgcagatgctttaaattctagaaaataatgcaatctcttaccttaactcggtacccaactccaatttccccgccaagactcaatctttacccgctaagacaaatcgcagcttctgttctctctgctccgaccgccggtattaaccgtcgcgatatggcgtctcgccatcagtcaacttcctttaagccccttgccgttggtcggaatttgaccggagatgatgatgatggttactgtactcttatagactttgcaggtaacaaactgctctgtctgaacgaacttagcactgtctcgataattcaagttaatgtgttgtctgtcatccattgtcaatctatgtccgaaaatccgtaactttagtggaaataccctgaatttagcatctaaaatgtgcttaattgagtaagacaaatcttggaaactctcttagacgaacaatggttgggttttgacttttgacggttcctctgtataagcagtttgattgaagtcttaaatttattattattttaagttgttctatgaaattttctgataggtagtggaggaggagaagggaaaaatgtaggagaggatcttgtggtgttgctttaccacttacaacatgcttgcaaaagaatcgcttctcttgtcgcctctcctttcaattcttcactcggaaagctctctgttaactcctctagtgggtcagaccgagatgcgcctaagccgctcgatattgtctcggtctgtatcttattactctcttttttatcatgattcatatcaagattcaatcttacaattcatgtttccgttttgcagaacgatatcgtcttgtcctctcttagaaactcagggaaagtagcagtaatggcttctgaagaaaacgatagtccaacttggatcaaagatgatggtccttacgttgtggttgtagatcctctagatggatcacggaacatcgatgcttcgattcccacgggaactatatttggaatttacaatcgtctcgttgagcttgatcatttacctgttgaagagaaagctgagctcaattctttgcagagaggcagcaggcttgtagcttccggttatgtgctatactcttcagccactatcttctgtgttacacttggatcgggaacacacgccttcacgctagaccattccacaggagaatttgttcttacccatcaaaacatcaagatcccaactcggggtaaaaagcgtctaatgacacatatgacttgatccattgcgacattcctattcatggctctgaacaacctgcattaatcgttgttttttgtatgatcaacaataggacaaatctactcagtgaacgatgcgaggtactttgattggccagaaggtttaaggaagtacattgacacagtgagacaaggcaaaggtcaaaacccgaaaaaatactctgcgcgttatatttgttctctagtagctgatcttcacaggactctcttatacggtggagtggctatgaatccaagagaccatcttcgtttagtctatgaaggtaaccctttggcttttctcgtggagcaagctggtggcaaatcctctgatggaaaaagagggatactttcgatacaacccgtgaagcttcaccaaagattgcctctgtttcttgggagcttagaggatgttgctgagctagagagctatggagatgtgcagcagactgtgaaccctggctatgaagtttaaacaactcctctgtttcatattatctgtaaaaacaataaatgaatcgatgttagatttggttgcttgtaacattatgtattaggaaagttagatccgtgtatatatctgtttatcaagattcaagatcgactggtataatcacaattcacaagtttattatgtttctttatcagaagcaatctttcttcgatttctaacacagtcccactcccataaattggttgttagatttcggttaagtttagtaagaatttttaaaatcggtacggtatggtttgccgttaaataataaatatataatgcggatatttggcgcaagttagcaacttagcgttaaagaccaccaaagacttctctcaagtcctctgcgccggaaaccgccgtgacgagattggagagggagagagaggagagataatggagcgaaatagcgttaaatttcatgcagagaagagatccggagcgtttgatccaggttcaggattcggatcttccaagagggtcaaaacgcatcacacgcagctgctctcagctctggttgtgccggtgggacacgcggcgtttagattgctctgccctttatcacacgtcggtgcggtgattggaaaatctggaaacgtaatcaaacagctccaacaatcaaccggagctaagatacgggtcgaggagcctccgtctgggtctccggatcgggtcatcacgataatcgcacaagcagattcgaaatcaagggtgaaattgggtgctaataacaatggcaatgcagaaggagagaaaaaggaggaggaagttgaggtatctaaagcacaaggagcgttgattaaggtattcgagcttttagcggcggaagctgatagtgatacggtcgtgtgccgattgttgacggagtctagccatgccggtgctgtgataggcaaaggtggtcaaatggttgggagtattaggaaagaaactggctgcaaaatttctatacggattgagaatttgccgatttgcgctgatactgatgacgagatggtggaggtacgaattctaattgatactaaatttagaaactatgaatatctctttggagaaaatgttttgagctgaaacgttggtttagcactctatagatgcttgtttttttgcagattgtaatgtattggttttcatattgaactatggcaggttgaaggaaatgctatcgctgtaaagaaagctcttgtgtctatctcccgctgcttgcaaaattgtcaatcgattgacaaggtaaggatggttggaaacagacctctcgaaaaagagttccaagcatctttgcataggcctatagagacaataattcaggagtcacttcctaggtccgttgaagttaacccttacgattataggctgagaaacgacgagatatttccccggggcactgtagctcgggctaatgatgtgattcctcatgatactttgcatcttaggcgtatcgaggcggttccccagggtgctttacgcatgcatattgaggcagaccggcaagatgttttacgcaggcatgttgaggcggaccggcaagatgctttacgcaggcgtattgatgtagttcctcaagaaacgttatacatgccttctgatgttctcaggggagattgttttcgacagcatagagagagggatgattctcatgattccttgcatagacctttcgaaatggttccacgtgatgctatgggcatgccttttgagtcgtttccacgtgatgcttacggaaggcctattgaaacaatgacacaagaaactcttcgtgggcaaagtgcagattatcttgcacatcgttattcgactttagacacacatcctcacagcttcactacgtctgcttcaatggctaacactgccaccatgaagccacctccatcagaagtggaagtagggaaccaagatgtggtttttaagatactttgttccactgagaatgctggcggagttatcgggactggaggtaaagttgtcaggatgcttcatagcgaaacaggtgccttcataaatgtgggaaatacacttgatgattgtgaagaacgtctgattgcagtaactgcatcagaggttggtgttttctatttcttcccattttcatggatgcttatgcagtactgttccatctatttactatccttggttgataattgttgcttgttcatcatgtagaaccctgaatgtcaaagctcgccagcccagaaagcgattatgcttattttttcaagattatttgagcttgccactaacaaaatcctagataatggcccaaggtcatctatcactgcacggcttgttgtcccaacaagtcagattggttgtgtgctgggaaaaggaggtgttattgtttcggaaatgcggaaaaccactggggctgcaattcaaattttgaaggttgagcagaacccaaaatgtatttcagagaatgatcaagttgtgcaggtacttagatcatttgttgaccttatggttatggtacatattccacgtgacaatctctcatctgatttgtgagcataatttggaattagcatgctaaatgttagtggtttgcttttcattaccgaatcctgtgttggtctctattcaccttgcacacttgtcaaaagttggtggtgttttagttattgctacattctgaaagaaattgaaagattcatgcaaacagagagttaaaaagatcatttactgtaaacttggttgagagattaactcggtcatattgtaagctccattgttccttaagttgtctggcataaactaattctttactggccaatagattacaggagagttccctaatgtgagagaagccattttccatattacaagcaggctgcgagacagtgttttctccaactcaatgaaaaattccttagccaagagcagctccgccttaactactgagagattctacgacagacaatcagacaatcctctgtctattgggtctcatcaatccgttagtaatccagctaccaactcctcaagtctgcacagaagatctgaggattcctttttaagtgggtctcattcatcagttaactattccagatcagttggcacagatccttacataagaccagaagacccatttcctgataggtttaatccctcagcaggctattctcataattttggtcggcggtttaccatggaccacagtgataactcccatcacttaactgaggccccatctcgtttgtgggcgtccccggtatgtctccatctctctgtattctcccatcctcccctttctgctgtacataagtacttgttgatactcccattcttcctctacacattcagattttgaacatttgtgcttctatctaacttctgtagctgatagacatagtttttatgtagcctccagcagctccaagaggcttatctgatgccagtggcggattatcttctgcaagggctggccatgtacttggcaggtaaaagcactacaattatagacagttatgtgagataattactctgatctttgtgtagtttacatgctcgcttggtcttttctagtggacacaaatctgccatcgttacaaacactaccgtggaaattagagttccagctaatgctatgagctttgtgtatggagagcagggttacaatctggaacaactgagacaggtaagccattttttgtttacaaatcttttattggttttccccatagcgtcatccaaaagaggttaggccatgattaattgctccacaagagcagccataggttttggtttccattggctgctcttatacgtaagtgaactctagggttactaaaaacggaagtgaactctagggttactaaaaagaaagcatgagaaaataaaattcatatacgtaaagtcttatacatggtgcaaacaatcgtgctaccattaatctaagtcaataggagtctaggactattctcaacgatgtataactttactcaaaaaaaactgttttaagtcacgaaaactccatcttcgttgaagtactcaacgtttgttccattattcagtgttacagtcgttgtttaaaaacagaattttcatctagccccatcagtctgaaataatcatctacagaccaaataattagtgtcataaagatgaagtagcaccccgttggttgacttaaacggcttaagcatagcttataccatttgatgcttgtttactcagatatcgggtgcaagggtcataatccatgaacctcctctaggaacaagtgacaggatcattgtcatatctggaacacctgatcaaacccaggctgcccaaaaccttcttcatgccttcatccttacaggtgaaacctcattgtccaaaaaatacaacctaaactagaaccacacacttataaccatacagaaaacaaaaaaaaggaaacgagctctcacatgtttcttgtcccttttatttaatctccctttttttttgttgatttggatcttttgaactcttgtacaatatctttttcgttttaagtactttgaaggaatcagtttgatgtcttgcctaaaattttcttcttttatcccacattattacgcatggaactgagatttgattgacagtatatagagggacagtcattgtcataaaatgttcggtactagatgtttacaaaaggaaaacttgataacaacgggtcaatatgttggctgctttggattgctaaaacctgcttgcacaatttctttgtagactgccttttttccagcttttgtcaccttctttagctatgaaaatcaaatggtagaaaatttataggaattttactctataagttccagaatcaaagttgtttgacaaaaaaaaaagaaaaaaaaaaaaaaaaaaagttccaaaatcaaagcctgaaaattgttaccgtcaacagagtttcactgatggttttgtaaaccccttcattttatagctttcacaatctcagaacatttgttctttctgtagcaaaactacactacaaactttatcagagattctatacacatttgatataccatactcgctatcagtaatcaaatcaatagtaatgcaaaattaagattcatgcgtaaaaatagtgcaaaagcgaaaaaaactatgaaatttgagtctatagaagagggtcttgcgaggttgaataatattcgtatatatttgtacattacgtttgttcgttatcatccaaagatgaagaagatcttccttggagttaacttcctcagaatcagatgtggagcttttgtactataaacatcaaacccccagccattcattccactttttttttacaaattacaagtatgtaaaagatatttttcttataattttttgttgactaattttttatatatataatttcgctagtgtaaaggtactttgaaatatgaatttcctcgatgtcgaaagttatgtttgatcgttgaatttgatgcgaaaaagacgaggaagaatgatttgagggataagtaacaaaagtcagatattttgggcttttctagaatcttatgtttgggcccaaattaaataacggatgatttaatggataagtaagtagcaaaagtcagattgtttgggcttatctagaatcttaggtttgggccaaaattaaaacaacggatgattgatggaggtcagatatttttgggtctttctagaatcttaggtttgggtcaaaaattaaataacggaatatttgctagttgtaaaattatcgacttacaaaccacttaaaaacagacacgtctacatatacgcgtggcttgacctcgactccagttttttatttttccttataaataaccgcctccacaaaacgtggtcgcttaatagctttttttgtattctctccatttgcttaatctcattttcgtttcaccgccgtctctctctatatcaaaatgggtcgccgtagctcaggaggtaaagtttctttctctttccgattatagatctatctgtccgattctattgactctggatgatgacgttaaacgttttgttttggtttgggttcgtttcgattatgcgtgtatcgcaccgatctagggtttaccttgttattgaccttatcggatattagataatcaaatattcttaaggtattaggcttggtttagtttccaattcgagacatggttgtcattgatttcattgttgatgtcaaaaaaaaaaattccttgtttttgtgatatatctctcattttgacttcatttgtgcaggaagatctgcccctcgccctcgtcctgctgctgcacgcagcccagctcctcaacctggtacaaatctttgtctccgaaattgtgtttttttgctcttagttatgacttattcaatccattccgctggattcaattatttataaatcattctttctgggttttgttttgcagtacaccgtgcacctcctccagctccagctcaggccagcggtggtggtggtggcatgttctcaggcattggttcaaccattgctcagggtaaatcagcctaattatttctgtttaattttgaagctattatttgtctctctatatacgaccccaattgttttgtctggaatcgtctttccttacctgtttgtttgtgtttttgggaaataggtatggcttttggtactggaagtgcagttgcacacagggctgttgattctgtgatgggtccacgaaccattcagcatgaggctgttgaggctgcttctgcatctgcagcccctgctggaagcgccatgctttctagcacctgtgacattcatgctaaggctttccaagatgtaagttttaaatctttttctcatgctttcacactctctctgtatttctgttataggatcagatttgtccggattcttaattgcatgatagaattcgttctgaaacatttgaattcatttttatctctgctgaacgtttacatagctcagtgatttagatgggtgttgttgactctagtgaagcgcgcacattgaaacttgtttccttacattgaataaaatgatgggataatcacattttcattgttgacgtcaagcaaatccattgttcttttttaaatgaatgcagtgcatcggcagctatggaagcgagattagcaaatgtcagttctacatggacatgttgtccgagtgcaggaagaactctggttccgtgattggtgcctagagtttccatttctcctatttgttttatcttaaagaattatccagctgtgatgatgctgagaatttggatatgatgatatgatcaaataacagtattatgtttccagaacctgaaactgcatggttgaagtcttattatgggtaatcgtttttaagacttgggttctatccctttttaaacaaataatgcaagtttttttgtaaagtcttttgggtatgttttgctttttgttagcttgggatgaaaaacgccaacatatcatccttttacaatgcttttatgtcgtcccgattttggatcacaagtctgatttgaattcctggctgccattccgaaacggcgtagtttaaattgagtcaacgtctttaattccctcatactcaccgtttccaaaatcctccagaaagagcgtaactgcattcatattgatgatcttgattctgagtccaacgctgttgtggttgtgtccagctccatgaccttctctatttattgaaagatgttccttctcaaaaccggttgtatgtattcaacgaaaactatatggatcggatccattggatccttatcaaaaccggttgttttggaaggtctatacaactatttttctgtgcttatgtaacaataatttgttcggtacgattttagatggatttttgtttgatttttttttgaaattcttaattagttactttgtgtatcatacattgttgaaacacaccaatggatcctttaagattatttaaccggacaaccatcaacaattactcctctagcggttggacatttagctagatcacaatgttcacctcttgttccccaccagtccaaactcttttcctccatccccaccgagaagtacaacaaaaccgccatgaaagctacaccggcatccatagcggctgagagaacgtagttatacctctgccaccaacttttcctgtaccggaacacaaacaagttgaatatcgtccccaccaatatccacgagttgtagttcaccgcggtcgcaggtggcatcattgcggttgctcctagaagaacagggagatttacaagtggaatccaagaacgttttgggaacgctttgtgcaatgaccacactatgactggtcctaatgcacctccgaggaaaaaccagttcatggccgcatagtttccctgagaaccaaaaatccgttttggtccgaccaatccccaaatgaccgatgcatcgaagaaaacacggtcacccggacatgtccatggactgttgggaggtagaagttcctcttgacatatgtttttgatagagtttaactgccaccatgcgaccgttatgttgattgttccggcaagaattgtaccgatgaattgaaccaagaacatggatctaggtgggatcttcatgtaatgaccaagtttgaagtcatttaagaaagagactgcttgtgccatactcatgtatccatagactttgaagcatacgtttgcgataggtcgtcccgggtaaatgagtcccattgcgtactctgttattatattcaatcccggtgtctgcaaaacaagtaaacaatgattagctcgttctttgcaatataaaccaaccatggattaatatatggtcaatattgcttacttggttagttgttgcggttatgatgcttatcgggagtgtgaagacgaaagccatcgcgcttgcgaacacaagtccccaccaaggcatttgaacctcatcgttcaagaaaacacataatgcaagagagataagtagtgtcgcagccaacattgagtaaaaccaccatgaaggtatgtctttatatctcttcattaacctagtgtgtatatcttccttgcctttgtatgaaactcgaaacctctcagaaatttccctgttaatacaaaaaagtaatgattcgattacatatatgatatatcactcatgcatataaaaataagaatatgttgctattttggtaggctacttataatacttacttgccatagaagagagctacatgagtgagcgtagaagcaatggtggcgaaaccaagcccataggtaagagcaaagaacatgctcaagttaatccttccttgttgctcatacttagctaaatcgagctcaaagttatcattcacgatcgcaggaatatcatatgtattaccaaccgatgtgaaaagatgcgacgaaaatataggaaacctcgtagcgttataagaatcaaatccccaataggctaaaggcaagacgaagtagatcaaaagaacataaccgatgaaaacattagcgatggcgaagaaggggctgataagtggactaaacaagaaagaggcaaccgcggtccagtctagtgtaaaggctccaagaccaagacctctcattccagaaccaatctgttgagcagtgactgatcttggaaatgcccaacaaacccatgagatgcttgtgagtgttgtgaagagatagccagggactatgtaccatccaaaactacagactaatgctatcacaaagaattttgctctcgtcatcctttggtcgtccttctcatgcaatgccctacatgaaattttaaattaataaaaaaaaatccaattatttattcatatgatttggagagatttcgaatcaattgtaattcgactacttacaaaatacacgtcattaattcgtcataagtataattatatatcaagttttgtgtcaacatctaattttttctaattatctccaattaattatatcttgaatagtaaatacgcatagacccaccatgtgcaaccacagattaaacaattataactcccgtgtattgttattataaattcaaaaactcaattgtcgacgaaaatcaacgaatcaaaaacttaattaagacgatcgataacgtatggaacatcttaatcatgattatgaaatgtggaaagtgttaaacaatttgtggaccacgagtgaatgagttaagttcatactcatgtagacgcaaattaaaaagcccgccatatctacagcttgactcacgtggattcattacattatctacgaaaacattttaaaattttttttggctcttcttgtaatagtgtaattttcctataaatatggagacgtatgtatatattatattttcgcgttgctatgtatgtataaatgaatggataagaacttaaaggtggtcatgatcgatcagaggatagcccacaagcgtggaccataatcatattttggctaaagttcattgttttatagggggtaatttattttatgtatattcagtatattgacctatagaggaatctcactctcttttttgttctgaaaaccatcataattcatacacgtacgtgatgtataaataagaaactggtgagatggttgaaatctaaaaaataaactggtgtgaaaattggaaaataataattgaggaaagtcaatgagagtgtgcacccgcaatggagtcaaaacttgaaaaactaaaatcttgctaaacgatagtataaagtaagagtatgtgagtatgtctttgactctttgggatgttttttgggaaaaaagatatggataagcatgaatttatacccgtgttattatttgacatgcaatgatagaaataaaatgtttttactttgggattaaggttataaacttaaaattaatcaaagtaatcccaaagttgctttctcccgcatgttatgtagctttaaatggtataagttagtacaatcccttattatccatgtgcttatcatatcccttctaattagaaaactcacctaaacagtgacacttgaaccagagtgctaggccaccacatatgagccggttcgaccacatatttcctcagtaaaccggcccagccatatcccaatacctacaattgtacatgtatacttcacatcaactatatatcaataacattcaaatatgaaataagtaacaaatggcatcgccgatgatatcacgcaaaccgacaaattttccttttaaaccaaaagtctaacctatatttttatttgttctgtaaagaaatcatgctgtttgaaatatacaacatgataaagaaattatctttcctcaattgagaagaaaagttacatgtcactcaaaattccaatttacagagaattttgtttcatataattattaaccgattacattgaattaacgaagcagagtatcattaacattaagacgtaaatttcttgaaatatcttaatctttcaacgcgttttttccgaatcttcaattatttggtgactattaccaaaagtgatatatttattatacttatatataacaacaaagctgagaaaatgattaaagttacgagtacctgtgtagtgatgatgaggagccagccggcaataaaagagatactccggccataaaaagctttaataattgtgatgataccaaccgcataagccgacccggatccgaaagcactacccgcattcgcaaatatcgatatcaaaacatgctctttcatgttaaacggacccgggttcagcgagaaccgggccgatccacaaccgggtaacccaaaccgggttttgggaagcaccttggccaagaaatgaccgataggtagtgtagccacctgaaccgtgatttgagtgattacgagcggttcggttcggtacgagaagaattggttaaggaaagagaggagagaacatgagattagacccaagaaccacatcctgaatgtccaaaccggtagtgttggatcgtcggtgtttgttaccgttaaacggacttcttcaatcggtgatgtatcttcgtcggagaattcgtcggcggtggccattccggtttagtttgtgtgtgagtgtgaaaaagagagagagagagagagacagagtataagactaggaatctttatgtgagactgacaagaaccatatctctatttttatactaatcaagatttgttttcatttttaataaagagaaattgtttttagattattttgatataattgttgattggaatctaatgagtcaactatatgaagatatgatgtttgaaccaatgaaactttgttattattttgctattagtagtgactagtggccaaaatgaagatagaattacaaaattatgcatgatgcttgcttatgacgtgaaaataaaataatgtttttagtttagaaattagatgcttgtaataaaatacgaaagtttaaagagttgaaggaacctttttgacgttgatagtctccgtttttgcatcttagaatacggcatagacaatgaattttccaagctttcacattgtatttaatttgtgtatcaccaacgctacatgcttttaagtttaattgacttcttgtggaaaactttacaaaaggagaagaaatatcaactaaattgttttctttgtcttcctagtatatatgacatagcaatccttatctatatatatgatgcagtctagttgttccgaataacctcctcattcatggaagactaacattcaaaaactcgtcaaaataatatgttaattttggttagtgttaaatatgtcaaacctaaattcttgaataacaaaatgaatcgtttttttctcggttactaaatcagttattatgagttttgtaatacagtcaaaagtactcattctttgggataacacaaagcattcaaaacatatgggtttataaactcttgtcgttggatttgggcttagagctctgtgttcttattgttaccacttatttccttctccttgaaaatttgtctttgtgggctttaccgcttcaggattctaattgaagttgggcttcatgacatttttcgttctacatatcggtgagaacaaaaaacaatatcaacaaaaaatgtttatatattatttaataaaacatgattcattattttattttatatttgataaagatttcattaatattagtgagagaatgattgcactaaaaaatatggagaaaaatgagaggatgattttctttgcaaataattattaaaaaccattactaaaaattaaaatatgatgctgtttaattacgaattatgaaattaaacgttttgagttcctgcaaattgatatattgtaattgatgagaaaaatatcatttgtcggcgagttgtataaataatattatttttttaattataaaccctaaactaaaacccttttagttagaggggacagaggaaagcttcactagtcgattagggtttctttcttctcgccccaattcccaaattcaaaatcgaagcttttttaatgggtagtaagaagagaagcaacgacgactcgacggagttggtggagaacgacaacctccccgattcttcaattgtgaagaagaagaaatctaaaactgagaagatgaataccgttgctaattatgattctgatacggcggcggcggcggcggaagttcctggtgttgcgagctccggtaaggatatggagaagaagaagatgagaaaagcttctgataaacagaggagactagaagctgctctgaagaaaaacaatggtgtaggagcttcgcggcctaagcctatacctgtggctgtaaattcaaactccgatgaagccgacgacgagtctcttccctccgcagccgcttcttcttcctcgttgcctctgaactattttacagatttggcttcttctgatgcttccgttagagaagcagctgctgagtcgttggtattgaggttgcaagagattcagaagcaatacgaaatgttacctgataaagaatctgttgatggtggtttgatgcttgaagctgagaaaaacgatggtttggataactgtgctcctcatctgagatatgctctacgcaggcttattcgtggagtctcttcttcaagagaggtatctattcttcagtttcacttcgtatatcgaaatgttcatgctttgtctagcaattactaattctttggttttgtttatgtttatgtttcgttaacagtgcgcaagacaaggatttgctttggggttgacattacctgttagcgttatttctagcattaatgtggaatctttgctgaatctcattgctgattctttgtctgtatcttcatccatgacgggacaagtaagtagcagtttttatatgcttcgttcttcatgtgattctgttatagagactcatatgctttgaattgaaattgacacaggatataaaggaatgcttattgggtcgattgtttgcttatggtgcgcttgcacgttctggaagactgattgaagattggcaatctgataaagactctccgataatcaaagaatttaccaatgctcttattggtcttgctgcaaaaaagcgttacttgcaggaaccagctgtgcatattcttctagactttgttgacaaggtataatagattcattcttatgtgcaaagtttagtgcgggtttattacacattgtgaagtttttttgtgatcctatcttttttattgtgcagttgcctactgaacctgttgttactcatgttatggaagctccagaactttataaatggtttgaacaagccaccgaggtgggaaacccagatgctttgctcttagcgctgaaactccatgaaaaggtttcagtcgatcatcctatatttagcaagctactgccagttcctttcagttccgggaagtttttttctgctgatcatctcactgccattggtaattgcttgaaggtacagcgcaaacccatctttttgctatgtagaatggttgaacatgttaagatcttgtctgcagattgttatgagtttgtaacttattaatatcaaaacatcttttttccactattaaaagatattttttgtgaacttctacaggaatctactttctgccagcctcgtgttcatagcttatggcctgttatagtcgatatgctgttaccggaagcagttgttcaaagcgaagatgtcgtatctgtttcaagttcctcgaaaaagcaaaaacgtaaccggaagtctaatccagttgaagaagaagccacaaataacatcagaaatttctgcgaagtttttatggaaggagacctactttcttcaactcatgttcgcaagcatttggcatttgatatcctgcttcttcttcttccaaagcttcctgcaagttttatccaacatgtattgtcgctcaaatttgttcagtgcctcatggatatactctccacaaaggactcttggttgcataaagttgccacccattttcttgtcgagttaatggattgggtgaaagatgacgataccaagagggtggccgttacaatggctctccagaaacacagcgaaggaaaatttgataatattacgcggacaaaaactgttaaagttctagctgcagagcttgaaactgaagatggttgcacactttatctccagaacttgatgaatttgtttgtggatgaacagcatgttcctgaagaatcttcaaatatgaaatggtccctagaaccttgctctttgaattcagatcagagtcaaacaacggatgataattctgacaatggttcaaatgaggagaaggattcagttggaacaaccggaaactcggatgttctgaaaagctgggtcattgaatctctccctggcatcttaaaacatgctaaattgtcccctgaggcgaaactgcgacttcagaagcagatc

SEQ ID NO: 959 - DNA, 22022 bp, Arabidopsis thaliana
ctgaaatttctcgctgtacaaggtctctttctggcttctctgggcactgaagttacatcatttgagttgcaggagaaatttaagtggccaaagacagctactcctgctgctctttgccaaatgtgcatcgaacagcttcagctgttgctgtcaaattctcagaagattgagaaaccactatctaaaggaaatgccctggaacagcccgatgatcctgtttcatactttatgaaattccttagcacgttgcagaatattccctcagtttccctcttccgttccttgaatgaagcagatgaaaaggctttcaaagaattacaagaaacagaaagtaaacttttaaaggaggtaagtttcttactcgttttgctttaatgttactgtaagttgaaatcttaccaaaataatgtctatgtgcttgtgtgtttaagttgtacatctttattatgtggcaggaaagaaattgtggactatctactgatccaaataaatttcatgcattgaggcacttagttgttcagctgttgcttcaaatactcctccatccgggagaattctcagaagctgctactgaactttcagtatgctgtgacaaagctttcagttctcttgatcttctgaaaagtgatgggcaaggtgaggcagacgatgaagaagaaccagcagtcatggatgtcctcgtggacacattactttctctcttgccgcattcttcagctccaatgcggtcttctattgagcaggtaataagctcaccactagcaaacaaattcatttcttttactattcttgaagttactgatccttggctgctaaaatgagattcaatttaatcctttggttcaattgtttccaattggctcaagctcaaagtttaatagagttccacaatattatgtaacttgtaggtttttaagtacttttgtcaagatgtcaccaacgatggactgctgagaatgttgcgggtgatcaagaaagatctaaaaccgtctagacatcaggaggaccaagactctgacgatcttgatgatgatgaagaagattgtcttgctattgaagatgcagaagaagaaaacgaggagatgggtgaaactggtgagagcgatgagcagactgatgattccgaagcagtaaccggcgttgtccctatggcagttgacagagaagttcctgaaaattccgatgattctgatgatgatgatggaatggatgatgatgcaatgttccgcatggacacttaccttgcccagatattcaaggagaagaggaatcaagctggcggcgaaactgctcagtcccagcttgttttgtttaaactccgtgtcctctcccttcttgaaatctacctccatgaaaattcaggtaagtgcatcataaaacaatgatttggtatgatgaaatgcacgataatagtcactactaagttctgtactttgtggtttggtgatcttttaacagataagccacaagttatgacagtgtacttaaacttagttcaggcaatgctgaacccaagcactgcagaaagtagtctgccgcttttacaacgtatatggggcatcattcagaagaagatcttcaaggctaaagagtttcccaaggatgaatcaatggaattttctgcacttgcttctttgttggagaagaatcttaaactggctgcgaaaccattcaagagtaagaagtcaggagttgacccttccaagaagaagcagtcagctgcgtggaaccgatacaagatgatcacccaccttggccagaactcaacttactgggttatgaagataattgactcgagaaaattctcagaaactgaattggagaagatcttggatgtgtttcggagtgctgttaccgggtactttgatagcaggaagtctcagttgaagatagattttcttgaggaagtgtttagaaggagaccatggattggacaccaactgtttggtttccttctggaggcaagtgtgaatgcaaatgttgagttccgtagactggaagctcttgatttgatcactgaaactctgagatcgttgattcctataaacgaaaacacccaagcagattcgagaaaaacaatgacgacccatctgaaggaactgattcttttgattaaagaactagttggaaacatgcctgaggctaaagtaaggcgagctcaggtgcgtaaattctgtggcaggatctttcagatggtctcttcgttgaaactcaccaaatctttcctcaaggggttgggacaagatggtcgaacagcatgtgaagatgcattcggtgatctcttcttgaatctgaagaatacagagcattaacgcagactactccaaagtatcaccatacgttgatcttggtgaaaccctcgtcttttttttttgtttttcttgtgttatctttctatgaagaaaaactcgcaggatctgaatcacaagtttgaataggatttctcctattcattgattccaaaagatactacattctcacttatgtcccaaagagatgatttgttatgataattcatcaattttgttttcaagttgttatgttggttatatttacaggttgagaatatgtttaaaactatggatttcatatgattttctttatcagatatattgtttttttttgtcagacattctttgttataaatacatactcattttggagattgatgaaaactttgtctgaagggggcaaaaatctacagaagcatatatatttcttgaacatatatatgttcatttgggtttctggtgtgtctttgattgttcattgcgatgatatagttacggttttgggataaaatcaaattcgggaattcatgcgttgacagagtacaaaatgatccaaaaattgataaagtgagacttacctgagacatagactagtgtaaaagagacacctgttttagatatcataatttaataggggggttttctgtttcgattgatgcattgtattccgtgatgatgttgatggtgattcatatacatacttaaagtgtcgtttattgattcgggaaggatgcaacaaataagtttatgacatggccgataagtgagtgactaaagctatatgacttttctttgtaaggattcttaaaagttcaaaactcgtagtctaataatatcctttcccataacacctgtccctgagtttgatagatagttttctttggaccagtttatattttaaaatcatatattgtagaaaattcggtttaaatgtagctaagatgacgcagagaacttctagtagaccatttaactaaaagtctggtcacatacgagagagtgtatatttatctctttacaaagaagccaattattgattttgaaatgttctatcttccacaacaaaatgattttcatgtggaacaacccatatatattatggccgaaggacaactacaccacttggatagaaaaaaggagttcagcttattatggcgaaaagaaaaataaaggtaaaatggcttaaaaggttctcagataaatgcaatcaaatgcacaatagactggatttaagcaacgcgatggaagttgcagaatcaagaacatcatcataagataaaataaacaagtagataaagggaaaaagaaaaaaacattatttatcagacaccaaagtgatcttaattacactatatatatatatatatataaaagatgatgaaatttgttgtaatagattaacaataatctgattcaaccatatgaaatacctcatcaatcaaacagccgaatctgaactctgagatgaaactttaggtgccatgttcatagcaacaagcttcccgtccggtccagttctcaattcactcataccagttacaggtaagccaactccatggtactgcggcggtggagcctccgtgtaataaacttgtttccccattcctccagtgtaagtcacctgagtatacgctgatgtatctggtaatcctactacttgtcgtggcggtggtactgcggtgtattgcggtggtggaggaccagaggtaaaaggctgaggaggaggaggttgttgttgttgtgctgcttttgttcctataggtgcctgaagtggctgagccacgttgtacggtgattggtgtggttctctgtaagtatctgaagccactctctgtacctgaggatagtagccgccttggtttacttgtcctgtaagtattggtctgatgacaccttgcggttgcggtggtggtggcgcgtggtacaccggagatggagatggagatgggatcatgtaaactggttgctctggtaatcctaatccatgtgtggttgttggaaatacgactcctggattgtggtttccttgccagaaagtcgtcatcggaggagcttgcggattcgtttgaggaatcgtctgctgtggcggtggtggcgcaggattttgtatgtacggtggagagaagtatccacctccggtttctattaaaccgtcttcgttactcttccttctgtatacagcttcctgttgttgttgttgttcttgatccctaatatgcatcctctgaaattcctgcatttgtctttgaatttccatcggatttacgacgtgatccggttgaatcacacgcggatcgttaaacaaaggcggttctaacgccacaggaaccggtaatttcacctcagccggtggtggcggcggcggagctgcaactttctccgatccaaacaaaaaatccgcattattcggaggagcagttacggatttctccgattcagatagcctaggaacagtgttcaacgcctcgacgaagcgatctcgatccgattgagtcgaactttgagaaccaaatccagaagaagccgggaagagaaacaaacgcatcctcgctggcttagacgacaaacgaagcaagcgatcgtactcgtgcatcatatgctccagatcatcatcgttcgtaaccgagatcaaagcgtctaagtcttctcccggaagctgatacttaaacgtaacttctcctccgccgccatcaccgccgccgcatacggtggagagtttggaagctaaaacagggaatctaatcccgcgatcaacggaaagaatcttcgtttctccgtttacgtaagtgagctgattatcgtgaggccgtggctgaatcttgccgccatagctgcacataaacttcaccttgtagctatgttgctgctggttctggttctgatcatcccatggaggcggcgggttatcgaattcgatctcacgagatctcggtgacgagtcggttgaatctggataagagttgtacgagaatttctccatctctccgcgaaaattaaatgattttttttgttggtttggcttaattcatgaagagaagaaattagaaagaaatgaagaagactgttgtgatgaaatggtttttattatgtatcggtgatggtggtgttggaaaatgagtacgtgaacttattgctcatttacacgtggcctgtcagattttatgagttttaaggcggtgatgagattatgtgacggttctgtgacgttagctgaatctctccatggattaatatgacttttggggacactgtgaatgggcccaacactagtgttttgatacttcgacgttgaaagaggccagcttttagccttttacatgttttttcttaatattttgttaaatcaacattagtgaagcaatatttttaaggttaagtgataaataaatagttaagaaaaagggaaaaacaaaagtcgttgtcgtcgatctttcgcctgatcaggcttagatatgttttatgattgtgttattggatttcttttgtgtataacaaatatttgaatgtttgaatcatcatcattcatcaactgtattacacatccgaatagtctttgggttagttctagaagatagatgttttttagtctgtcaacatgcagaagaaaactgtaaaagggtcaacaaaaaaaaattgttatgttaaattaacatcaagaatataagataatttaaatttgacaccggtgagtgtatactcactttctcgattgtttgctattattatataccttagattattgccaacttgcaccttattataaacggtgaaattgttgtaattattcaaacttataatagacgtatttcactagcatgccgaaggtgcaatcatggtcgtacaagaacaatatttatattgtcaaattcacgtaacaatttttgttgttttccttgtttgtcgaagacatgtgcattgattagtatttcttccaatattattttgtgttagaacttagaaatgttcattattttctcatcctcttaaataatccatatatatatggactaatcggcccgccgtcccggtacgatgttgctcgatcagtcataaatcaagtcgtgtctcgtggttgtttgtacttggcagagcaagtcaatcaaccgaattttggtaaagatgcatcttagccaaaacttttgatttcactagatatactagaatttagcattatacgaatgtcgaccatactttttgattacttaagagcctcttatatagttagtcctattattgatagttttcttgtagtaatatttgaatattataacgaatcaaatttttcgaatctaataagcacaaaagaaaaatggaatcgaatattattttaaatgaaactatgtactaacataaatccaattatgttcaaatgaaaccaaatcaaataaatgaagtattcctagctttgaattagtaagtatcatatgaaatggctccatatggaaaccaaaaaatccaactgaatgcaaatgaaagtgttttcactacttcatcgtaaatataaagaaattgttaggtgtgataatgaaaaacattagttaacgggccaaaattatatatttacataataaaggggtagtttcataaatttgagaacatggttggaacatttcaacaaatgagacgagttcaatgtacacttgaattatgtacaaatcagtacaagaagcttaagatttgaagctaacatataacattcaagttcccaacaacttcaccgctcatctccgcacggctttcttcatttagtaatccttcgccggatcggatcatcgtttctcagattcctctttttaagtttcttctttcaggttcgcaatccgaatcttccacaaccattgttcgtttcgcctgtgattctggtttctgaaatttctgccttggcgtggtttccttgaatctgattacttggattctccgattctcatagttcttaccagtttttgttttttatttcacttaatttgttctgattctggataacagattcttatgataaggtgaaagatactagagattcatcggttttgttttgttttggcaattttctcaagtgtttgacttatagaacagtgacgtgtgtgatctatgatatcaattccaaacttaatgatgttttgtttgtagatgggtaagtatcaggtcatgaaacgtgcaagtgaggttgatctttctactgtcaaatataaagctgaaaccatgaaaggtctggttggttttacaaatgcacattaattctgtgggttttctgcatagacatgagaatgtgccttttacatggttttctgtaatttgcagctcctcatttgactggcctttccttcaagttgttcgttaatttgcttgaagcaccacttataggctctttgattgttgattatttgaagaaagacaatggcatgacaaaggtctagtttgttcaaacttgacttatatcttcctcagggttgttgatgatcaatgttcttacatgtatgtgcttttccgtgttgtcactggcagatttttcgcaacacagttataccagaagagcccatgtttagaccggagttcccatctcaaggtatattcttcttctctgtcatctattctcctacaatcatatgttgtatacttacatgaaatattgtgtaagattacttcaatgagtaatcaatatatacacctcaaaaggatgattgtgttgtgtgtatgattttctactagaaccggagcatgatgttgtcattgttggcgaagatgaaagtcctatagacagattggaaacagccttgaaatgtcttcctcagtatgatccttctcgtagcttgcatgcagatccagtgtcatctttctggtactggaagattcgtgattatgcatatgcctatagatctaagctgacaactccattgcaggtttttcatctgaattttttagttttattactctctttttttggcactaacagagagccttgttgcttattgctaggtagcaaaaagaataatctcaatcatagaggagtttggctatgacaagcctccaacaccatttttgattagatttgatgccaatgaagtcataaagcaagctgaagcttctacacggaggtttgaacaaggtaaaatttatgcatactccaagatacattttgtagtccagatattatcacagcagcatcgttattgtatctgcttaaagtgtcagcttcagtgaggtgttagacatgattgttgagatctgtgttgatcatgttgggtgtgagctgtgtaggaaatccaatatctgttttggatggaatatttgtgacaatcaaggacgatattgattgtttaccccatccgacaaatggtgagtctgttattcttatatgttactaagaatacttccagatacaacagaactgtcatagagtttttcattaaaggtggaacaacatggctgcatgaggatcgttctgtggagaaggattcagctgttgtttcaaaactgcgttcttgtggtgcaatcttacttggcaaggcaaatatgcatgagttaggcatggggaccaccgggaacaattcaaattacgggtaagctacacagcagaggacacacaaatcttgcggatagacataaaactgttttgttacttcagtatgtttcttgcacctttagttcactctagtttttcatgtgtatgctcctctggtatggtgcattgcagaaccacaagaaacccgcatgatcctaaaaggtacacgggcggatcttcctcaggttcagcagctattgtagccgctggactatgttcagctgctctaggaacagatggtggaggtatcaaagttatatttattcgtttgatctgaccaatgatgtgcatacctactaggtttaatgattctgaaaatgcaggttccgttcgcattccttcagcactttgtggtataacgggactgaagacaacatatggtcggacagatatgacagggtaagagaatcaggattcctattagaaacccattaggcctttttcccccttccttgtgtcttaacaggtttctacttttgctttccttggtccatggccagcattatttgcatatgatttcttatgtgaccattgtcatctctgcaggtcattatgtgaaggtggaacagtggaaataattggtccacttgcttcatctctggaagatgccttcttggtgtaagttttaatcttttttgagacgagaattattctttgtaaatctgttcgaagcaaaaccataaattatctaattcagatgtttggtcttctgagaaacctggatgttaaaactaatctgcctttttgtgtttactttcaggtatgctgcaatcttgggttcttcatctgctgatagatataatttgaaaccggtaaactttctcagtcatagtatatttactataaaatcttaatgaagaagtgtctcagtttatactcacttctgttcccaagaatatatgatatctcttttacttgctgaaccacaaagatttcagaaatataattcaaaataaaaatttcaaatatttctggatgcaatgatgatgatgtgtgataatggcatataatcttgcaatatgttcccatatgatttggtctttgcaattcttctgtagagcccaccgtgttttccaaagttattgtctcacaacggaagcaatgcaataggatctctacgactagggaaatatacaaaggtgaatattctatccttgctagttaatctgagttgggatttgttatatcagtggcatatttagtgccttgtttttatccatgcagtggtttaatgatgtcagttcaagtgacatctctgacaaatgcgaagacatccttaagctcctatcaaacaatcacggttgcaaagtaatctgaacatttcagtacttctctctcaatctacggatacaatgtttcagctacaatctctctctattgttttcatttcaggtggtggagatagtggttcctgaactggaagagatgcgtgcagcccatgttatttcgattgggtctccaacactgtcttctcttactccctactgtgaagctgggtatgtctctagctctatcatctatgaaccaaattagaactttggtttaagaactcccacatttgtcttgtatttcaggaaaaattcaaaactaagttatgacactcgtaccagctttgcaattttccgttcattctctgcttcagactatatcgctgctcaatgtcttaggtaagcggcaatagaataatgcactgtatgcgcagctttcacttttgcttctaaagtcacaagagtaaaccaatattgatagaatttttgttgcaggcgaagattgatggagtatcacttgaatatcttcaaagacgttgatgtcattgtgacccctacaactgggtacgtaatataatttcataccttatcaaaccatctagcaaattgaagatccctatattacttgcaatgtcttcggatatagttacttgtatattacttactgcttaaactcctctcactttacaaacagaatgacagctccagtgatacctcctgatgctctcaaaaatggagaaaccaatattcaagtgacaagtttgtcaagcaaaactctaacttcttacttttggtgcaatctaatacatagcacatttacatcagagttctgatattcaaattgcttcttttctagctgatttaatgcgcttcgttctagctgcaaatctcctcggcttccctgccatatcagtcccggtaagacattttttttatcagtctctaaccaaggcttagacaatcatgttacttatttcattcttgcaatataatcgtatcttctttctgattaatcactctctttttctaacttattggcaaacaaaaatcaacgcaggttggttatgataaagaggggcttcctataggattacaaataatgggaagaccttgggccgaagctaccgtccttggtttagctgccgcagtcgaggtactctctctttttctctctctgatacgttttcaaaagatcaagtagaaactagtgcggtaagaggcggtaaatagtaagagcggactctgtaacttgaatcgattttggtatttcaggaactggctccagttaccaagaaacctgcaatcttttatgatattctcaatacaaactgaattcataaggatcttccacagaactgaaaaggcaaggattgtctctggctgcggaatattatttatgtttacattatataaggttaatatgtcaattgatctacaaatcgacgattattgtgctataaaccgtgttggaatttcttacgtcgactatgattaattttaaaagatgtgaattagtcttgagcatacttgtaaacttttaaaatgcattttgaaaaaaagtttagaaacctgaatgctaagtaaatctacataacaatgcaaaaacgagttgaatttgtggaatcactaatgacaaatgctagatccaaaatccggttagtttcacatcgtcttgcaaatttatttatccaaatttctattatttaaaaagctttaaaacattgttttaaattccatagaaaaaaataaaaatcttatataaaatcattagaagcttgaatgttaaatctacataacgatgcgaaaacaagttgaatttgtggaatcgctaacgacaaatgctggatccaaaatccggttagtttcacatcgtcttgtaaatttattatccaaatttctattatttaaaaaacttttaaaaaattgttttattgaaaaaccttcaaagttttaatagtaatataaaaatataagtttaaaaatattatttaataaatgaaaaataagtgttaaaaatctaaattaagtgtaaaccatattgaatctagagtacctcttaggggtttggatgatgtatccaattagtttacacaaaacagaaaaatttaacaattaataaaaaaccttaaaattttaactataatataaaatatacatttaaaaacattttttaataagaaacaagtcgaaaactaaaattttattatagaaaagtttaaaaatctgtaagaagttttactaaaatccgtaaactttaaaactttagcgaataagaagttttagttttatcattaaaagaaaattaaagagaagggatgaaattgaccttggttttatgggccgaaattgtttcttgtttgggctttgcacaaagatctctagttttgacaaccgtcaacggctaactaatcccgatctatccaccttctcaagcttgcttctctttgatcatctccgtcgacgatgtagcccccaccgcgtcagaattctccgtagaagagagatcgcacacacatacatatgatctcgcttctagttattgtaaacaaagggctcatcttccatcacgctctcgtttcttgttggcgaaaagcaacggcaacaaatcaaaagatataaaatagaagaagtaaaggaagcaggaatcgaagaagatcatgctataaaatcagactttgtatttgcaattctcgctctataactctgtctttctctgatttgtgaattgtgatgatgagactatattttgtagacccatcttctgtgtaatttcctttctttcaactcaagtttccttttctcttgttactcttctgttgtttccttttttaccctttcgtttggaaaattccggagtaaaaggttcggtgaataaggacgaatgggcctaattaatatctgcaaggcccagcccaataagatatactatctaagaacagatttaaacccctaataaataaagttttcacgcgtgatctgtacgtctttaatttacttgtcctaacgcgtgatcggaaaccatggctgccgacgaaggcaaatcttcccgccgaaacagttctaacgtggatactccttatttgtccgaaatatacgccagtaagatctctcgctatatctctcgaagttgtttagtttcgtcagattgataactaatatttgatcatagtcaatcttttttttaatggattgaatattttgattgcagagggtaacacaggtgtgttttgggacgtgatcctgatttgatctctaagaaaataaaatcagctcttgatgataagggttgttataatggtcctgtctcaatccggttgtacgacgatgagaaaaacatcatccccaaagaattgatagataaatatgacgctgcaggaatcagtatcactttcgtacccgaaggtgagtgaacaattcatttgacctaatccatctcttatcttatactaaatatatgtatatgtaatctaatctagtcctctgttgatatatatatagttgcagaggcttatggatatgcgagagctcataagatggtggtggacattcttttgtgggcagtggacagtcctatagaatccaatttgattgtactctcaaagaacttcaaagaagagttgactgtctgtgttattcaaggcttgcatgggagaggttacaatgttctcttagcagagcctttagaacatataccttttactgaaagctcagaatggctttgggatagcctttgtcgaagcctatcatcagatggaggcggaagctcacaacatgttgacaataaggctgatactgttgctcttgccgattctctgaggaagcaaactctgtagaggagactaatgtacttatgatgctttatgttatattgtgattctctttgatttgtacgttttaatgtgatcctgagattcacttttcagcaactagcaacgtatctttaactcagtaagtcaatagtaagatctttaactcgatagtcaatagtaatactaataagagagttgcatacagcaaagaaggtgtttgtgtatagataaatagaaaagttgaagacaatgcagtgtccatcataaagaatcactcaactttgatgttgttatcatctacaacagcatcacttggaagatcaatcccctttggaatctttcctggataatcagtcaccgaactgtccgatcccaacatactgtgaatacatgaatgaaaagcattagactatacatggttactacatcgtcaaagctcatggaaagaaaaatgaaatgaagaaacttcataccttctatcgacgatgaccattgaacgtagctcacaattagcaaagctgcaaatcaaatgaaaattatgaacctaatagattaaaaattcataactaagagtgtggaagcttactggccgcaaatttccttcttaacatctggatgacactcgttttgtagtgcattcaatgtgtgaaacaagaaaccactgtgtgtcacaatagctatctctttttctttccgtgtccatagcctacaaatccaaaaccagccatcatacaaagttctgttccatcaacattttcgataaatcaacaagactaatggagattacttaatttctacatggaacattaaaagggtcttcttcaatcagaggttgatcctatttgatgccaacttctacttatcaagctaagaatatcgaggaagctaagaggatgtttctctaagtttcaagttctgcacaatctattaaaaagaactaatttctagagtttagatataaaagagaaaataccagttcaggaacttttttcctctagctgcaagttcttcaatcgtttctctaacatcagccttccataacttgtcttcctcgctttctatctgaacgcaaatttaaatgtgaggagtcctttgaagcacatataagttgtttggcgtagctgtatgctgttaatagtcaactgggcaaccagaagattataagtaataatcaatgccaggcacatctaagactctcaatattacttgccagtgaaaagtcaactgcagggaaaagaaactgatagtcgctgatacttctcctctgatcacatggatgcactccctgtgtccacaaaaatggaatacaaaagtgaaaacttgtcgcagctaagcataattatttcgtgactagatctaagcttttgaataggacagcattgcgagtaggagtgaaaaatactgcaaaacttgtgtttgtttcatggtcactttaagttttgtgataattgtgaagatagataaacgcaattctgtccagttttagtttgtctctaggctatatgtattacactgaaaaggcataccaaatgctctctgcaggactcctctgtaataactggtgggcagtttaaactcgatatagctgcacggctgctatttcctgcatttgctaccattagaggtagtacatcactcatatccgtgtagccctctccaccaaaaacaccaacagcagtttgcaaggttctacgagcaaagcaaatccacaaaaatcaacactgtcaaaggtttatcaaagtggagtgcatgcatcaatgtgatcggtctcacacaatctattacactggtaacctataatctgtcacacaatataagaagttaaatattacactggtaaccaataaatctatcagttttcctaaccaagaagaccaattagactaagaaccagttatactaagatttcaatcacagatgtctagagtacctcatcagtggagacgaaatgaccagttcgatcttcttgtgaagtccactggaatgaacatgcttacgcaaactatctacctgtcaccaagagaatctatattaattttttttggataaagagatgcaagtgaagttatttttctctatagacctgtttccagccaagctgggtcaactcagcatcaaagtagtcatgagacatgtaagccttataattcttctccccatccacattgtgaatcccctgagcatgtctcacctgaacaaaaagtagtcaatatcagccccaaattctgatacgcaaacattagagcatttttgaaaccttcaaaagatatagatttcagctcaaagagatattataacaccactcactaggtaaatggttttgcagcgatgcaaagggtacaaacctataccagcaccagtctccatttctgcaaacactgatttaaaaaaaccatcaactaggatatgataaatagatgcaaaaaaaattgatagcagctaaaaaaactcacaagcaaattgcacactgtaacaaaaactaaagtttcgttttttaagacaaaatccgaatcggagacatataaatcaggacaccaagatcgaattaaaaagaagggaaatacatacaccaatcgaattcagaagaatcgctcaaaatcaaaagccaatggtttcactattacacaaaaaacaaaatgtagagattaaaatgatactttcactgtttcacagagctaatcattcacgtagatgaatacaataaaaacgtaaatataatatatatacacattggtttaaccttacacaggagattcgaagaagtaacccaaaggaggaagaggaaagaagatgtgaatgaagtaggcgaagaagcagaaagtgattagattagttggatgattaggctttgtttttctttttaattacttttataaattaattatccatgcagtggaccaatgaaaacgatttttttaaaaagctttctacaaaaataataaaatggtgagagccgtcaataatactaaccacgtatacgaaccatttgggtccgctcgtacgaaccaagccaaaaccataactctaaagaaaccaaaattgtgttttacattttgaaccatccaatattattatccttatctttatccattttattttctttttcagtttaagtatatcagactctgaggtttgcagtagataaccaaatgaattatcttctaaatcaaaatcgatttaaaccgaatactatagaatttaaaccgtataaaattaaaccgaaccggaataaattaccggctcaaccgcgagattatagtgtcattctctccagtttcagacgaatcgatggagttgggatccagacgaatctacacgacgatgccgtcgaagctccgatcttcttcttcacttcttccacgtattctgctcctttctctcttattactccttttctattccttaattctccgccgtccgattacttcaaacattgcctctcctccgccgtgcgatctcttctccggcagatgggttttcaatccagaaactccgaaaccgttgtacgacgagacttgtcctttccacagaaacgcttggaattgcttacggaacaagcgagataatatggatgttatcaattcatggagatgggagcccaatggatgtggattgagtcgaattgacccgacccggtttctagggatgatgaggaacaagaatgttgggtttgttggggattctctgaatgagaatttcttggtttcgttcttgtgtatacttagagtggctgatccaagtgctattaagtggaagaagaaaaaagcttggcgtggagcttacttccctaagttcaatgtcactgttgcttatcacagagctgttcttctcgctaaatatcagtaagattgcttacttccatagtttaaaatcttgtaattagctcttcaaggatcaaacttttgatgaatcttaggattttgggttataggcttgttaggtggttttagaatcgtataaggaacatcaactcctttctccagtttatgttaagagttgaaactgaaagaataatgtttttgtgtatatgttgagttttttccagccttgttttttctaaactgacatgttaaaaggtggcaggcgagatcttctgctgaagctaatcaagacggagtgaaaggaacttatcgagttgatgttgatgttcctgcaaatgagtggatcaacgtcactagcttctatgatgttctcatatttaactctggccattggtaataattatatccttggattttcttttttttttctttatgcttacaactttgtgaagaaattattcatgagtatttgggtctggtttttgggtttaggtggggttacgataagtttcctaaagagacacctcttgtcttctaccgaaagggaaagccgataaatcctcctcttgatatattaccaggatttgaactagttcttcaaaatatggtttcttatatccaaagagaagtccctgcgaagacccttaagttctggcgtttgcaatcaccaaggcatttctatggtggtgattggaaccagaatggaagttgtttgctcgataagccactcgaagaaaaccaggtatggtaacgagctttactaagcaagtctggtctttctctaggctttcctcagagatgggtggcaaagatattcgctttcgatttaatcctattgcattctgataaatgatgttgatgctaagacctagacagcttgacttgtggtttgatcccaggaacaatggagtgaacaaagaagcaagaaagattaaccaaatcatcaagaatgagttgcaaacgacaaagatcaagttacttgatctgacccatctaagcgaattcagagcagatgcccacccagcgatctggttagggaagcaggacgcggtggcaatatggggacaagactgtatgcattggtgcctacccggtgttcctgacacatgggtcgatatattagcggaactcattctcactaacttaaaaacagagtgaagacgctatcaggagtcgagaacagagacttgcttgagcatatggaagctcaaatgtcggaaaggttccatcttttggttttaactgtaaatgattcatatctggatgaaattttgttcctttaccaagacatcttctcaaaacacaaacatttaacttgtattgtgtctcttgcttgtaactactgtttccatgaagttaatgtttttgcaattggggatctgcatatagaaagatgctctaaaatatctcgaaaggtttccacctttaaaactaagggttacgtccacatctcaaaaggctcaatctttggagtttgaacggttgttgtaaataatcaaattttgtactagagcctaattgtgattagtcgatgataaaagaatatagaatccaatataatgaagattagcaccggattatatactaaaggattggccatttgggacaaagggagaaaaagagagacagagagcagagcagagatgtcggtgagattacttcatcttcttccccaaaacaattccttttctcggaatctcaaatttcaccatctgttgacccgacccgtaacccgaatccagtgcataaggagagacgaggaagacgatgacatcatcaacaagatgaggattaggaggccgaagaggaagaagaagattatgaccgattcggagctagcgacagatttggctagagaaatcgggaaagcgaacacagtcgcggagcagagaagagaagcgatgaagaagagcggtgagattctgtgggcagagttttgtaggcatatggatttgaaagaagatgagatgaagataaaatggaacaagattggagaagaagagaaattggttctggttagagagtttgttgatgaatgggctggtgattttcaacctttatctattacatctgttaaagaaatggttgaccaagagtgtttagattctgacaaaacaatcgaatcttcttcttcttcgtctatgtcttcgttttctggcttgtttcctggattgaagagaatcattgggtttgagtagaaagaatctccaattttcttttataacattgcaatactgtaacatgtttctttagctgagaatacattggtttctttagctgagaatactgtaacatgtttttcgatttgtgaaaccaaatcgttatgttttgttctgaatacgaaatgatcattgaagatacaaacagagaaaatactgatggagattgttgataaatgatttttgagtccagaggatgaaaagaaatcaacaaatgtgattccaaactgagcttagtctttgtcaacttcattggtattgaactagttttgttagatcaggttcttcagctttggtacagaaagctactgtatttaagaagcttacatcaagtgatccaaccaaaaacgtgtgcatatatatgaccgtttcagttctaaggaatgaacgaacaacaatcatctctgtgttaagaaacaaataagaagagacaagttgtatagttatcctttggagacacatctcagagtaggctctgtttggtagtctgaactttacctatgcaggcacaatcattatcacacaaatatttccatcaaacgtagcccataattttgctcgcaaagagataatcaaataactccacgaggttaatcaattcataaaattgaataaataaataaacaccttaacatccaaactttcatgagatgtaaaaaaaaagactaattaagccgcaacagcataaagacttgaatccttaacctcacttttgtctaagtcgatgatggcggcaatgttatttccttgagatccacgcaatagatcaagcaaaggcgtcagcttctcgacgagatcacgaaacaaatcaaccctacgttctttcgcgaattccaaagtctttttcaaaactttattcccatattcatctttagctaatctcaccaacgtctcttcatcacactccacaaattcccgactcaccaacactgagaagcttctccacaatgttgcttcctagctcctcaaacgaaagctcaacgtagtgactatgaagctttaacgcgatgaacacggtacagtccgggtcgcggacattaatcgccttttctactaggcagattcccctaagaggattccttgttaggtagagagcattgtttccgattctgcgaagaatatcaggatacacttttgaatttgctcttttattgaaaaggtttatgattcgtaccacgatgagaaaactgaatgtctcggttataagatcgggaaaccaacccttgataacttggagaaaaaccgtatcgatttctccggatagtcctaaggccgtctgaacactgaggaagcctcttattgttttgacaaactcaacaaaaagataaggatctgacgtcagcttggaagaaagcttatggagctccgctacatcattcgatactcggagaaattcagtcgctacagcatgcaagcgcggcgtggcttgtgtggttttgtgtgtaaagtcgaggttaagcatatgttgaattatggaccttcctctagcatcattgcttagcgagatagaattggctgcaactctaaaattgcaagaaaaatataaaattgaaaaacaaatagtacaaaattagttaaaaaccaaataatcaagagggaaaaaaacaaaacttaagaagaccgacttatttattttttatttttcttgatttcttcaaacgactattacgagaatacccctccttcctcatggaatatcgaaaattcgggtttctcagaaaaccgagcttgccatggatgttgacggagaaggtgatcgtggtcaaaaccctagaattatggagagggactcagattctatcaaagatccgatctcagagccttcatggtttacccccaaaaagtaatttctcttgtttctccattgtatacgtttctctcaggtcaaaattaccgtaacttttggcaaaattgggcgaaatgtcgaagcttttagttcacagtgtgaatgaagtggaaaaaatttctttattcgcttgaaatctgctaattggttctatttatggaagttttatacatttttgttgaatcgaagttgtttacatttgatttgat

SEQ ID NO: 960 - DNA, 82188 bp, Arabidopsis thaliana
gatcttattcttgtggttatttttttggctatctctacaggcttctctttgtgttttgtgttgtcaacttaatcaattatatagatcgaggagctatagcaagtaatggtatcaatgggagtcgtggttcttgcacttcgagtggtacatgttcatctggcagcggaatacagtaagtttccatttgttttccctctatccattaaagaactaggtattgaaattctccattcgaggtatagtgtgtgacgtctattatattatgtgaaaacatgagaatctgttttaacttacacaggggagatttcaacttgagcaattttgaagatggagttctgtcatctgctttcatggttgggcttcttgttgcctctcctatatttgcttccttagctaagaggtgtggactggattctccaaaattctgagtacaaagcatcaattttattgaatatgaatctatatttcattatcgttaaggttatttatctcacttactgttctgtgatgcagtgttaatccgtttagacttatcggagttgggttgtcaatctggactctcgctgtgattggctgcggtctttcgtttgatttttggtccatcacaatctgtcgcatgtaagtgtttagatcttccattatttcttttcatattttattttcaaaatctatacatcttcgttttacatttctcaccttattcaggtttgttggtgttggtgaggcatcatttgtaagtcttgctgccccattcatcgacgataatgccccacatgatcaggtagttgcttctggaatgtatctgttctctcaatccatggctttagataaaggatggtaattaattgtctataggaaggaagctgattattcacattggcacttttgtttttgtttaacccagaaatcagcgtggcttgctgtattctacatgtgcattccgacaggctatgcttttggctacgtatatggtggagtggtgagttactttttgttattcgttttgtctatgtcatgagattctgattacatggttctgttttaccccacttccagtgacctcaattccctccttctgttttcttgtaggtggggagtgtccttccttggcgtgcagcattttggggagaagcaatacttatgcttccttttgctgttctaggttttgtcatcaaacccttgcatctgaaaggtgcgtgtctgaagttgcaaacacacacatcctatgttcctgatggagttcagctatttctaataaatcttgtatcttcaggttttgctccagatgatacaggaaagccccggacagataacttaaacgttttgccagttggttatgggttctcagctgttatgaaagatttgaaattgcttttggtagataaggtttatgttacaaacattcttggtaaccattttcccttgtcatgtattaaaaagcatctgtgttcttgtatgatttattgattacctgcaactgttttccttcttttctcagggtatattgcttacaactttgttttaggcgcctattcatattggggaccaaaggctggttataacatatacaagatggtaaaatattaccagagcgtttcgtttccatgtgtagaacagtagaagtatatctcttgatgcctttatcccattgcaggaaaacgctgatatgatatttggaggggtcacagttgtatgcggaattgttggcacattatcaggaggagtgattctagattacatggatgccacaatttcaaatgcttttaaggtaagatcatcaacttggaagacaaattatccgcacatggatggaaattttacattccaaacatatattcctaccacttatgatcttggaaaactagtacttgatcgcctctttctgtattttgcaggttctttcagtttcaacgtttataggagcaatattttgctttgctgctttctgtttcaagagcatgtatgcatttttagctctttttgctgttggtgaacttcttgtctttgccacacaggtaatctcgacttccaccattcatatacttcatgttttgcaaatccacctcttctgatttatttcatgatgtttagggtcctgtgaatttcatagttctccattgtgtcaaaccaagtctgagaccacttgcaatggcgatgtctactgtctctatccatatctttggagatgtaccttcctcaccactcgttggagttcttcaggtttggtttctcagctgtatccacaaaattcttgattcagagctctaatgtcttaatcaaattaagcttcagttaaacgcgattattcatctagattagtttgagccatcactgtatccaacttcagaatgttttctcatttactcacgcaggactacgtgaacaattggagagtgacttctcttgttcttacattcgttctctttccagctgctgcaatttggtccataggttaggcttttagccacaccgggatctcaaagttcaaatggttctttttttagtataatgtggtaatgatttgttgtgtttgtgactctacagggattttcctgaatagtgtggatcgatataacgaagattccgagcctgatgcagtaaccagagaatcaaccgctgcgcctcttctccaggaagcatgagacaaaaaaactcaaaaggtcactgtgagaattttatggtttattctcagttctttatctactttcttgtacaaatagaattgtggctgaaacataaacaaatgtcaaattaccttcatttgtatattcttgtttcactgtttgcaaaattatgaaaggaccatccctatttctctacagaaaaaataacttaatagtccattacgacatgaatctcggttctttgagatcataccgggaaatgtttttcaacatcatcattcacaagatagagcttaaggagcatccaaagaaatcgcaacaatcttccaatctagctctccttcatcaatcatagccaaaagcagctaaaggcttaacctttagaacgtcaccaatctcaacaacatcaactacaaataaaaaacacgaatccatattaagctacgctctgagaatgaaacccataaagaagccaaaatcattttacctacctggatcattatctccaaaagcaccatcaaccttagagtttgatcttcccatgtttgtggaaacaatccatagttccagcttatgttgtaactgtacatataaccaaaaaacaagaaaatattatagctactcaataacatgttatatttttgatgttacatgcaaaggtttcgtggtgtagttggttatcacgtcagtctaacacactgaaggtctccggttcgaacccgggcgaagccattgtcaatacttttattttaacgtaatttttacttagcttcacgacgtcgtttacataaaaccgttttcatgtgactcaacaccacgtcacacatcgtttattctcgcgccacatcagtctctacattcttattggctaatactctccacgtcatcatctcttcccgtgaaaacccgccatttaaaaagactccagaaccatccacaaccttcttattccgtcttaacaacaacaaaagaaaaaacactgatccaaatttgggtccttctaattttgcgcaatcaaataccttcaaagcctcaaatttcgttcgttctttgtgataattctctcgcagctttgcaatatataaatctcgagggtttactcttttaaggcctggttttttttggtcaatccaagatgggtcacagagtattggtttatgttggagctctgtttctgattttattcacgatttttccatcttctagtgctttaatttcgtctcctgatgctaatcctccttaccctaaagctatctccgtaagaaatttaccatcttttttataattgtcattgcgtttatagatattgataagaaagtgtcattatcggtcttaaattttaatcaaaagaatctctttttgaaactcgtagaatatgaaattttgattctttgcttaatatagtatcataagctttttcactttcctaacttcaaattctctttaaaatgtctggtttttataggatttgaaggaatcaattgtgaagggacttggattccaatccgaggaagtcaaggtttctgggtttgatataagggatgcattggtaggacattctgtttcatacgaatttgatttagaaatcgacaataaagttctcccatttaagcttcttgaagatgtgaaccgatgggaatacgttgatctcccaattttccaagtagaacaaccctctgagaatggtttggttcctatgaggaacaagaagacatctagtgatgatgtgttacctgttttagctccgtttcaactttctggtcctatggaactttggatccaagatgctaataatatgcgcctttctttaccagtaagttatcttttacttatgttttgaaaaaatttgaaattgattttgtttattgagtgttgtgtcaaatattatgcagtatgatgtggatgctggtgttttgaagaaagtgatattagcagatggtgctgttgtaacagttaaaggagctagatctgttagcttgcgtcatcccattgatttgccacttccattgaatcagagttccaatgagtttgcttctggacttttgtcgttagctgaacagcttcgacgtgcttcgactgatcaagaaagtccagttctttcgctccgcattgttggtcctacttctcttgcatcaacttcacaatctcctgacaacaaactcaagcttaagcgtcttgctccaggacttgtggaattatcttccatgtctaaagacaaaaggagtctctcaaccattggtgccaacgctatgactactgttcttaccccaagagagtttacaaccatgtggccaatcacttcaatcaatggctcaaatgctaacttacttggctttgagaaactattgacctctgttttgggtccgaaagctcaggagaaaggttcctttaaggtgttaaaagcgaaagtcgctgctcaaacctttatgaagattggttttggcatagaaaagaagctcaaggaagcagatgttgaaggtttaagctttccagagtggcgaacaaagcctgagacaatgagaatgcattttgaggttcttgctaaagttgatggtgagaatgttatcccggagaacgtaatgcgagttgatccaatcccactggaggacacgatagcgcaaaatgtgattactggaaatgtaaccatgtcgaaacttccaatcattgagtctcctccaagcccttttaccttgtaaatcatgttctatgagaaaaagtttcaaacttttgatctcgtctttgttttactttactaatcaccatattgcagaagaagtgtatatgttaatcttcactgcaacttgtaattattcctgttttggtgaaaatcaatacatattttaagtgtgcgattgttttatttgttccttaggatcagaattgtcttgttcttcatgtgtgttttgaaggagccttccttcagaccaaagaaggtactgattaatttaacaaagataaaaggtagtcacatgatctgcagatattgaagaaaatgaattcacaatttggatgatctcatggtgttagtcctacaggagtgaagaagtgtacatcttagtatcaacagaggaattttgggagctttgctagttttggacttgaacagactctcaaggacaagcaacttttgttcatgtctcaatggttgtaaattctaatcttatgaaagcctgatatctaagaaaatgattcaaactttgcttctttttggtcttctaatctttttagtgaacagaggaggaggctacgtgacggttaagtaactaaattaaattattttttgatggtttagtaattgccaaaataaaccgagaagtgaaaaaaggaaatcaacacatgtaaatgaaacttcctaacacatgagtttataaatagactcaacgttatagccgttagacgacgatcgtcgcaaacacaccagagaaacaagaaacacatagacagagagagttaaagaaagatgcaatttcattctttgatttttttcgattctcttcttcgatttatacttctatttcgtttataatttctttgaattccataagttgttgttgatcttcggctccaacttgttcgacgattgatttgttgatttgtcgttactcttctcagaatctacaccaaccaaaccagagaagagaagagcgtcatgatggaagatgatacagattcttcttcgtttagaatcattccagaaataaaagccaacggtcggtgatgaatcatgattcgtctttgttcgctttagccgtttgctatgaagacgatcaagtcaaccggagattttgataggactttgcgtgatagaaccggcaattgacgacggagatggcgatagggagggaagattgaggcggtggattttgatcggagatcataggttttgttttcagtcacggtggtggagaaactaacggttggattgcaatcttaataaccctacggagcccaacaataagaaaagaaaattcagcccataaagaactgcaaagcccatcaaagtccatccaatttattagtcaggtcaatttctatctcatcttaattttcattttaagtattctttcttttttatattttaactaaaacttttttactattcaaactatttctttgaggattatacaaatttttaacatttatttttcttttattcaaaaatatctccaaacttatagttttatattactattaaaactttaaagttttttttggacaagtgttaaatttttaaatttggtgtaaactaattggatacatcacccaaacccctaagaggtgttctagattcaatatggtttacatttaatttagatttttaacacttgttttttcttttattaaaaaatgtttttaaacttatattttttgtattactattaaaggtttttttggataagtgttaaatttttaaatttttgtttaaataaaatgaagggaaatttgcaagcccacatttaatatatactattgggcctaaattataacttagttaaggcccattagtaaggcattcctcttgtaagcccatatttaattcaccattatccccggctagtcgccgagactttcacgtcggaagagtgacaccggggctagcgcgtgacgagcgatgggagatgacgaagcgcgtagttggattcgcggagacgagacggcgaagcagatgttatcaagggttcttaaggaccgtgcgttcctgcttattccgccacttcaccgtgtacctttacgcgccgggaacgtagtcgagatcaccggcgcatctacgtcagcgaaaactcaaatcctgattcaagctgcgatcagttgcattcttcctaaaacgtggaacggcattcactatggaggattagggaaactggttttgtttctcgatttggattgtcgctttgatgttctccggttatctcaaatgctcaagcatcgtcttcttcaagctaactgtatgcaacttttgaattttccccttcttcttagcttgctttggattttgcagtcagtttcaaatttatgaaattgagataatctcaatcatacataggcttcgatattgagatgttcaaatgttagttcttttagcgtatcagggttaggaaatggagcatggtggcaacttgaggagtcaaatgttaagagttgcaaatctgcagaagagaagacaaagactgtgtttgatgaggagttatatgcttcatgcatgaaaaggtttctgtatgttcgttgctatgatagtcttgaactattgtccagtctcaaggtaatgttttgagttgatgtatctcacattgttggatttgtgtttggaatctaggaccctgtttaaaagtttgtatcagtatttcactgtgttgcagacattgcattaccggatccaacaacaggaggcgtgtggaagtcaagtcggagtgcttatgattgacaggtttgtctttgaattctgctagtttctgattcagttagatctacggatgctaagattccttccaggaccattccagaactgtttattctctaaatgctgaaactagtccatcataggttagataaggtttacatgagtggcgctactattgatgccatatggctagatgacctagtccaatgtaactttcgcagatgcattgtagggttttatgcacactactatctagcaagctgacaggaagaatttgagctaactattttgcaatcttttccccagcattggtgcttttcactggactgatcgtctatcatcatcattggcattggagacacataacaggtaagatatctacataaagactcaggaaacccaaaaatactgacacggtgtatgtaaagagacagcttctctgtttctatacaaataaaggttgctttagttagattctgtgtctttagcttacttaattcaacatgttagagagtttgaggaactttgagtttgatcctttttatgtgagacttatattcatgatatataggaagagtttgtcccttacgaatgtggtggagacgatagtgcaagagttgaagaagctcctgctggtacattcgctggtagtacttgccactaagggtacaatttacgaagaaaagtacccagcaaatgagaataatcggttagttggttaatcacatgctctgtatacggcttcttttttgttgctatagtcgcttcatctcaaacttcccaaaaatttcaggaaggtctcctcaaacgaccatttttcagggaatgttgcaagtaaagctcagcaacctccatttcgtgaattcatgccttcttcttggcaggtcaaattctgatgtgaacccttagagcctcttcttgaaatgctttgtagatctcttttgatacaatcatttcaggatttacaaaatttcattgattatttcaaaggatgattctttctcactacccttattgcaggcatttgtaacacataagatcatcatacgaaaatcaggttagaatattttctctgtttttcgctttctctctactttacaacaaaaaagtttactttttatcatccctgcagctgattatcagtctttacaaacgggacaacaaaatttgttggcatattcacttgaatggttacaaccgcaacttagtagaatagaccgcttcatagtagacgatgtaaggaaacttacgaccataaaaccattttactctaaactattactcatatatattgttattcctgcttcatcatctcatgcagtctggtattgtcattgtctcgtgacctagagatttcatttcaggtattcttcaatatctatctttgagagactcacacatgtttggaagtatgtagaaaccataaactattgtgaatgaaaagttagctattagctaagcagcatgtagcaaaaatcgccagatgtaaagtttattataattatttacatctgaaagaggaaaactctggacagcaaaaggtaaatttgtctttctttatttttatctttacttgattaggttatttttacaaaatatgggtaaccttatcttagatataaaaagaaaggatataatacttacacacacgttttgaaattgaattggattgtaaatatctttctaaatttgcttataatatattttcatgatatgacatcaaagtctttgaaattgcaactgcacgtgttaattttatacctcattgttagaaaaccatactttttaactttaacctttaccttcctataaacttgaaagtgattcttaatgggacatcactacaggccttagcacttaggaggagttgtgttgcattttttcgacatcaaaattattacaagattttgcttatggactctgtacagtcatcagttttttttggtggttacttttcttcttccagaaatttttatctcgttttcaccgcatttatcttttctttttggagtaaaacttcatcttggaatttagcagataagagtcttcttgactcatcttatggaaaattagaatgataaacttggatttaggaatcattattgttttatgtaataattaggttttacaaggagtgggagtagtcaaatgcctttggatacttgatgagattaaacaataaagtaataaaactaaacttgtttgttttaaaaagaaatatcagaatcaatttcataggacttccactacaaagcttttaagtgttggatctgatatgtgatgtgaaactaaaaaattatccatatttcttcatatgtatccttttttttttttttttgggaaatcttcatatgtatcctttttctcacttttacaaataattagtgattatgtgtcagataaaattatgaatttactagatttgatatgtacttttgtttccaaaaacatgtatttttgcatttatcgaaactaagatggatgcatcacctgattctaaagaaagtgatgtgtatgcatgtacaataggcatcggatttacgttcgccagatgccataactcaaaagttcgataaggtggagattaaacgtggtacatgaaataaatggaaattagacgttttaagaagaaaaatggtgtgtagtttatcatttaaaagagacgtaacctcttaagatactaacaatttgtaaagttaactcacaattgactttatcttgatttatatcttatcaacacatctcccacacaaatcgatctatttatccattgtaccattgtatagtatcaaaatgtattacaatctattgagataaacatcactaaagataattacagatgttataatgatgcacaaactgcaataccgatatggactttttaagacaaattcaaagataagaacgttcgccaaagaaaaaaattatacaaatgggcattgtgaattatggaaggttatgacgagtttgactttgacttttgcctaactcccatttgtttgatggttacgtctatgcacaaaattggtttagccgaaactatatccaatctcctcttctctttcacccattaattacaatcgcaaagtttgatttgattcattgattgtgttttgttttgttttgttttgtaatgtacctcgacactttaccattattaacaccacgtagttcctgttaattgaagacattacgacacattttctttatcatatttgtttagatccttgtattatcgtttgtttgatagtttgtggtgagccttatctttaccattgctaaaagtttgaattcaacatttttattaaaattttaggttcactaaacttgtaaaattataaaagtattcactcatataaacaatatttattactattatagtaaaataattttgttttcttaaacaatccaatcagaattcattgttttaatttttcttctcaatctaacaaaatttaagtttttgctaactgaaatagtaaattactttcaaaattattttttgatcgtccaatatgtatcaagtttaattcactccgttgtatgttggatgtacttttcggatcactatatactcactcactcactcacgttggctttctatctttcaatatgtttttagtggattagtataaatgcaagcaataactaaatataaacatctattatttaataagtctaatgaaaatgaaaaatactatagtctatatacttagttaatgaggacaaaactaaagaagacaaagatctttcgatcacgcgtgtggcgtgggcatgtgcctgcgtaagcgtaagcaatagatcatccaaatgtgacttacgtgttttgaccattttgccctagagaataatattatcaaagaaatttgatgttcacaatttgttgttatacaacaggttttcttaattttaaaaacattggagaaatctgaagcaaagtttgaggagcacccacacactcctcctattcattggggctgcctactcctatgctcttcttcttctttttttaattgatctgatgaattgcttattaagtttttaaaatttgagaacagtgaaaaaaaaacaatagtaatagcaatactgtatataacaagtcaattattttaagcaagcaagtgaaaacaataatagtaaaatagcaataagaagtcaattaattgaagcaaataatactagagaccaattattttaagagaggaagtgggtccagaggagaaaaatctatagttgaactctgaatctatgggaagtgtttgagtttgtgtggatctcaattttataacaaaagccattgattgctacttgagggagactcatgcatatgaatgagaaagattgatcaatttaaaagttttcttcatacatacataaatcattaatatacttataagtttagtatagttacttggatgaatctgaggttgccttgcctccaaggcaccccttaattttaaagagaatcagtaatttagttaaatcgatctcatgagatgtacaatatgaactcaagtgcgtttagtttaatccattaaaatatgcatcacttgtttctttttgtaatattttagtttgagtataacgattgtagaaacttgtattaatgtatactgtatatagcagggaacatcatacgatatatacccagctttttaatacgaaattacctatattacgttaaaatttatttgaaatatataatatttctaatacgaagattagtatattgatttgttatcaataatttacaaacgttttcctaatcgaattggtgaggtaattttgtattataccatccaaaattttcatgtaagtgatgtttttttttttccatttattgtcgaccgtatatattaaccgaatataacactttaaatgtatttataaaatcattaaaatatcttaagagttttttttataaaaaaaaataggggagagttgggtaataatgggtacaaacaaaggtacaaaacaaatctcaaaatgaaggcaaagaggagtggggcccagaaacctatggttgacgaccaaacccaatttcatgtgcgccacgtggaatactgcggtgtgcatgatctcagcatgaagtgtcatcatcactcctcgacgacctcgatccaatttcttccttcattgcattgtttttggtttgtagccaattttgtttttttggcgtaaactgtggactacattaacggtatagaaatttctaacgtagataataccctaaacactgaatatttcttggaaaccgatactaatatatttagtaaaaatgtttatatatgaagcataaatacaaaaatgataaggagatgtacttagaattaaaataacgaatttggttagtaattttatattattacagtatatttttgtatcgttttacttttaatcataaaacgatatcaaaaacgttattttcaaattttcaacaccgtttttttctttcttatagttattctatatcgttaagtaaattacgtatgtgctctgacttgacatacactcattaattgatacaagaaaaaaaaacagtagaatgacgaccccaggtgtgattaaagccgacttaaacaaaaaaactgtctgcgtcctccacgaaagccttgtactctccaccacaatttggaaggggaaagtgaagtataaagtagtgctgtttttaatttaacttaattgtatatacaatttgggaatgaattttaattagatataacaatatagaagtatatagaaagaaaaaaaacgaagaagaagtggataagaatcttcttcttactttcttagtggtgaagaagaagaaagaagatactcttttgcgtggaactatccaatcctcaacacctctctttcgtttccccgcccgcctctttctctcttcttctcttttcagttttaaaaatacttttcaaataataaaatttcacatgtgtaacgttttttgttaaatctttttgttttccatattataatattcaaaatatctaatggaagtcgtttacatggctctctataatggaattcgtttaagatcataaagtatggaaacataaatgttttgttataatttgagaagacaaaaaaatagaaagaacgaaagaaaaaaacggcagccgaaattgttagatcgacttaagccgacgacttctcggaaattaagctttgacatcgattactcattcccccttaacacttgcttgctttcatctttattaccatcatcattctcttttgtttttctttatcatttctttttattttcctatttcaaattaaatgtgtatgtgcaactgaattaaagaagccatatataaaaagtacatgacttccaaattccaccttcttcttcttcttcttctatctcctatatatacctcaatctctttcacacacttcctctggctccacatcattcctctctatataatcttcttctacacacacacacacacgcaaccatatacgtacatgtgaagtagtgagatcaatatcgttagcaatgaatctaccaccgggatttaggttttttccgaccgatgaagagctcgtcgttcacttcctccaccggaaagcttccctcttgccttgtcaccctgatgtcatccccgaccttgatctttaccattacgatccttgggaccttcccggtatatacatacacatatctctctatatatgcatcatgatcgcaatgatccatagttcactaaacatgcatgtacgtgtgcatatgtgtagttgttattgtcatgtgtgtatataatgatccaaattaaaggacatagattgattgttgtcaccaacttaagtaaccaaactgtcttttttttttttagtagtacacttttgttgggttgctctttttaaggattgttttagtttccaaatcttaccatacacacaaatattaatagtaccagtctttacctaataactttcttttttattccctcggaaggaatctattaattggtgaaccattatcaacattgctttgttcatagtcatacatgtgcaccaatttcaatcattcgaaattggtgcgatctcatgatacaccaacacaatcaatcatatacatattatacacactcaccaaagcatgtacgtagacatacatacgaacaaattacaaatacacacataaaaatatattgatgtttcatccactaaactagtttttactgtgtggataatggtcaatactctgctaaacttcataagaatctcagataagcgtgtatcaacactaactttttatacgtataaactacagggaaagctttgggagaagggaggcaatggtacttctatagtagaaagacacaagagagagtgacaagcaatgggtattggggatcaatgggaatggacgagccaatctacacaagctccacacacaagaaagtgggaatcaaaaagtatctaactttctatctcggagattctcagactaattggatcatgcaagaatattccctcccggattcctcttcttcatctagtcgatcttctaagagatcaagccgtgcttctagttctagtcacaaacccgtgagtactctcttttgtttcataagcctaaagttgtcagctttaacttaaattgtacattttcttttaacctaaaattagtagttgacaaaaataaaataaaaatttagaagttgacctccacgtggcatggatttttgtgtgcaggattatagcaagtgggtgatatgcagagtgtatgagcaaaattgcagtgaggaggaagacgatgatgggacagaactctcatgtttggatgaagtgtttttgtctttagatgatcttgacgaagtaagcttaccgtaataaagacagaagcacccaagaagagaaaaaaaaaaaaagggtttagtgggcaattatttctaaaatctttgtacccaaagaaaaagaaggaaatggagaatgagaatgacatcattcttacacgttaatgttgtaagattagcaatcccaaatttgcaagcaagaagcaaaaacagaagaagctctagtcttgttgtattttatttttcacaattcaaatatatctttttattaatactgaattaattatgttagttatttatatatgtgtgcatattatatgggagaagttagcaaattgtattgtgaacaaattgtcgcaaatattattacaatgatgaacccaatttgtgtgtaaatatgcactgatgatttcagttgatatctttctcatacgacaataacaataacaattaagaagaagtttttttttctgaattcaatcataacactaaaattattggtttgtgtaggcttcacaatatatctttaaattaaaatatatatcgtctttttgcctaatgtacctaaggttaggaggaaaaccacatctactagtcagggaaaaaattgcagcctactacacttctcatccattgaacaatattaattaaaatatataataattggtagaaacggattagagttttgactaacaagatccaaaacactagaacatttatataatgggaaataatgattatgttaccactgaatgcatgcaaatgagacttaaaaaaataagccccccatgttggcgaataatcatggggaaaggctaatggtgtgtttaaaaagttatagagaccaaaccaaactaactttttttttttcttggttcttctttctttcttgaaagtttatactgattctagtttttaactcaacaaacaaaccaacaaatacgaattatgtttctctcttttttagatggaagaggacaggcagcttggaaaatagtttttccaaaagtaagttgtggccctatgttttggtgactaatacatctaaggatcagattacacttgtgtactaatacattctaattcatagctaaattctcgagaagtacgaaaaaaagtaattgttttttttctctttgtgaaaccagagatgatagatgataaattaaaggtaacttttgagaaattggtgagaaaattttctatttttgatgagtcagtcctaagtttaaagagaacaaaaagctacagaataaaaatgatagaatttgagtattataagcaaattatgttggaagtacataaatttgcaagtgtggcctctaaatttgatgatatacgtgtggcctacacctgatccggtttagggtaggattttctatattgttaattgtttatagagttgggcaattgagagcctttttctccaagttacagtctctctttctatagatctttgattgggtttagtagttagttgtcttgtgtcgccgagccaagcaacatcgtctgtctacgtctattataattatttaatttttctatgtatatatttttatgggtgtttgcttagcaagcactgactcatgtatgatgcaagcaccttcgcacacataaaaataataattttataaaataggaattgaaagatttttcaagttgggttgagagattaaaagatcattgaatatgaagaacttttatggttttggtgttactatgtataactatctcataattagaataatgttttcaacctaaacaatatggaaacctatctacacgatgggtttttgaccaagaaacgatttgatattgttgttctgaaccagagacgttctaattgtatgtggaattttacgtagcatagcaaatatcaagatttcagtctcgttaagctaaaaaacgtggatttcgttaagctagtgtttagttgcttcttggaatgcagaatagcaaaccaatagaaacaagagaagatgcatttgattaagaaacagagtgcatatatttcattaacttgtttttctctttggtttgttgtctatttattagctttctatgtatatatgtaatcatgatttttttttaacaatcctatgaaaagctgacaaaagtttgacggatgggaagacatatagtggtgattagaagcttttttatgaacagaaatgttaccttttcgttttactggtgctcctcctgatgtctgaaagctgacatcctcttcttgtatttgtaacgcccgaaaacataatctgggaagagcctgttatgtgatttcatgaaaacaagttgatcttgtgtgaatgttgggagtccatcatcagaaggtgaccagtctttgtttctcgtcatggttcgaagtccagcagaaggtaaagccaagcctggtttttgcgtctctgtttcacgtccagcagaaggtgaagccaagtctggtttctgcgtcattgtttcgagtccatcagaaggtgacgacgacaagtctggtatttgggccactgtatcgagtctatcaacagaaggtgaggagctatgggtggaggtggtagtactggtgttgagatcgactgtaagagtagtagatatgggagtgtggactggtgagtcgctggtagttgtgttgagctggctagaggaaggtgttgtgggtactgagtgtgaactggtggttggtgtttggttgccagagagaattggaggaaagtccttttgactatctagcgtataggggtcaggcccatggggtaagagcggaaaaagtggtggtctctgataaacgtagatcagagaccgaggccggtgcaggtacgggtatagctgcaggtgcaggggattctgcaaacgtaattgcagtctgagttagtttctgaaacaaaaagggtttatcattgaagaaaaagtgtgagttgagataaacttacagcgcatggaaactgtggactataatgatcatatgggagttgctgtggtgtataaggagaagcagcttgtcttggtgtgaggatgaatggttcagcagaagcttgcagtttgaaaggtttagcagcctaataaacacagataaaagcaaatgagaactggttataaacttatgattcttcagaaatcctgatacacaatgcgttgtaaagtaaaaacctttggtgtacaaggactatttgccagcatattttccttgccagctgaagaagattgctgagagcgagtggtttcctgcaaaatcaccaaagaactctcaacagacatttcaatacataaatgtgagcgtagttgcgacaatgatacacaatatttgcttctcctgaatagatcaatgcattggaagttcagcatcatctatacttggaatcatgttcaacaaaaaatagacatttccaacattatctgattcagcttcgtttgatctaaaacagtcatcgaaagacatcaagtcactaacgtctagcaactctatgttgtgaccattgtggaatatcacatgcaatgtttcttaagtaagtcagtgatgttcttaccgattctaatctcacaaatatgtaaacaataaagagcgaaagacgaacctggttaggtcctgaatcgcttatagggctgctacactctgtagtcttcttgagctgactccggaagattgaagaacgtgctgatcgtcctggatagcttgaaggagactcatacaccttctttttagtggctgatgtgaccagaacaccatccatcaagattccttcatctgagcatgaaaccggaaagcgcctaggagggagtggatctgatttagcgtcccgtaaacactgcagcaggagtgtcttcgcattgctaatgttgtaattccttttaggagtcaccggactcaaaagtgatgacattttatgttgaaaacggctctgccggatcttatccatcggccacgtctggggactctgctttggggtcttgtaatccacctcgttgtagacaaacggctcgtctttgtccatcatattgctacagtaggagaatctgagattcctttgtggatccttgtatcaccagacttcaaaatgagactttttttaatcaacatcaccagaggatttgcaatcaccaaaaaccacaaagaaaataacaaatcaccagagaagtctcgacttattcactctttctctctgccgctaaagctttccgataagatctgaagaatgtaatcgagagcacaagacaatagtaagtttcagattcaatcaaaaacaaaccaccgcagaaacattttcccgccaaaactggcgatgaatattcacgagacaacagcaaaatctaccaaagatccaaggttgaaatttaccgataatcatcatcagaacttgaagaaatcaaaagcgagaacgattgaagtagaaaacgaagaagaagaaccgaaatttccgatcaaaacctagggttgtagaggaatcgggaacgggaaaaaaacacagattcaatcgcgatagagctaaacctaaagctcgaaatcggaacttaaatcataatcacatacctaaaagaatcgtgatcgagaagctaattcgtcttcctctggttcgatagcatcacgaagcttgctcagaaaaatctccacggccaaagagagagagaagagggaaaaaattagtttcaaagagacgaaatgtttgttaaccgcctcggtgtatatatagggctaacggaaaatataacggcggaaagattccgttatccatttgatgacttggtttggttgtttctgtatgttgactttgacgctgtttctttgaccttccattaaaccggtcaaggcgaattaaaccaaaagttatttaaccggaaatgctgattcgacccagtaagctctgtttttttttggtacaaaacataagaacacattttacttgtacattgcaacattcataacaatgatcaaataaacaaagacttgggttcaagccatcgactagatggtcaagtcaagaccagagaccatacaaaaacagagacccatgaaatgtacaaaggacccaagagtgaaagagaaacaaaaagaaaaccaaaaaactatacatattacatgaagctttacacagactctagccttgttgttaccacatagagaggaagctttcagattccatcaacggagtgtttgtttcatgttaccattaagcagagacataagcccgccaccatgaactctttcctcaggaatcataaagtcaaatatgttcctcccattgctgccactactattgttgtttgtttcgatatcgggtctctcggtgtttgagaagcttaaggatttcattgatggaggcacaagaacctgcattggtatcatcagcttctgtcttttctcgggttgatgatgcaacggtggcagcgggcgatcaatggagtccatgcaatcagagaccgcactgactccagattgagaatgatcagtggtagtagtagtagtagttgcagttgttgtggtttgtaaagaagtagagacaaggccacggaaaagtcccggtccaatcaaaccaaccttgcttccagctttatcttgtgacatactgttatgcgcagcgcataaaccgctctttcctctagcgaatttctcgcatttccagtctcctccccatgagcaacgtttcccaccaccatgtgccttacagaaatcagtgctaccttgcgcactcttctcacaaccatcagacttacaccgtttcccaccaccgtgcttcacgcaacaatcagtcctcccacgagcgctcttagtgcacccggccacaacacatctcttcccaccaccgtgagctacacagaaactcgtcccaccatgcacactcttaggacaaataccaccaccatcaaacatacagcgttttcctccaccatgtgctttacaaagcggagtactaccttccgctccttttgtacatcccgcaaatatgcagcgtttcccaccaccatgagctttgcagtagtttgtacttccttgagcaccttttgtacagcctgaagactgacaacgccgtccaccaccgtgggaaatacagagtccagcttgtccctcagcacttcgtgtacagctttcaatcctacaccttttaccaccaccgtgcttgatgcagagcccagatttgccacgtgcagccttagcacatccctcagggaatccacaccgtcttccaccaccatgtgatatgcagagatcggttttgccttcagcactctttgtgcatcccaagtgttggcatctctttcctccgccatgggctttgcagaaagtagttttgctctcagcacctttgttgcaacctagcttttggcatctctggccacctccatggccaatgcagagccccgaagctcctctagctcctttaacacatcccataaacttgcacttcttcgggttgctcatcctttgctgagaagacgtggcagaggccgacctgtcagagaaagcgcttacagagaactctgactcatggctcagctgtgaattataagcatcagttccacaattagtactacactcttgcatccttgaaggttttctaacattctccgtccttggagcgaaaagaagcgatggcatatagccacctgatcgccttgctgaggtagaaccctcatcaacagcagcttgggacacattagtatccgcatatgtcaacagagaaccctcaagtccgctgaaagtatccatggtcacagcaggaggaccaagttgcaggattgagttacctcctgatgagagttcctgaacactcccagaagaagcagagcctttgttgttattatcattgaccctgacattgtaataatacgaaggcggtgttggacccaaaccgagaaccaaccggcaaccaccatcaggacaattagaaacatcagaacaaagcttatggttatggtgagagctcccaatcaatctccctgcactgcttccaagacatttcaagctaagagcagtatcgccgaaattgtcaagctttgcaataccattgccacgagaaaagtgaacaacactctcgttcaaatccatatgaagagaagagacagaacaatgcagcggaggagatagaatgaccaaaacaataaatacttagaacaccaccttgtagagctataaacataaaagcaacttgagatataaacatctcccaccgctgacaaatccccatgtatctgccctgtccatcttcaagaatgggtttgcgcaagaaactattctgcagcagttacaaaatcttgttagtagaaagcttaagcaagaagatcaataacattacaatgacacgagactaataatcaagaaaagcatttgagtcaatagtgtaattacaagttgcggcttgtgatgttaagagattcaaagtacagagaccaataattggctacaactgtgtctgaaaaggaccaagtaccaaccaaaatgactaatggtggcaacattttagccttaggtaaaagtgaaacgtgaaggacacatctttctatgctcgaaaaattagaaatttcccaaaacaacagaatgaaagaaaggataagataagattggtttacagattagtacacagtattaaaaaaaaaaaaactaaataatttttgttactcaaaataattcaagcaaaatcagaataatgttaagactttgaaaacttcttatataacatggaaagtcaactttgtgtttgataagtgataagtgataacaagaagcaatgtctcacgattttaggttgtaaaataaagatccaaactcaataaacaagatctaaggaaatactaattgttactattaaacaaaaatggaatcaacaaagattctgaatctctatatctcacaagtttctaactttgaggaagaagatctaaattcacaacaaaaaaattaatcaaagttataatcagagttaatcaaacaatcattagagaaatcatcatgcgtactctaaaaagttaacatcatgaaggttttaaaaaaaaaaaaaagataaaccctaaaaagagcaagagacaattagagaaataagctgaacaaatttcagaaaacgaaacaaaaacaaaccatgcattcattaatataacacgatcaatcagtaataacaagatacaaaaaaacagtactaaagaaggaataagaaaaaacctgatggatctgagacagagagagattccgtaactcgtaaactgagagtccctgcttcgtctaaaacatcgaggaatacgaagaagaagaagaatgaaacaaaaaaagagactgaaacaggtgtcgaaatattagcggggctacaaaaaaagagagaaaaaagagaagaggagatatttttatggtttttattatgagcgtgtttgtgttgtgtgttaggctttttcaggttctctctttctcgtttataaccgcgagtgagggaatcccaatgaattacccaaaataccctctgtctccgtcgatagtaacggttctgattggatgagacaacgctctattttgggtaatcaattaaaatttgcttttcgatgaaaacgacgccgtctttagtggagacaaagtcttttatgccccttgttttctgttttctttcgagtggtagtgatgttgcgacaagtcacttctctgaattaataaaagtattaaaccgattaccgtcttaaccggtcagaactgattccttccctaatttcttatgacgtcatcgtaattttatgaacacttggtttttatttatttatattgttttttgggatattgtgaatgtttgtaatgatgatatcagctgaatgagtctttcgaacttaattgatgtatgtatatgtttgtttttgtcattttatgtgacgcttttgttaataaacgagacagaaaaacgattatttttttctcatgccaggaatatggagtaaaaaatatatagaattagctggcatcattaaacctagtattgtttaaaaaaatttaatcagattccactatccaaatgcgaagcacttgtggtatcaagcttcaacgaaataaaagacttgtgattctgtttctttattttatgtttgtacttacatctagatctataagactataagcgaaaacgttcaaatttcctctactcaagcaacatacatattcaaacatcaattgtaatttgtatatgttatatgtatagtaggaaacaatcacaaaacaaaacaaaaatatgaaacaatgcaaataatatcattgatgtacgtaaatgaaatatttcttcgttggaaaataattgaagtgattaatgagaggaacaaaatgttagatgtgcgctgggagaagaagaagtaagaacaatttatttatataatttgataccaattgttttgtcgtggtgtgatgaaaattgtcgccaaaggaccacaataaagacgaacgactattttcttttaaatgaatgaaattgtgatttttatgatgttccaagaggcaaatcctattacgtcagccaatgaggttccttgcagagtggaagaatctatcataatattttaaataaaaatgaattatatatcaaagaaaaagtacaaaaaaggcataaaataaaaggaatctttactagtcggcgattccgtcagcttcggcctcaactctccacgcgaaacggctgacgtcgacgatattttataccttcttaatcatttaataacatatctggtaacaaatgtgtatgtggaaacacgaaagccttgttgcaatattttacatcatgtttttaggttttgacttcatcagcatagggtttaggacagagtttgtttcttcgttcgcatgcatacatttttattttataaaatattttcttctaaagctccttattggatggattttaaattgactttgttcaaaataaacatcaacaggcccaactctagcccaatcttctctgccaatgtaatctcaaaaacttctcttttgataagacttacaagagaatccaaaacacaccatttttgtgtgtgacaatggaaacctaaatcatgaagagacttcaaatagaaacgttataacatcaactagcgatattaaaataggcactaagcccgcgggtctaaacgggcttcaaccgataattattgaaaagttgtctagctaataaggaatcaaggatcctaaatttgatttctatgctctaattgtaaggaatcgatggtagagcttatctttgcaattacaagtcacaatgcttctgcttttttcaatatgtttgattaaattttatgatgcgacaactaaaataattgtgaagctcgttcaaaactcagaacgaccacaagtataataatcgaaaacaagatctgcccaatgccccttcacaatctctccatctaacccaaattcagccatcaagatcccacaagtcctttgtacctagcgtacgacattatgatcacaaacacgactacacaaagtgtccccgtcaagcccaccacctgcaacaaccaaaaaccccgataaacataagttaatcttgagagagatctttatttcatcctcatgcgaatagaattctggtttcttacgtatttgaacatgtatccatgaccgtcgttccatgtgtatggaatgttcatcccgaaaattccagcgacaagagagtacatcgataagcaaactgttccagaacttaacactagctccaactgcaggattttgaagatgatcaacaaaagaagatgacatattaaaaaaactttggctttcgacattcacgtacctgaataagctgattccgatgattgtcaagctgtgaatagaaaaccgacgagttttagcttttaatataatgacttatattcagatttcaagaacatgttaaaaattttgaggtttcgtttttggatacctggatgttaatgtagtcctctgtgtcatcaatatactcacgtagctgcatcagagtcaaaaattaagtttttaaagtaaaaaaagtctgcaaaaaagaacagaaagaaaagggagcaagaggataactgttgttaatctgttcaaagtgctgtcgatctgcatgaagtatgcctgtaaagatatcaagacgtgtgtatttggacttggcatttgaatggaagatagatcagaatcagataaaagattttgtgcaggatcaacaaacctcgagtaacatttcaagttcttcaacatcattctcatccccatgaactgtggctaaactcgctctacttgctcttgaaatcttagagcctattgttggggaagtagtataccaatttggttcaccaatactactaatcggtgaggaagcacttgaaagtttccttgaaaggtaaagatctgccatatcatcgtcatcatccagcaactgttcgagttcatctcttacctgcaaaaggcgatgaagctacttagttctctattcatattacaaactttacaaatactcataagtcataagaaaaagatacctgctcaccttttgaacccgagctgtcaaccgagtcatggcactcttcaatttccgaactctatccaaattacggctactaatctacaagacgaatgtaaaaatgtagttgaaaactggatcactggtgataataaatcattgaggtacctacctttgaggtaagctcatccaaagcaggataagcagctgtttctaattctgctgtccttgcagctaagaagctacagattgcttccaaagctacttccagcgcccgaaattcaaatggggattctatattgcaacaagcagacatttcaacatatatgaaaaggcaaattaagggtcatcaaaaaggagatgaatttcacagagtttagatggtttaggaaaagagccaagagtctctagggacaataccatcttcgtcaccagtatcaccgtcgttttgagcacctgcgatctctttcccgtctccttgaccaccattgtgtgatgcatttccaacaggtaagcgtcttcgaagctcctccacaactggaataacattttcatcagacggatcccgaagcaaaacctgtaataagcccaagtcattactacaagaagagaactcaaaagctatactcctctaagcattccatagtgctaaatagatcaaagcctggctgatattatgaactttcaacacactatagcatagtaagaacagaactgaaaaattagccaaatttttgcctagttcagtgattgctcaagttccttaacacattgtcagcattttgaaaaactggctacaagaaagaatcaaactttaacatgaacatctgcatattcagaaaaaaatctacctaacaaaataaaaatcgaaactttttactgcaaaaaccctacaaatctaagtgtggtaagcaaaggaatcaaagagtaaactactaacctcttcggaagtgataatagccttgatatgctgcataaagaagaaggaacaaaactaattacactctgaaacaaaaacaaaacccagaaacaatgaatgcctgaagaaccaaaaaacagaaccaaacctccaaattgagaacaatggctctctctcggccaagaatagtggaagggtaagataaattggggtctagaatccggagatcgcgagcgtggatctggacacggtgcatgatctcatacttatcaacatcgagtggctcactctgtcccgtcgcgtcaataagagcccacgacgcttgtggcgttttcttcttcaccgtcacaaccgccgaaggatccgctggaaccaagtacccgttttgcgccatgtctttcaaaaactaaaaaaaactacctcaccgtccacttccacgccgtctgtaaaattcagagcaccagcatcaacacaacagtcgaattcttcatcaaaaaaaaaaaagcgaacaagagaatctgaccttgttgagctcaagtgttcatgcgaattcgacggagaaaacaatactctaaaggattcagaaaagcgaattctcgtcctgtctgctcttttttcattaaaaagattttcggaaatctttctttctagatttttgtttaggtttggtttttttgctttgtgagagagttttacagtttcagaaaaaaaggaaaacgtgatatattctgttagaggtgaatcttatttatatttaaaatgtaaaccgcaataaaccggtaataataaccctgatttctggtaaatgttgttcatatttgagtcgaatcacctaaattcgacacaaaacccggtttagtttagattaagaaaataaaaattaatttatttttgatcgggatatactacgagtttatctgcttgttatcagaattattagtttgagcaactaattaaaaaaaaaaagactaaatttacttaaattgaaataccaaacataaatctaactctaactgatattagctagatttatgttacacatgaattacacatgatatattttagatattcgaattatgtttatatatgccccacattttcggctactaatgctataattttaaagagattcacaatttcttttttttattacttttcttttccaacttgcaaaagcttaagcatattaatattctttttttcttcctcaaataaaaatatagaatcagattctaatgcttaaggaatgttttaaatctccgacatgaagaagatgctttcccaaaccaatcttcctcttcccaatctcatcaaccacactcagatctttacatatctctaccttaaacctaaccaccgcttcttccctcttccccaatcgaatcttctcgaatcctaccaaatgcttcctcggcgatccgtgaatcgccggcggcgtcgtgaatagaaacaccgtgtgaatcccttctctatctcctccgtttcgtaccttgatatgaacttcaaacgccgatccaccgccggagacagcgttttcgcagtgcggtccgatcgcgtctagcgattgacattccgatgatcggcaaacgtgattctcttcgagaccgagagaaacgagacttggagctttgactaaagtgtgactgaatttggtgtagctgagtccatctccgaatgcgtatactgtttctccggtgtagaatcggtaagtccgacccggatacccgcttgctttatcgggtctcatgttcattattgtcatcggaactttctctacatacgactgtggataccacgtcatcggtaatttcccacctacataaccaaaaccggtttattcaaatttgcaattacaaaaaccggtttgaaacagagtctcttacttggattataacggccaaagatgatatcagcaatggcgataccaccggcttctccgggataaccaacccacaaaattccggcgatctttgggtcattcttagcgaatgtaatatcgaaacctccaccggacataatgacgagcaagaccggtccttttgctgctttagccacttggatcaccagctcttgttgctgtccaggaagatgcaggtcgactctgtctcggctctctgcctcgattgattgatcggcaccgatcacaagcacagacacatctgcagtggctgctagtttcgtggcgccggctacatccgctacagcacaagctacattggagcagcctggtagatatgttgtagataccgtcccggctagtccttgtagtggtgttgtgtatttacacggcgtgccttcgtagtttccaatcattgttttggtgacattcgcgtttggtccaatcacggctagtgttttgatcgatttaggagaaagcggtaagcatccagtattcttgagtagaacaatgccttgtcttgctgcatctgctgctagctcttgattcgcagacgtgcaaacgtcggtaggacctaacccgccatagatttggttctttgggtttccatcaaagaatcctaaacgcataagggtcaaaaagttgttcgaaatcgctttatcgatagctgcctcgtttaccaaacccgacttaactgcttcctctgtatgttgacccaagaatgaaccacagtttaaatccaaacctgccaatatagatatggctgcagcttcagctggagtctttgtatagtgttggttcttatacaagacatctactgaatcacaatctgaaacaatgtacctataaaaatagaaccaaaatcaaaaccaaaacacacgaaaaggatttaaacttagctgatcggatcagatcagatcattacccatttaatttccattcaccgcggataacaccagagagcagatctggatcagcgcatgtcggtttgccgttaacttgattgtaagaacacataacactcgccacattcccatcaaccacacaactcttgaacggtggttgatacgtatcatccatatcttgttgagtcacctactccatcaaaacaaacgcacaaaaaaagttacttaaaacactcaaaaatgtatttggtctaaccaaatgttgtacccaacccgaacttagtaccattgaaccggattaaccaaataaaccacaacatcacatacacaattgacaaaaacagttaaaacactggaaaatgtctttttagcttttagatttttaccacggcgttgaaactgtaacgttctacgcctttccaattatcgacatcgtaagcggtatagtgtttgcagcaggcggcgactttgagacggttagaatcgccaccgtcagtctcttgaagacccttaacgtaccctgaagcatacttactagcgagcaatggatcttctcctggagtctcttgccctcttccccatcttggatctcggaatatgttcacgttcggtgaccaatacgttagtccggctaatcccacgttgtacattgccctcgcttccgttgagacgaccttaacaaataagtgataccaatgtcattcaaaaaagccatgtgtatccaatccggtttgaaattgtattgacaaaaccatattcggtttattatatttcttagaagaaatgagctgaaacttaaccatgaatcataatcatattaatcatggcactgaaaacaggtgtggggagaaattcattattggttacaggtacgaaaacgacgtagtataacgtgttgtaaagtgtttacttgtaccaaacgaaagatcaaaaaaaaaggagaggcccagtttcataataagtaagatattcccattatccaaaaagagaataaaagcaaaggacgaaaataaaattttgaaaacaaaaatcaaaagtggataaaaaattaattaccttgccaatggcttgaaacagagatacgttgaaagaagcggcggtgagtataacctgcgggaaactcgtagctccgggaacttggctagaaaaatgcgtgccgggtccgatgtaagaaacgccgtgaagtgcttcagaccaccattcatacgttggaatcccaagacgagtcacgccgttagctttactcactaaaaacccgatcttttcttgcaacgtgagcctcgcgaccagatcagcgactcggtattcgatcttcaaaacggtgttgcagaaaccataggcggcgagagaagggtttgcagctacgtcgcaggcgaaaaccggcgatgattgagcgtttgagaaatttaaaaagtagaggaagaaacagagaaagattagataaacagaggaaacagaggatggtggtgctctgtttctccttgttaatggagaagaagagcccattgctttgtgtttcgatttcttgggatattggctttggtttagtgagactggttttatagtaataaagagtggtaagctactactacgctctcactaaagaatctgtggttaatataaattattgtgacatttatttatttattttgacctattataattaagattatgtgaaaaagatgatacggtcttcgaggaaagaaataatgatacggaccatacggtgtttgtggatactagtattaggatttatgacctctgtcatgtgtttgttaaatcataaatctgattttactttatatagttttgcaacaaaaaggaataaagcatagtgggtttaaactttatacataaagtgtacatcgaatattctacgtataaaatttacttatttctttttgtctcaacgtataaacttacctttttcggtataaaataaaattgtaagtatagatttcgtttggctatagagtacaatgtttcagacgaccccatatcaaacttttttacatatgcttttctttttcaaaataacgagatctttgagttttttggtctgtgtatctcttcacgtccaaaagcatggtagatttttatcaagaagtaggcatcttctttaagtgtagcaatatctttatagataattggtgaaataactatgtttggttaagcgttaaggtatggtcaattcgatatatgtggtttggatactcaacacgattgagtccaatggactgtgtcgtgtgcatatatgaaagagagagtttgctaagtcgttttttggttgaaaatgatcattaagagctgtggctaactattgcgtgtaaacaagaaagacaaagtgttttaagattactttgaaatactgaaacttatgtggaatcatttagcttaatgtggtccagttgatgatcccacatagacacatcttttaacaaaagtgaatgccctaaaaattgttattatatactgttcacaatgtgacaattaagtctagttttccagtaactaatcaccattttacgttgtgtgtgtaaaaagaaaagtcatagatccccaataagcgaaagtgtttggtagtgacccgtgacggtgtcgtattagttatcaaatggtaagtttttgtcgaggtccaagagcaagttgcattctttgtttcgagcccgtgaatcttaatggttttcgactttcaagtttcaacagttgttttcatttgcatgacagcctgtcactttaagttttttcatgcgcgtgactcattcacattatacttgatctacatataaattagttcaattaacgccgttttatatacttaatttgatgaaaacataagcttaatgggaagcatgattaaaattatccatctagtaatggaagattctatagtcctaaaacatttagttacttcgtagtttatagcttttgtttactttttggcgtaggttttttcaactaaatccaattagctaaacagttgatttgactcataacatatgaaggctaatatttgtatttttacaaatgaatttttttaaaaataagtatgcaccacttggattttactatttgaatattttctgaaaatatgtattacaacaatatataacagataagcgatcgaatttccacatcaacatccaatgcatgtgtctgattttattttagtttgcttggaccaataaaacacaatttccaaatttgaataaaacaaaacaagaaacaaaaaatttcctcagacatttttacggacgatatatgtatatttataaaaaaattacatgtagatttagtgtcgccaaagaaatgttgcaagctttaaccgaaaaagccaaaaaggatttaaaacgttgcaacttgcaagtattgtcacatgtgctaacaaattattatcattatttgtaataagggattttcagaaatatttgtataaactaaaaagtaaaaacccacctatacatatataacaagtagaagaaatgagtagatttatttgtttggactttgcataggacacatttaattcacaagtaaaaaagggatttacactttattcgttaaactaaataaagtcacaaagataatgattgctaagtaatgtctgcaaatattaattattgttttacaggaaaacatgaggtgagctctaactattactatgagtatacttctccttttggattaattagcattaagtaataactatgtctattttatattagtactagtttaatgtcggttgctaatttgctactacaataaagcctggtctgataataaattccaatcacaaacattattaaaatcaaaatcaatttggctttatttaataatgagtagttaggtttgcagcatttggagacatacatatttaggataatattacatatatattggctccaatcaaaaacaaattaaagttgcatggttacgtgttagcaaatggtggggacaaagatatcaattaggttatttacgtcttaactacgttacaacaatgtctctatcatataattccaaatgtgtcatgaaaaccttttttttttttttttgttaaagagtttcatgaaaactttatccacataaacgtttttgaaatgcatgtgtttttagttcacatatgcgctcggctgcataattttacggaatcataatatatgctcaattattttactattttcatttgtttaaattaaaaatcaaatgtatataccatttttcgcgtttagtgttttaagaaagctagtcaattattttgttgttccactatttttatgatgcatatcaatcatctaattgtcgtttcttacttatcagtttaccattgtattgtgcgcaatttttttaaatttgcatgattcgccactagaatcttaacttttcggagagattactttttcataaagaaacaattgggtatagtattataatttcttcaagattgtcttttacatttatttacaacaacaaaaattgacctaatctttgaataatatacataaggtagatgatgttattgtacagggcatgtgactttttagacatccctattatttatagttagagcaggtgaggcgaggatcgatgaagacataactactgtcaattattgtaattgttcacatttctcaaaccccaaaatattcttaatataaaatagaagaggcatgtcccataatcccattatatatgtaaccttgtatatattcatcatcattattttattttgaaaaaagattttgttcataattatcaaaactggataagatattcggttatgtgtatgtatccgatcgtcatgaaaataacatgttagcattaaggctatgtaattatgtgcaaacctgccacgaataaaaaataagttatacactaagtaataaaggaacttcaataacaccattagtggcgtcactccaagcgttggttgcacagtctaatgtatgacattaagatgctttttaatttggtttcttgcagatatgtatagattgaatctcaaataaaaaatgtagaagctgaaaaaaagaagaaggaaaatatcacatgcaaagattatagtattgacgatatcgacctgcgactttattgtcgccattggttaggtgttcaaattgcaaatgtatttcaacatttctatgattgttaatatagataatgatatccaaattggtcatgaaaaaagcaatctgattttgaaaaaagtgagatgagattgtatctactttcttttttttgttttggcccatgccctacacagccaagcaaatttgcatcaattaaataaaaataacaaaatattttataaaaatgatcacatttgacatttttctcagcaaataaactagtgtgattccactaacactcttttctacagatctctatgttttacatgatacataataatctctaaagtttcacctggagagctttgttcatttgatgttcttgagaccgcaaaactgaactgaaaaacaaaaaaaaaacagtaacaaatcagcaattcatgttagcatttctggacactgctggctggttattgatgtttaacaaaaccgtgaatctgagaaacttacaaatgattttaaaagaaatgggttgccatcaaaatctgaggtttcttcttttcttcttcaatttgaataacagcttctgctttgatttcttcaacctttttatcccaaatctcatccactagtttccatgtgtcatcgctgatgatttgtgtctgcatcaaacatagcacaagagtattatataagagaagaaaaaagtttaatcttgttatgatctatgagtggtttgtttctactacatacctccatgggacgaggagctccaaatgttgcaaaaccaatgtttcctggtgaaaatgttactcttccaggaagcgatacaccgtgaattccccatcttcccgcatagattaaagctccatactcatcgacaggtctcacgggtttctgttttcatgaatcaaaggatctggaaaaaccggaaaaaaaatcaatacagagagataagattgagaaagataactaacttgaggaatccttggagctgtgttgtaaatgttccagatttcatcggctttgatttctcctttctcaagaagcacatctgaaaatattattacactctttaagattgttgagtgtatggtgatatctgccattgcaatgacgaagcagagaggatatgatattattctaaacctgtgatttcttcaagggctgattgatactcttgtaagattgatgagcatttctcaacagcaaacctcatgtactcatcgcgtaatgcctcaagtttcggaacaagctatacacgaaggagaatcgaaattggtgtttctgagattctcaagagctaaaaataaagaggtaacaagtacatatataaaacttacattaggaacgaggtctctttggtttcggtaataagcttttccaaaagcagtcattcccgtctgaagaatcagaaattccgctcgctgtgaagcttctaaagtagacttagcagagatccaacacaggttttctattccaaacatctcttcttcaactactctagctatacgacacaaacaaggggatgaagtaagcgacagagatttttgtgatctataacgaaaaagagaaagtgttgacaagtttggctttgcaacttacgagcacatgcacggattattgagttcacataatctgactttctcgcaaaaactcttcctgaagtttcagagtaacgcatatttggttggcttctaatcgagtttatgtcagtctgcagagagaagcacatgatacaaaaaatggtcttagtaatgctataattcaaaataacacatgaaggaaactgcactcaagtttcttaataaacctcgctgattggacgatattgatctgggagataacaagcaagaacagcaacagctgcttctcggtaagccaatctcaacttcagttcctctggaacttcagtactatcttcttgtccagtctcaaatgtccctttttgctgtaaggagtggaatcagaatttgctaaagcagcacctaagcatggataaactggatatcaaacactagttacccgcttaagcgcctcaaggagttcttctcttccaatgtaatccaaatcttttctagctgtcaagattccagcttcatttctgtaaacaattaaccaaagatcagtgttttctgtttttttccctctgcatctaaatacatagttgaagctgtagcattgtatattacagaacgttttgcagttctgctccggtaaaatcttccgtgttctcagctacttcttgcagcaactcctccttctcatcctcagatcgaaagaatttatttctagcatgtacctttagttacaaacagaacttttcgttaaagcacaaagccaaccaaaactcgtcatatccagaaaagtaaaattaattacctttaatatcgccaatctaccatcttttgacggtaaaccaactcttatgattttgtcaaaacgaccttttctcaatagagcaggatcaaggatatctaatctatttgttgcacctatgactaatacctgacaaaatccatgattactagcaagtattgtttattgaaaaaaaactatatagcaaagggaaacattacttgtgatgtagtaactttaaatccatccatctcagtcaatatttgaagcaaaccttgttctctctctgctcctccctattcagtgagtaacacatttctaaagaaagttaaatctcttatactaaaatctaatttccggaacaagaaagcattgcattcttaccccgccaatatcgggtccacctcgcttacttccaattgcatcaatctcatcaatgaagattatagatggcgcatatgaccgagagctagcaaaaagatctttaacacgagatgcagccactcctacaaacatctgagagatttaaacaaaaacaggaaaactccattaactcaagaccttaaaaaaccaagatatttagcactgttattcatgttgacacaatcaatcactcacctcaacaaagtcggttccatttgccgcgaagaaaggtaaaccagcttctccagcaatagctttggctaacaaagttttccccgttccgggaggtccatgaagcagaacacctttcggacaataaatgcctttattctgaaattcctcatcattctttaaaattcgcacaatttcttgtaattccctctttatatactcctgacccgcaaaatcatcaaaagtaacaccagttttctcctctgctgatataaattttgcccttacagagagaaccaaacataaacttagatccaacaaacttgagcagaagaggtcaatatcaaaggaagtcgagcatttctaaacataccgactcttgcctagggaaccgagtgcttggcgcttgaggggctgccttatctttttggtaggggttccgagatcacaagggattagtttggcatagattggcctcgtgatactgtcgatccaaacataaagcgaaacaaagagggcaagtctcatagaccaaaccacaaaagtggcaactgtagtatagacttcagctggaaccacatctacattgaaaacctctacgtttactatctgctgatgcaacttcttccatacatcattccaaccatcaattggcattcggtccacaatgtgacgacggaaaattatctcctttttcgaatcttcttcttctcctaggggctccccatctttataataaggcaatatcactgcaacaacaacaaaacttaggcaaaagatttcaagaacaccatgtctagatttcaagcagttagatgcaatgtatcgaaactttttgaaacttctcacctgatatcgtctgtccgtaatttgaatattccatgtattgaacactgttggaatctaagagcttcataaaatcactaaaattgatacggtgagaggtttcaggatcccattctgttccttttaacttgccacgcatggttaacaatgttctactccaatctgatgccataacaagctgcctttctaattgtacattagcctttctctcgagctcttccatgttgctaagtcgttctctttcagtttctcgtaacttctacaaaaaccaaaagataaaacgaattaaagctttgaaaactccattaaacaaaatgaggaataagtatatcaattaagctacaaccaaaaaatgtttcaagtattgaatgcaaacataacctcttcaacagaaactacacaagtatacgatcaaagtccgaaactgagtatcacttattagcttgcaagttcttcactttgcattctagaaacgaaagccctagaattggataattctagctataatttgaaatagagataaacctcaaatagacgattggactcagcatcttcttcctgtgaaactgaagactcagtagactcaaagctcgatgtactgcaacaagtaatcaaaccatttcttcgtgaaggaaaaagattgaatttggagcttaatttagcttccgttggttttcttcgacggacgaaactagacagagaacctcgaaattgactggggaagagggtattagaagggtttaagggtttcgagaaatgggttggagttaacgagctcgagatataaaacgtcattgttcagtcattagattagagctgggaaaaatttcccctcgatttctaagtgcaaagagaaacgatagcaacaaactttctagaggtgaaatttgaagctggtgggttcttcacgaagattgaaaaagacgatcgaaacggtgcgtttttaacagtttctcaaacgcgccgttttaagagattaccggttctattgtaaccggacatcaccggttgactttcaaatgtgctaattatgaagataccgaaccggtgaagctctttctcaatccataaaggaaactctttcaatatgtatcattatatattctggttcattctctagtcaactaagagacatttgctctgtatgtatgatatagatgatgtgtacacaattgtaaaagacgtcgataaggttgaacatggatcatatgacaaaacctcttccatgctttggttgtggaatcggatggttccgtgttaaaagcaaaagaaaaggggactttttgtctcggtaattttgttttttgcttggtcatgcatcagtttcacaacatgttctctctattaattaggatgattccaaaagaatcaaaaacttatgacctttttgctaaactttcaaattggttaatggttaagaggaaagcattggttacgacttaggagttttaaacaaaacagggaaagcaaaatagatagatgcaaagtaatactcaaagatccgagttattatgcataccagatagaaaagacataaaaacaaccagaaacctttgaataaaagagtcaaatgcgatcttaggcagagccagaccgagtagaagaaggctacaaggatctttgcacgcagagaagttggagacccataaaaagcaacacaatcatttcaaactcgacccgttcagcagcttagcattcaacgctagctcagcgttccgtgcagctgataagcttgaccaaagccattttgtaggtacagctttaagtagctgttgtgatgcgttttgaggctgtgctaagaaaacagtgaaatttagacatctcataaggtgagcagccaattcgaactcactgtgacccgagaggtctcccacgatgagcatcaagttatctatttcaggattgccaattgcgcagcaaagaaagtctacaataatcttctcaagtctggcatctttatccccgagtggcctgagatgtctcccaggatcagcacaaattttgtttgggaaggtgatctgattgcccggcaaagaaattccactaaaatcttgctctgtctggtacgtctgtctcctgaaaccatattatcaactcaggatcaacaacaagatacatacctatatatatatgtaaaagatagagagagtgtgtgtaattgacctaaaggggagcacatcatcccgattccagcgtgtttcgtggccagagagtaatcaccaaaaccggtgatttcgcaccttccaagatactcaccattattcgcaagggccattctcatgttccgccaaacagcctcagcagtgagaccatcagggaccgggcaatcctcgacatcccaaaagaagactgtactatgccctcctcctaggttttaccatattacaaaactgattagatcgactaacttgctatgaaagatcgatcacatcaaattccaaactgcatcacaacagatctaacgctttcaaggacaaggagattacaatttccagagaaaacatatatatcttaccgctgaacttaggcatcgttttggatcggtcgagaaaactagatgcttgcttgctgaagattaaagagagaacaaggttggcgctaatcttcttctttttatgtttctcggtagcggtgtcaagtgggccacaaacctacgggcttggcccaataaatgggttgttgatgtctgcaaatcttagtaaaacggtaatattccgagtatgatgtctagggaagacaaatttcaaatccatgaacagaatctaatccaaataaatttagccatcttaaatcttaatcatactacgtatattgttcctaatatatgtaaatctccaaagacgtaaaaaaagataaggaacttaccggggtcaaaatattgtaatataaaaccgtatatttctctaaatacttagtcttttatataacatatcacatttaaacaaaatttccaattacagatttttaaatgatatttttatcatcatttaaattaaaaatatttggttaatttataaacataataaatgcgcatgaagaaaaagaaaaaaaaaatcaaaataattgaattatgggttatgaccaaggaataaataatactaaaaacataaaaagagatctaaaagaaggttcaaacttgaactaggtgggtcaagtcatagagatctcaaccaaatgagccaattgacttgaaagcttgcaaacaatttaatttatatattttaattgatgtcagttgacctttttctttcaacgtgggtttacttgtggttgcatcgtttcttgaatgtgacagaaaaggatcggtaaaccgttttaaaggacaaggacatatctcgtcaaaaagcttagagagtacctcacgatctctctcacttatactttccacattttgagagattcacattttcttagttatcctcgataacaacttactgcaatataggagaccaatcaaatcagcgcaaacaaaatagtataagattatgtttgtgtatgatttgtacaagacatcaagtaaacttatagattgtatagatcaagctgatgataatttttggcagatctgtgcctagggttacggatgccaaagacgatgtttttcaaaaaaaaaaatgaatcaaacataaatccaaaatttaacctacctaatattgataaataacaaatgtgtaattcaaaaaagttcacttgtgattatagattaaaaataataaaaaaaaatcaaaaaaaaaataactttaatcgtgaaatcgtcataaatatgatctttaaaaaaaaaagatgaatgagttaattatccttaaaaaattgatatcttagtctctaatttaaattcaacatattttttttttaaagccacttggctctattaaagtaaaagctctaagttttacatgagcttaatattactatacaaacaaaaattaaaaggttttaaatgttgagaatttttgagaaatgctttcttggtgtgtgttttttcttcaaaaatatttctttgagatgtgcattttcaaaataaccctttttagttaaatttgaaaaaaaatatataaagtctataaggtttttagaggtgaaatttggagctgtgcacttgaaacggtgcgtttacattaattggaaaaggaatcgcaccggtgatgcgataaccggacgttaccaatcgaatttccgataaaacagcaattttcgaaaccaaaccggttttgaacgagcaaaagcttgaaaacgccgcgttttaaacagtttctcgaagacgcattatcggttttattttaaccgaacaccaccactggttcactatcaaatactaattatgaagataccggtatctttggaacggtgtttttaaaatgttgttattaccggtgatgcgagaaccggacgttatcaaaaattccggtaaaacagcaatttcaaaaccggtttggttttgaacaagcaaaagctcgatgtccggaggaggaaagagaccgttgtagatctgtcttcttcatcgaagatggtgaaacacagaaactcatctcgctcgataatctcatattcttcttcaatagcaagattcttctctagaaaagctatttctctctacttgatcttcgtctttgcttttaccatctgggttctcgtcttcagctccagaaacattcaaaccgatgatgaccacaccaaacatcaacaacaacatcatcgggatctaatcgattcagaatcatttccgccaccgtatttgcctcctaggaaggtaaagttgttaatatttcatgggttgtggatttgaatgaagaaatgaggtgacttgatttggtttttgatcggaacaattgagaaagcataactttattgagcttcagaatttgcagaaaccgtatgaaaatactcaactttggactcctcctttcagctttgggttgcatccatgtgtcaaacctactccgaaatacaaaggtatgccaaagaagctcacttccaatttctgatggatctatcttgggttttgtttatgaattcagaactgtgcttttgattgatttcaagttcgtttcttgcagaattttcagaatcagatcattatataacagtgaaaagtaatggtggactaaatcaaatgcgtactggtgtaagtaaaaccatttaagttgttgttttcatgattctttttgtcttgcttagtaccaaagtgattcaataagcatgttattgtacagatagcagatatagtggctgttgcgcacatcatgaatgcaactttagtcattcctgagctggataagcgatcgttttggcaagattcaaggtattttgaaacttcaaacaaacaaaaaatgcagcttacttaattagtggttatgagatttatactatttctaacttacattttcgctatgtctcagtgttttttcagatatttttgacgaggaacaattcattaaatcattgcgaagagatgtcaaggttattaaaaagctcccaaaggaagtggaatctctacctagagcaaggaagcatttcacttcttggtctagtgttggatattatgaagaaatgactcacttgtggaaggagtacaaggtcggtcttaagcaacttcttttacattttgcatttgctgtttcattcaactgctgatagaataataacaatgcaggtcatccatgtcgcaaaatcagattctcgccttgcaaataatgacctgcctatcgacgttcaaagactgagatgtcgtgtactatatcgtggtctctgcttctctcctgcaattgaaagccttggacaggttgggacccttttcctgtcttgtacacaacatagataggctgtagtaacataaaattcatttcatacacataagatttcaagttaatgttctctttgggtaccgaatagctatatagaagtttcaaaaccatcgtttgggtcaacgagttttcattgtcaaatgatagaacttgcaataacatagtttatgcatttaagaggtgtgtaatgatagaataggagaatggatacatctttttctatcaaacatagtttatgcatttaagaggtgtcctatggggattcctgtagactgtgggttctgagcaatcatgacggtgacaccacagaagctggttgagagactcaagtcacgtgctgggagatatattgcattgcacctgagatatgagaaagatatgttggctttcactggttgcacctatggtctcactgatgctgaatccgaagaactgagagtaatgcggtaattgattactctctgcatctattcttaacaaagcaaacatgcaaaacgtcttcatgggataaaattacagtttcaagctcaatatgttatctgttggtcacagggaaagtacaagccattggaagatcaaaagtataaattcaacagagcagagagaggaaggcctttgtccattgactccaaaagaagtgggaatatttctgaaaggtctcggatattctcagtcaacagtcatatatattgcagcaggggaaatctatgggggtgatgatagactctctgagcttaagtcgcgcttcccaaatctggtttttaaggtctgttcaaccacctctaatctttcatgttactgacaatctaaagatgataaatgtttatgtttcatgtactggattttgtaggaaacgcttgctgggaacgaagagttaaaaggtttcactggccatgcgactaaaacggctgctcttgattacataatttctgttgagagtgatgtgtttgttccttcacattctggaaacatggcaagagcagttgaaggtcaccgcagatttctagggcatcgcaggactatcactcccgacaggttctatctccttccttctgttaccttaaaaaaaagcattaatcttttagtcattttgttataggccatgacaagtttggtgttgtatgcaggaaaggactagtgaaactcttcgttaagatggagagaggacagctaaaagaaggaccaaagttgtccaattttgtgaatcaaatgcataaagacaggtagcaaaagagtcatacgtttgcttcttaaacaataaacctataaaaaaaagcacatctttgatgcgagaagaggatttgtttgatcggttttgcagacaaggtgcaccgaggagaaggaaaggaccaacgcaggggatcaaaggacgtgcacggtttagaactgaagaagccttttatgagaatccatatccagagtgtatttgcagttcaaaggagcacaaagaaccctaactaaaattttccaaactttttttgttctgtatcattacatctcatttatagtcatcttaattatagttttcacatatcccttgatatcttttctgtttttgatatccggagatctctagccgaagtagaaagccagaaatttttaacatttagttataaaacttctctttcggcattttttcaaatattccaaattttaaccaaactgttgtcaatcagaatggaacaagaatgaaacaccaaagttactactgatcgttttaccatccagacaaaagattcctacagttacaagatctattgaacagagtgcgtgttaaattgttacagacaaaagtcatctaaggatatgcagattaaaagtagaccataaccataactatttgaagtgtaatgccctcttagctctgctctttgtaaggagtccatatcattttgctcacatccacatcaagaccacctcggcctgccgctttcaagtgtcggtccagtaccttaggatccgcgcagattacgtgttgtcctttcctgtattgtatcagttccaagctctgcagggtgcttaatatatcttctgctttaatcgctgtcatgtcgctcagctcctacatttaaaaaagttgaatatatgaattattctgttgacagataggctaaaaaggatcattacggatatatagatatacataccttgatagatatgtttcccttgtgctttttcaaaatgtctaataaaatccgagtccagtaacctctgtaactcactaaccctagatcagagagcggcctttccggtgtcccgactttgccctctttctttgagagttcataggctataacacaatataacgtgtaagctttatagagagaggtgagaacaaataagaagagttgaatgaaaaacaaaaactcacagaaggctattaagaatttgccatagcccttcctttgatatggaggaagtgtaaggatgcaagccaagttgtaagcttcttctgagtgtttttcctgtaccaacagaaattgcatttttttcatcagacaatcaaattgaaacagaacatgtatataacagacccaagagccaaagtgtgctgatacctttgaaaagtatccaaccatgtggcatccacgatcatcacattcacagagaatatagaacaggaacaaatcaacgtcatagtaaagagttttgtggtcaagaaataactttgccagataacagaggttctgtgcatagaccttattcttcttgccatccacctgtaagatattacaaataaactcccaggtcgtgaaaattcaattctaaatacatttattagcttccaaacaagtatcgtaagcctaaagcaaacagtttaaggatgaaaacatcaatctattacctcaaacattgacaaagtagagcttcgatagatttcatccccaggggggtgcttcaaatcgcatttcctctgcatagataaaagacgattgagcaaaacttaagtaaaaagaatgacccataaaaggtatgtgtgaaactaaaaataactgtaaagacaaaacaattaaaatgctacaaatgataaaaaaaacagttgctcaccatatgtctttgaagctgctctttgcgcttcataaaactgaggcaaaactcacagaaaaagagcttcacgcagtcattgtattctggaggaaaaggagagaagtaccacgtctcaatctcatacttcccaagctcaatcgtagctatgttcttcactttcgtgaactcctcgtgttcacgcaaactggcagcatccagctcttcatgaccctatacaaaatatcgaaaaacatcagaatatatagcatgccacacagttcactaaaaccacaacaaagtttaactaacttaaccaatcactttacctctacatgagtctcatcaatcttccgtttctggtgtcgtgtcatcttcaagctagtcacctattaccacaaacaaacttctatgtttcagtgcaaactacggagaggaaagctcaagactttgaagaaaaatggctaataccttgtcttcaactttttcatctaaagcacactctactgaatcaaggtcaagctgttcaagcttaatccattcatccaatcttctattaactgcagtttcacaagagttgtgatactcaaaacaacttgaattgcaaagccctctaattcaattcttcgaaatttcagctccaatctataaaccctagattcacaaatttcagatagagaaaggaggaaacgacatacactctgtgtaatgaacgtagtactcgtaatcattgtgaccaccattataattctttcggcgctcgataaccttcaccggatggtattttccgtctctccattgacacatcacgcgagtaccaacctcgagcggaagcacccccattcttctcttcttcgaagcatccgattctgaattcgtgagagcgagtatcgcaccagaagtatgattctgattcgcatctccgccgttggttgccggattattatggttcgacgccggtgtggcgattatcatcgccgtctctgtatccgcagacgatcccatttctttagtcgggtcggagattttttccgggtggattcttttctcatacggataaagaacatcatttggaaggagtgtggcccaataacaactttgaatgctcaattgggcctatctttataattggcctgtactatatgtctctcttaccgtcctttttttttgggtgcaaaaaatctcttaccgtcgttaatacacgttttataactgttggcttatgtttagttttataatcgccaggttacatttaaagaatgattagtaggagcaaacaatttataaaaactaaagagataatgagagataaataataagtgacagagtcagtattttgtcgtgaatgggaaacagccaaacaaggctttatgattcgtactaatcacaagattcacagatcaaaaaatcacaaagttccaagaagcaaagacgaaaaacacaactcatcatcgtgtccttgaagttatggtcatagattcgcacaccatgttcctctagattaaccaaaatgattttttatgaacaaaaaagattcacatggtcactttactgtatcttgtatgtgaaattttacatctcatttttcttaaagaatgttttacttttacatactatcaatttacttttatttttcggttatgaattgaagtggatgacttacttacttttgaaattcgaatgaagaaaaatagaattgattcctatttcagttgttcacatgtaaacacgttatatacttatatggcaacttgactaaagggaaaatttaaataaaatgatttaatttggtgacatatattcatctttctaatttttgtagctactacacaccgtgtatcctttttcataataatgatgtgaaattgtataattgtaagaaaaaatgagaaaagagtgacgaaatctttaaaacagacagaatttttttggttgagcaaacaaaacttagttatcaaattttggaaataacgtgttgaagtggctgattcttttacctacaatgattgattcatcgacaaatatcttgttcgtatatcatcaattctaaattcttcaaaaataaagtaaagatactcaaatgtaatgaaatgacgaagctggaaaaacgtattttaatttaattcattatttgaccaacaatttgcatcatgtgaatttaaatcttgataggtcaatattagtataaactaccacactacatgcgaaaatcattcctcatttagtgcaattacaaatgataaacggaaacgttatcatttgtatttattttgtaaaatatgtaattcaagaaactgctcagaatataaagacaagaatcctctttcttccatctctatctctccgtaaacagttgctcaaaaccttcttcctgaaatggcttcttctctcatcttcctcctcctcgttaccctaaccttttcagcatcaaccctaatctcagccaaatccaacacaacaacaataatcgaatcaacttgcaaaaccacaaactactacaaattctgcgtctcagctctcaaatccgacccaagaagtcccacagccgacacaaaaggtctcgcctccattatggtcggcgttggtatgacaaacgccacctccaccgcaaattacatcgctggaaacctatccgccaccgtaaaagacaccgttctcaaaaaggtcttacaagattgctccgagaagtatgctctcgccgctgattctctccggctgacgattcaagatcttgatgatgaagcttatgactatgcctccatgcatgtgttggcggcgcaggattatcctaatgtttgccggaatatttttaggcgggttaaagggttggcttatccggtggagattcgccggcgtgaagctagtctgagacgtatttgtggtgttgtctccgggattcttgatcgccttgttgaatgatttacatttgcattaactactttcgtaaaatctctatttaaattatcgtatttcatgaatttaatatgaccgttactttattactttcgtctttgctacaactttcaaattgccaagaagaacaatctttagagatcacctgaatatttggaatttaatatttctcaatcaattgactaatcataccaaaaattttaagtgacgaagatttgggggaaaaggcttcttaagaaatgggaagtactagagatatttgtatattcgttatatatctttaggtaactttttgctttatctgtatgcattatacgtgttatcgcttcagagatgttttacactttaaaaattgcgataaggttacaaaagtgtcatcttaaaagagaaaggtaacgtcgtctatatatttttttataacaattttaatgcagaatagttatcgacctcataaactagtactgcttttaagacgacgtcgactgctatgcgaatcaaaatcaaaagacgtatgactttttttaatatcattttaggtggaaacatttacataaattattgaaagtgaatgttcgtaggtcattgactagtctacagttttcgatatcagttcaaataatcgactcataattgaactaaaagcatcaaaataattaaaccatatacgaacactaataagaccggttttagaataaaccggactagtcggtggataaaatcgtcatttgacacggagactactatttcgcgcccaaatgatcccagaagacgcgcccagagtgacagtccttttagttattcttcttcccagtaatccacaaaccctagaaaattttctcaagaaaatccgaatcacgattctgggcattgtggaggattgacaaaaatgaagggaggtacgatacagataagttggcacgatgggaagccggtgctaaccgtagattttcacccgatttccggtttactcgccaccgccggagccgattacgatatcaaggtaatttaattctcaaatcaaaatcgatttgtatccattttcaggatctgagtttgatcaaatagtcactaattgtgtaattttggaatttgaatgtctgcgattgtttagaatttctaaaattcaaatgtttgaatttggttctcacgggttcatgaatttgaacatctgaaattgttttggttgtgattgttgactttgcattcactgttgactataaacaattgaaaattattcagctatggttgataaattcgggtcaagcggagaagaaggttcctagtgtatcttatcagagtagccttacttaccatggatgtgctgtcaataccattcgtttttctccatctggtatgcattagctttgtattatcagatatgttcttttagccgtaatcatgttaattcctgtggtgacgagtgttgttctatgattattttgcaggggaactacttgcctcgggagcagacggtatgcctcagaggcttagatgcaatgcaagtgtgttttgcatattttgaatgagtagtgaaaccaattgtgcagttttgtttttgttatgatgcaggaggtgagctttttatatggaagttgcatcctagtgaaaccaatcagtcctggaaagttcacaaatcattatcgtgagtcctttcatctaaataataagctacgctgactgggcttctaagagccacggttttttgtgtttgaatactgttgctctatcaagaagggagaatgataccttaggctaatttggtgaaatgagaatgaaagtttcaccaaaattgcaactgtgacccaatcgaatgtaggctaagagatatattttgacttttgtttgccctgctagatttcatcgaaaggatgtcctggatcttcagtggtctcctgatgatgcatatcttatttctggctcagtggacaactcttgcattatatgggacgttaacaaaggtgaaaaagtcaaagtgtagatagttttatttttttgttggctccagctttcctgcttctcacaattttgtatttgctaaaaggttctgtccatcagatactggatgcccattgtcattatgttcaaggtgttgcctgggatcccttagcaaagtatgtagcctctcttagttcagacagaacatgccgtatatatgccaataagcctcaaacaaagagtaaaggtgttgaaaaaatgaactatgtttgccagcatgttatcatgaaagcagatcagcaacggggtgatgaaactaaggttagagagaaaatagtttcttccagattcatcacggatacacagtattcctaatttcaaaatgacattttatgcagacaataaaaacccatctctttcatgatgagacattgccgtctttctttcgaagattgtcatggtcacctgatggatcttttttactcattccagcaggttactatcccttaaaaccattcttgtttttcagatagctgtgctagatcatccacattgtttactcgggcattattcatgtctctaacagtccctgttatcactgtgttgcatgtccaggttctttcaaggtttcacccacatccgaagctgtaaatgctacctatgtcttttctaggaaggacctttcaaggtaagataatcacctcaccatctcttgtttgaaagtcgtaaggctttgtggaacatattgtaatcatataagctcttctttaagctgagccaagtggccttaactggtcaagcttatgtatgagataattagaaatcagtacaaagtctcacactagctcaattcctttttccacaagcagacctgcactgcagcttcctggcgccagcaaaccggttgtagtggttcgtttttgccctgttgcatttaaactccgtggttcaagttctggtacatattatcttatctcacaccatttttttagtttcttttatgatagaaaagcaaggccttcatgacgttgatagttttcttaaatctgttacttttggtgatctcaaatggtgttttgaatcatgcagaagagggtttcttcaagcttccttaccgtcttgtctttgccattgcaactttaaactccgtgtacatatatgacacagagtgtgtcgctccaattgcagtcttagcaggtctccactatgctgcaataaccgatataacatggtgaaaagactatgcacattcttatagatcggaatggtttttctctaaattttcttagttttaattctaaccaatgatcttttggtttgttcaaaaggtcacctaatgcatcgtatctggcactgtcctcacaagatggctattgcacactagttgaatttgaagataaagaactaggagaagctgtctccatttcaggtttgctcttagtcctttcactcttgaaccttccagaacccgattgacccatcaatccaactacagttggaaagaaacctgttgatggtgaggagaaaaagcatgatttagagaaaggcgatgaactaatgacagaaacaacaccagacgagagcaagaaacaagctgaattagaacaaaacgaagagagcaaacagccattgccaagcaaaattaccacggatggtaaggaaaaagagcatattatgcagaaaaccgatgatgaagtaatgacagaaacaagacatgaggaagagaatcagccattacagagcaaagttaacacaccggtctcaaataaaccagcaaggaaacgcatcacacccatggctattgacccctgatgtcgtcattttccatcagtgttttttttttaactctgatacaaatagctttctcataggctacatttagacatcaaaatgaatcgtattgacggccatgttggaaatggacttgtttctttagtcatacgtctcgtctctaaaggcaatgtacatatagacacatgtatgaacgttcacatgagatggttttgcgtacattgtggatcattattgggctcgtattaatacataagttagttagcttggcatcaatgtctttaaggcccaaatttcatatatagctaaatgcaacaatgtcaagggatgttgtgttgatctttaacggcccgtttaattaattgtagaataacaataatagaccagtaaaagaaaacataattttaccctaaatttaattttctaaaccctttcttccataacagccgtaaaaaaggttaaaaaataaatcaaaaacccagaaaaaccaaactctctcatcgtctcaaatggctatggctctcaatctctgaatttgatcctctgtctctttctctcaatcagatttcaataattcttacaagttcaaattttcatttttcccagtttcaattaaatttgtataaacaattcccacctatacacacaaacatatacagaaaatatcttctctctccctccaatggattctccgacactaccgcactctatctccgcctcttcctccaccccattcgcttccgccgccgtaaaacctcaccggaataaactcctttcccgtaatggcatcctcatcatcatcgccgcgtcctgtattctcctcctcctcatatctctcctcatctacgccaccgtctcaaaatcctcccgcaaccaccataatccatcgcaccaaaccccaacctccgacgatcatcctccgccggaaacacctccttctcctccaccaatcgctcagatccgtctcgcatgcaacgcaacgcgtttcccagatcattgcgttgcctcgctctctaaacccggtcaagtccctccggatcctaaaccggttcaaataatccactctgcaatttcagtctcctacgagaatctcaaatccggccaatcgaaaatccaatcaatcctagactcctccgcagggaatcgaaaccgtacgaacatcgccaccatttgcctcgagatcctctcttactctcaacaccgtaccgaatcaacagacatagccgtgacgagcggcgatatcaaagacgcacgtgcgtggatgagcgcagctctagcttaccaattcgattgctggtcaggtctcaaaaccgtcaacgacactaagcaagtcgtcgacacgattacgttcttcgaaggtctcgtgaacctcaccggaaacgcgttgagcatgatgttatcgttcgacagtttcggagacgacgtcgtttcgtggattcgtccagcgacggaaagagacgggttttgggagaaagctgggccgagtttgggctcgggtacgggtacagaggctagtttgggttttccgtctggtttaacggaagacgtgacggtgtgtaaaaacggagggaaagattgtaaatacaaaacagtgcaagaagccgttgattccgcgccggatacaaacagaactgtaaagtttgtgatacgtattagagaaggtgtgtatgaagaaaccgttagggttccgtttgagaaaaagaatgtcgtcttcatcggtgacggaatgggtaaaacggtaattacagggtcgttgaatgttggacaaccagggatgacaacgtttgaatctgcaactgtcggtgagtttttttcaacctcgttaaacctttctttaattaagttcttatttttctcgtcagtttattaatttaattaaggaacataaataagaagaataacattaaagtcaaaacataaatttgtcttgtttcttttactgtgtctagatttgctctgccacgtaaaaagaataatatttattgttatttagttttgagattcaagttatgtatgtctatagaattattatgagactgtccctggttccactagggacagaaaccatgtgacatttacttgggaagatatatacataggattttgttttataaacatagaatataaaagttgctaaatttgattaaagatatggacaaagttccaagattttttgtttcttaatcttaaaatgttttatgttattacttggttttggttttggtaggagttctcggtgatggatttatggctcgtgatttaactatagagaacacggcaggagcagatgcgcaccaagcggttgcgtttagatcagacagtgatttttcggtacttgaaaactgcgagtttcttgggaaccaagacactctttatgctcactctctccgtcagttctacaaacaatgtcgaatccaaggcaacgtagacttcatctttggtaactcagctgccgtattccaagattgtgatatcctaatcgcttcaaaacactccaaactcgagcaaggcggtgcaaacaacgcgatcacagcacacgggaggattgatgcgtcgcagtccacgggatttgtgtttttgaactgttcgattaacggaacagaggaatacatgaaggagtttcaagctaaccctgaagggcataagaacttcttgggaagaccgtggaaggagttttcgaggacggtttttgtaaactgtaatcttgagtctttgattagtcctgatggatggatgccttggaacggggatttcgcattgaagactttgtattacggtgagtataagaatacgggtccgggatcggttagatcgagtagggttccatggagtagtgagataccagagaagcatgttgatgtttactctgttgccaattttattcaggctgatgagtgggcttccacgactgcttgatttttgtaaaggaaacatgaggttttaggattttgaaaagaagagaagagaagtcgtcattgtaactttattgtagtgtcaaatattagtgtggtttctttatcgctcattggggattcataatagattaataattgaagataatcatcaatcaaaaagttataatcttttgggtgatggaagaaaccacataaatcatatcataccaaaaaggaatgaaactttaaactttaaagtattatcaaacttttcgagtggttgaagaaaaatgagagaagatgataccaaaaaactttttaagaaaatgggtaaaaatgctttgatgcttcaaggaaactacatttaaactgttttaaacacattgtgaatgacagtgatgaataaggtgccagacatacaaagctatgggttgaaggagaaacaacatgggcaaggggaaaaaaaacatgatcttctggtgtgagagagcgagagagatcttcttctatttataggtcagaatcagaagttttttcctcctttggtggagcatactgcctggtgagacgggatctagcccatggatcaagtggcactcgaggtggaggttgaggagtagctggttttgattgccttagctcgttctctctatcgataaacctgcaccaataagagtcatacaaaaccagttagctcactttggaaaacttcctaaactaagatcaagtaccggtatctcgagatacacaaatactaggcttatatgtgaattcacaagtcttgaagtttgatcttaaaatatagcatcatccattttgttgtaactgtgactaaactaaactcgaattcaatatgcttctgttaaaaagaataaagaaaagaaacttgttttactcgatataggccattggggcagcatcaccaacacgaatgcgagtacgaagcattcttgtgtatccaccagctctatctctgttaacacatacgtaacatccagctggtaaaacagagtgcataggaaaagatcccaaaaaaaaaaggaaaaaacgagatacgagaattcacttgtatcgatgagccaattctgtaaaaatcttgtgaagtacatcatctcctctaacaaacccagcagctcttcttgctgcagctagtgaaccctgtaataaaatcatttcctcatctaaaccaaaattatataaaactagttactccggagaaacaataactattcgtgagcttataaaccaagatttgtgaacacttgagcacaatcacagttccagtaaaccaaatatggtgtttgaatatacaaaagagtctacagagttgctaattttttcttaaatggaaaaaaatgaatagagtacctcttttccgagttgaatcatattatcagcaagacgacgaacttctttagcctgcataatccaatgtaggtaacatttttagattctcaacagatgcctataaaccctagcttaaaccccagatcagagaaaccaaaattgaggaaaataggaattagtacctttgtaacagtggtctcaattcgctcgtgttgcaccaattgagaaaccatagtcctaatcagaattgaattggggaaaaaagacacttcataaatcaatcgagagaaaatttatggatcaatgagaaagtttctaccaagacaaaaagaagaagaaacctgagcatggacatacggtgacctgctgggcggccgagcttcctgaacttggtcatttctccgtcggcgattcgatcggagaatgcgattcggaagatgaagaagaaataaacttacaaaggtgaacgataaacccagctcaatgggccggatcttttcgtttttagcccaatcaaatgaaagcgcttgtgtcatttgtagcccaataaaaaaataagccgtttgtgtcatagaaaaaaattgtttttgaatattagaatgaaatttaggatttaagatgattcataatttcatataatgtttctatcggctactttttagtctttgtactttatacttaagaatcaaaataacaattgaaatacctaacttttcagctgaccaaaaccaaagactattgttataaaaataaaacactagatcccaattttcatattttgtgggcggtttgtcgactcttctcattcgcattctttgtcaaaggcctcaaagttggactcgtttgagagtttaataatctaatgtgttagtatgtatcttctaacaatcatataagataatagcaacacttgagaatccaaaaacacaaaaggtcagttcgatgtatatagtcaatcatctaaaaagcaatatagcttctaaatggttccctacagtatatagtttcttttgtttattcaacaaagatgatctggaaccagctcattatgggttttctgaccctcccacactttattcttatatacttttaaattaattagtatcatacaataaataatcaaacacacatattcttcgaagacaagagttagctgatcggttcaaatttagttagtgattgtagctagaacagtttttaattaactgttagggagtgatcacgaacagaagattattagaggctaagatgttatatggacttttgacacagaaataacaccacaagatgagggaaaagataaagatgattatgacttatataggcttatgtctatgtcgtctatgatgtattcgaatcttctaaagacatattgaaaaatcacatgtaacatcgttacaaattgtgggtcgatcggaactatatgacgtattcatctttttgacaattctggacctgtttaccaacagaatatattcaaaattcgtatttagaaaaaagcaatttcatatcaatgatacgaaacaatatgattggaaattcaagaacatcattaattgattttactttacattaataagagaataatagactacacattcaatgagcaatgaattgaatcttcttttttagtttatattcactattcaaaaatttcattttagttttacaattgttcttacctctttcccaagaaacaaatcctaaaaacgaaccctagtaagtagtaaaagaattgatttaaaacggcatgatatgtgtcgttttggtgtcgtaagccgaaaggcaagatcttgaattcaccttgaagaccttaagaagatccgttaacatacgtctaacggcgggagagcaattgctctgtaacagtaacagaattttcgtaactccgttaacacttgtaacagcttccaaagctttatcttctttgaatagataagaaacactccacagcaccgtcacggcgtgctccgtcgccgccgttgacactttcatcagcttcttaaccaccgtcttcaaacactcgccatctccgccgcaaatttccgatctcccttcctttgtagatgctaaaatctccagaagcttcaagcatttctccgtcaccgaaacgctcaacgacgacgttgaatctgataacagtttcgtaacatctccgatgagtttctctcggaggagattgagtttcacacgtttcggtgagctaatcgcgatcaagcacgataaactcgattcgattaaacttaaatcagaatctttactaatcgatttcattagctccgtgattaatccatctctctcggcgattaacagctttgattcagcgtcgacggcgatgaactcaagtaaaccggcgcaatcaattttcaattcgacattcccggttttaaacaagtagacgatcaccgataaccgatctcgaccgttggttaaaatcagattcgaaaaccgtctccgatctgagactttgcttcgaatcgtactcagaatcttcaccgcttcttgaacaaccagagatttcgcggcggaggtggtttcgaaatccacctgattaatcagatccacgagaagtttcacgaaatcatcttttccggcgagaaatcctctgttatcatcagattctctcccgaatcgaacaatcttcgacaaaacctcgcgatcatctctttcttctttctcgatcttcactctatcgatcgcatcggcgatctcgtctctcgtcggagcagctaattccgccgattcaacacaagttcgacgacgaacagaatcagaccaaatctcgataagacgttgaagagtccgattcggtatgaaatctttattctgaagaatctgcatcgtcgccggacaagtgttattcccgccgtcaagccaccgttggatactagctcgatcgtaggtaacgccggtgcaaagactcaccggagatttcataacgtcgagagatataggacatcggaagaaggtaggaacagtgatgcagagatcatctttcctcattgctttggccgttgcttttttgttttccgattagctccaaaataaataaaagcgtgtgtgtgggagagagagagaagagagagagtttgtctatggttttagtgcgtggggtttggtttaaaagatgaaagagaaaaagagtcaaactttggtgacgtcaaatttcacttttttgacgagaatttttgtgtttaaatatctttaaatactattttaatgactaaatcgaataaaactttttcttttaacataaatcgaataactttttttttctcttctctttatgctattataaaataactctactacaaaattagaataatatttcagcacactccaaagttgaaaaactatatattcttatttaaacgtaaaaataaaatctgatatattaaaatctattttattttaggtcgtttggtcaaagaagaagtcttctttcggcgtgttaatattagagattttcagtagagtatatcacaaccgttgattttgattttttaaggtctaacgtgttggaaatggacggtgaggatttgcggaaagtggatgcagatataagaggagagtggggtccacgctccaccgtttgagattttgggtccacttaaacgtcttaagaacgcaccgagtttcgggttgaggtgtgaaattgcacgtttgagatttgaagtggaaatttgggaacttttttattattttttgacgaccctttaatttagtatttttataatatgtcctgattatcttatttcttagttttccgtccttgtttttcaaaatttgtaacgcgttgttcaattaatcgaattagcttcaaatattgcaaaagattgacttctattctgttaattattaattaaaattatatttaacgatttacccatatgatgtatacttctgtaaattttataaaatgtaggcacaaatcaataatatctataacaaatggaaaagatattacgtagaaaaggaaaaaagaagaataaatgaacaaaattgttcaattgaccggacagattctatgggctgcaattgcatcttttgttgctcctccacttctgtttgttttatgtccgcaactagcaacacatgacgtgacacttgttttcttcttccacgcttattttagatttgtctacttatgttcattacaagttcaccctctcaagtttataaccttccgctaattttaccttttaaaattaagtaccattagattttgacccgcggtataccgcggagttagttttttaataaaattagttatataaaatgtatatgtagatatttattttgttaatattgtttgttttgtttagtgtttaagataatgtatatatagattttaattgttatatctaggatttcacccgtattatatcgtttcgtattactatcgatccaaacccatcatactatctaatcctgcacagtgaaattaaacatatctaatagatttcacttgtggtataccgtctcgtaatactatcgaccaaacccgtcctaccactaactccgttcagtaaaattatatattattttgttatttttgttttaatatactttaattttaaaagtatttaattcaaatcaatttaaaagttttctttcaaatggttatttaattgttgtaaaatttatatattataatattataaacacgtcctaccatctagtcctactatctaatcatgttcagtaaaattaatttttattttttttaataatatttttattaaaagatttataatttaaatcaatttaaagttttctttcaaaataattatttaatttttaaatatttttaaccattttggcaaaaataattagggcatagaataagagcatattcctttaaataagatttgctttgattttgtagttaatttttgcattgaataaggcagtggcaaccattgtaaataagttccaactctacgatttatttcataaaatggctgcaaaaatgtatatgtaaataatttttaactgaacctaatttctatcttttataatcatttattcctctatgaatcacttattcaactaacacgctataagacttgccaataacaagtctaaccccaactcttgtttcatgcaactagttctaagtcaaagtcaaacaatgatcatatcaaacatatacagcgtgcaatgaacttgaatagtgatttaggcaattagcattataattaggagattttcttttttttatatataaataatgaataaactaattacttgcacgtgagaggttctacgtattgtggttgattcaaagtttcaaacacttatgtcccgcacgtttaagtttctatgtttggtctacatgaatgctaaacagaccaaaatatgaaaccatggaagtttagaaaaattgaaattctaactattggatttgccacacgtttactctctcacgaatattgtattctcatctactgctctcaaatatttgcgggaaactaattgcaacgttcaaatttgagtgatggatcgtgacgctttagttagtcaaagtcaacggttatgatgatattatgtagttttctacttttcttccctataagaaattagtaaaacgtatgataaaatctgaaggttaattaaacaactagccaaaataagatttaagtatatagatgtgaatgatgtttttagcaaatgattttgctataaaaaaatatcatactattattaattaacgtttgatatgctatgtttttgattttttggccacttatgtatcgtgaaataaaagattgtttaaaaaaaaaaaaaactttgggataacagaaagaataaacaatatctggaagtggaattgacgggctttagtacatttttctatgggcctattagcctaagatttagtcattcaaggcccatttaatttgttgcttccttgaccgttagaaaaacatctatcattctattgtgcaccacatgagaaagtaattcaatagtgtaaattcttcggtaaaatcttcgggtagaccaatagtaatctacgctattttgcagcttctcattttttcagaagccagagagtaaacatcatgccgtttttactttcttgatgacacaaacctgacgtctaaatcgccatcttattgtggtccttctcaggggcggaggtagcatagtagcatgggggtcagttgatcccggtggatttttaaaatttaactaatactatgacatatttaaacaagtacataaatatttaatgaaaattctataagttgaccctaatgcctattgtcgaaactatttttttgactccttaaactataaaattttgaatattataaaataatataggctataaccacttacaattatatatcagttttattatttttttattttgtgaccaatgttttcatgtacttcagtataatattactttttctttaattattatgaatctatataattacttgtattcatcgaccacatttacttttatctttttttcccatttataatggtatttttttttaagtatatcaactatcatgttttatacaaaccaataaaaattcaaaagtatgataatattttcttgtaaatttgatagaaaacacataacctatatgcaatataattcgaaaaacaaaacaattacatatattttattaaaataatttctatatttcgaccccggtaaaataatttctatatttcgactccgccactggtccttcttgcgattagatttgacgttttaagtttgtgagatgaccgacgagacgcgaaagcatagcacgtgtgcgatcagtgttctactgtgatggtcaaagtcaaacccaatattttctaaccaaagcgtatttattgttttgttgaaactaaactgctatgtctccgacaaaaaatgggcaaattttacccataaatagttttcttttacgattaagtaaatgtacatgtttagtaaaaaattggacatgtaaatgatgtggatgcaccgaaactaattaaaagttttagatgattgaaatataaattctgagcatataattatttatgaaaaagttaacattaattcatcggaaaatcaaaatgtagctaacgaacttgttagctcaccacatcatcagtgtcttcactctccacctacaaattaaatttatgaattcaatcattactttattatatttctgtaacgcatgacccaatttattttactcaaaccaaaaggaccaaaaatataaatctttctacttaatggcgttgaaatgttttgaaaaactaatttctcggcgaaacaagagaaatcacaatataatgtctggagtaatctatacatgcaagtataataggaaatatggatgaggctttttgtatgccagcctcggacacggtacttggtgcgacatatcatgtgaatgctcgaatcactttcaatgaatattcattgatgactcacgattcatgagttgtgaccgtgactcgtgactcgactcatgagacatgcctcgcaccacctttaccccgaccgttccgtacactatatacgcgtatttaagtacgtaacgttgatttcttcacaggtatatgtattcttatcacatgtataaacacgatcgatcgcacgtgtgcatattttttagttattacttgttgtgcgttcaagtagttttatttttttctataagtaacatttgtgggttcacatagttgcagcgcaatgaggaattaaaaatataattttgaagatttattaaaatttggtttactatttaacgttgtttgggatttagttaatgatttactgagttgtggttttttagagaacatgaaggcgaatggatatctagtgtaaaaaagtttaactatttatttactattacgtacaaacaacattggtttaaagacggaactcgctattcacaaagtattttctcttcttgtctgcatcacatactacatttaaattcacctttgaattcatgaaacaaaactttgtgtgaatggtgatgcgtcttgtgttttattacattcatcacaaaacaaatgtcggttgatttcttactaatgatgtgatcagaaagcacacccaattaccattagtatattgtttagtatatatttatgatactacattatattaatcaatggtccataactatacttcactagaaacctgtacaaccaatctagggattagctagaattgtcagtcagtttcgtgttggcctaaaataaaataattttgaaacactatttcaaataaaagaatgaaataataatggagaagtacggttgctagatttgtaatagggtagctaagacgtagtcagtgtttgaaatagtagagaaaggtatgggacttagaccaactttagatttcaactgttgttcctgacattaccaagactcttctattttagtttactttctgttcgtgtacttcttctcataatattgggacaataagagtcattttactccatactcattgaaatgtttttaatttaatttccataaaagataactattacaaggtatcaggtctaataatcatttattctgacctttgtcatgtacgttaaccaagaaataaaattttgaaagcaaattttaattaatttgtaactcaatagatcacatactatttggtctgttgtatatatgtccattaatcttttgtaatttgtatgccaagtagacttatggctctgaatttcatttattagatttccttttacaaaagtggatgaaaaatggtaaaaccgtataagtgttgggaagaggttgcattgaatgaagaactctaattaactctaatggaaaaagcttagataagagattgaaatggcaagaacggtgattgatatatggactgtgtgcatacgtgtgtctacacaaaatatggtaacatatatgcatttgaagtagcttaaattgaggaagatttcgcaataaagattgaatagtcgcaatgttgtgacataattataatcggtcactatatttagactggggcctgtcatattttctcctaacaaaaaaactataaaattatataaagttttgagtcttgacataacatagaaaaggctttaccttaccatatcactttgtattaatattttctctttgcccactttctccgttctttcttattcattgaacataggtgacatgaaaccttgcatccaaggcatttgaagaaacaaacgaatctatctttatttgttatataatctttttatttcctttgtttttgtcaatattatagaaaattattatataccagaggttatagtcaactaattaattggatttttattttttgtaatgttaaacttatccaccagaaagattatatgtgtaatgtaataactggactattttgtaaaatcatattttaaaattataaaacctcaaaccttactgaaaacaggtgatttcaaaatttcatgcaagtaaatgttgaactttccaattttataaatagtcttgttaagcaagagttttacgataatccctcccaaagcactatagctttaaaattactatgttagttgtgtcgaaaatacaaagcaaaagagaataattctatgcaactgttgacaagagaaaaacacattattgcgccgtacaaacgtcttgtctccatttccataagataatttgttttgaaatatataaatcttaagcgagctatcgactatcgttagtgtttttgatgaatatgatgaaaactaatgggatgttttcattactctaataactttcgcataaaagtgaaagacaacgaatatggaggatatcaaaagtttctggtttaattttctcggcatttcattaaaactttccatacctttcagtaaacaaatcttcgttccctataatttttcagatcatatgtgggtcaagtaaaaaacactccccctttaacctaaaccacttaatgacaataagtctacaaccattttgtgtgcttagttaccataaattttgccttaataatttaagaactgtaaatatttgtgccctgcaacattttttcaataaacctaaactatcaacaattataagtctaaaaaaatctaccaccaaacagtttcttcggcttgtagaccaaaaccagttgtcaacaagtctacaactacttgcatagttgaatagttcgtgaaaaaataaagagaaagtatatatcagaagtaattaaatacacacgaaaacataactcaaaaacctcttcttagtcagattctctctctatctatctctctcaatctccatctgcccatatttcttgctgtcaacaaattcattcagcaatctcctttttccccatcaacaacaaacaaaaaataaagtcctttcacaacaattatatttagaacaaattcaccaaaaacccttccacaaaaaacctctcttcttcaacaatgtcgtctcgaaaccaaagatcaagaatcacctctagtttcttcgtctccttcttcactagaaccattcttcttcttctcattcttcttcttggtttctgcaatggagcaagaacaaacacgaacgtcttcaactcgaaaccacacaagaagcacaacgacgccgtttcttcttcaactaaacagttcttggggttcttgccacgtcacttccctgttccagcttctggtccctccagaaaacacaatgatattggtttacttagttggcatcgatcttctccgtgagaaaaagcttgaaaggtcttgaattttattttctttctttcttttaattagttatatgtttctttcattccggttcctctcttttaccctttgcttttgagttttaagttggtgtaaatgttttttattttatttttttttggtaatgccaagaaaatggttatttttgtttgattaatgtcgacaaggctaaacatatgatttattattatgaaattgtaattggaagttgtattattttttggatagctcgaatttgtaatattgcacgtatcaaagtgtgtgagccgatcatcctcatgatatacacgtgttcttgttattataataataatttaactatctgaaaaagtttatgattagttcgaaaattgactttgaatattatatcacaaggactaatttgtatgtgtgtttgtaaaagaatagatcaaatctttaaactttaaagaggtttgaaatatatggtgtaactaaaaagtctgatgtagaatggtcttgagatttataatcgacttttttcttgggatctatcgatttgttttaatgataaccaataatgtctttgaaatgtctattgtgatttgtcaatgtgatggaccaaggttgcatctaattctatagccatttaatttattttgacattaaacgtgacatttatgccggaaggtgatcatcaataggtacataagatcagaaaggtgtgatcaatagaagaagataaacagaaacatttttaaaatatagtgtatgatattgaactgcacttgattttaaacaaatacgtaatgatcatttttaaagacaaataaaccgatctaattacatatttatttgataataaaataccaatcgagtactctttttttttcgtagttatttaatataatcaatgctataattaacagtacagtactcatcattacatgtttgttaagagtaatgagttctgaaacctcgaaatctatcttcttcttctttaatcacgttcggttgttcaaattcagacaatcatagccccttttcgataaattaggtaaatttcgcacatcgttttggtaaaataacactgcaaaaaagggacataatctcataacctatatatttgcagttgcagattttagcatctttagtcaaaaaaagcaaagttaccattgaactcattaacattaacaacgcctcaaccaaaccggataataatgaattcaaatctaacgtgattgttctctggttttctcaaccttctacaagaacaggccttgatcccaaacaacaagtctgaaaatggttgaataacttgttgtggccaactacagataaagtaaaacgagaaagaccttatttgtcaaattaaaatccgacattctcaattttctagtggtgaacattgaccaagaaacaacacaaacaacttaaacagaaacatcaaacgttaaatggcagcccaaaattatgattcaacaggagattcaactttggtctcctcagctgcaaagaagggaatgggttttttcggagctggaagacgtccaatgctatcaaccttatcttgttgtttaggaggtggtcgcgctgcttttggcaataaccttcctttcttctcaaaccattccggtttaagcaatgcccttaagcccaacttgttgtaatacactcttctcactgatcctcctgctgcttccaccacctctttggccctaaccgtcactctcgaaacctgtaataaacacgctcataccgatcaactgaacatctaactaagcaaatacattgactggtgcaacggctctagagactacagagcaaaagttaataacgcaaatgataaacctcgaaatgaagtggccatttgatatcatcagcaccacgacccattagtcttactccatcttctatttgctttcctatggctcccacatcctgcaaaccgacgttaatgtgttcagtaagaatcagacatattaagaatcctaaactcaatttaaaccgttgaatcaaagagtgaagtatgaccgaaccttgagcgttttcattgtaatcaattcatgagaatctatcttcccagcgtttatgagtttagcaatcttccctagaccaaccggctgcatcacaaaacaatcataaacatctttagtcgctgcatcaatagagtgtcaaatcctaaatccttacacacacagtataacctacttcaccacaagcagctaaagaacagcaataatggcatacagaaagaagaacaagagtgatccatctgatttagattctcaaattcgacctaatctaaggaatcaatcacaaatgttaacccttcgaatcaagggaagctacaaaatccgaaacttgacctcagaaatgaaaatcccagaactaaaaggcacaagcttgaacctgaaaatggagcttaaatttgttcttgaagccacgtttgggtaaacgacgtcgtagtggagtctgaccaccttcgaaaccaaacttcatcgttcctctcgctttttgccccttgtgacctcttccagcagttttacctttaccagacccaatacctcttcctttcctcgtcttgagttttctcggcacattgtctctcagatcgttcaagctcaataaactataagccctgattccttgaaacgacaaagccctgctcgtagaggtcggaatttgagtagagatcggagaaggacggcattgaagaagtggtgaagaaatgatgaatctgggtttcgcggtttgatgaaacgaagaattgatgagtgatgttgatatgatcgacaagagtcttcttcttaacatttcttcgttgcgggatcaagtagatttcgattttagagatctcctgatgaaattttgattattccattttggggatttagggtttatgagatttcagtgaagagctactgaatcatccatcaccattgctttcttcttcagtactgtcacttaaaggcccattatggcccaaatgtcttttccacccgccaattcactaaactatgtcgttttgagtgaacttcaaaataaaataaaacagagaaataaattgggaagggttttaggtcatcgccgaattgctatttctccggtaacgattctctctcttttccgccgccgacgaagccatctttctttctctttagctttctcgttccgatttgcatccagtttcttgatttttctaactaatttatgtcttttgaagagatttataattgcgattttgacagagtttgagtttgttcaaaagctttgtttattatatatgttaaagctctcgctatatttaacacttgttttctcgattttgcaggttttgtgaaatcgcgagagctgatttgagcagagatggatttcgatttcaaagtttccggagatttcatagtcagtggcgcagagcagctagatgacactgatttgacgcgttctgatgagttttggcttatccaagcccctttaggccaagtatgtttagagaatgattctttattgcaaatttgatcctcatgtaatgttctacagctaaatgacttttctttatcgcagtttccagaaatcgaagagaacactcttaagattgagccagacaaagatgggttatttggagaattcaaggattcaaatggtatgtttatgttttgtgttctttcatactctttaatattttagttttgatctccaaaagctggctcattacacctttgtttaggtgcaaagtatgatcttgctagctttcattctcaagatgctggtgcagagttgattataccttctgaagaatcaatgattggtatattcccattactttacagttgtgtcttgtttaggttttggtcgttcagtttacacagttttgttttaccacctgtttcgttaataatgattcttctgttgttgttcgttttatgatagttgggaagattactcggcgagttgcattagttcgttaccctgaaccaaacgagttgcttcagaaaatgaaggctagaacacaacagaagcttgtcggatcagtgacgaattcctctaagaaatcatctaaccttactcaaagcagccggcataaaagcggcacacgtagcagcagagagaagagcatgttctctggcttcaccgagactccaaagtcgccaaaaagaaaaaattcagagtcttcctcaggtaaacatcggagctcaacaagtacggtttcaggctcttcagaacgatcagcaaagtccaagaagaaggtgaagaaggaagagtaaagatctttgctcctgtttttttcaaagagaatgtttgtgactgttaagatgttgaatttcgattatgcagatgataaacagccagtaatgtattcaaattcataagttatttcgccgtagatgcttataaaagttcaagcttattagctaccatggaacaaagtaaaagtaaaatacagcttttcagctatgtttgttgttcttttgtcttcaagcctctgtggttggagttgttgcagagtcttgtgatattggcttccattgttgcggagtttgagctttcgttatcgagagagcatggatttctttcatctcttcttcaagagcagcgttcacaatacggtgcctctcgagcaatctcttcccctcaaactgttccgagataatctcaaccacaaaactcgcgccacagctgggaaaaaagggtaaagtttaaattgaaaactggagatgagatgtcaaaggtcgatgattgaataaatggtatagtgatcataagactttaccctccagatgtgtcgatgacttcctggttttacacatgaattaaaccaagtcagtgatgttgttataaagaaataagatcacttatgcccaaaccacataagtgagtagtcatgttaatatgggctaacccaccccaattaaacccaccccatttaaagtgacaatatcatttccatagccatttgctttatatcctcatcatcacaagtgacgtacttcttcaatagtaattcaatcctccatacttgggtgaagtatacattcgatgtcggatacttggaacctgaaatataagtagtgattacactaaatggcttcaacaagtcacaaatcttttcaccacgatcccactcatcatctgatggtaaagacttataattggtgtcaaaagccttcatgctatcaaatgcttttctaaacttcaatgctctagcgagcatttcatatgtagagttctatctggttggaacatcaagagataaccctgccccactccttattcccactctctctacacaggctgcaaatgcctctttcctctgtggagatgctttaacatataaaacactttctcgaatgttgtgtaaaacatccttagctaactctaaacctttcttgacaatgatgttaagaatatgagcacaacatctaatgtgcagaaatttcccatcacataacaaaccactgccactaatcatctgaagctgacccttgaggattttcaccatactattattattggtagcattgtctagagtcatagaaagtacctttttttctagtccccattcctttaaacaatcaagaatcctattagcaatatgttcaccagtgtgcggagacttcaactcacaaaaatctagaatataactgtgtaaatgccaaccttcatcgataaaatgcccagttacacaaatataactcgtcatactagccttagctgaccacaagtccgaagtaaaagaaactctaccacgatgctttgcaaaaagctcttttaacttttctttttctacttcatatctcacaaaaacatcagcagcagcagtttgcctacaaataggctgataatccggatttaaatatttgtctctcgctcggactttctcatattctacgtatcgaaacggtaaatcatgatagataatgacttcactaaccatctcacgatctatcttctgatcatataccggcctatctatcttcttaggcatcttaggacacttctctaaatggcgacttaagtgatttgttccataatttccatgtggtctactactagtacatatcaccaactttgtaccacaatgtatgcacttagctctttctttttcatcactctctaaccctactgaaatgaaatcatcccaaacatttgaagttttgcgtctcttacgtggagtttgttgagtttgagtcggctgaatttgtgtttcactttgctccggtgcttgcacttctgcatcttcctcattcatgtctattaagtcattttgtgcattgagaaatgcaattgtttgtagagactctaaatccattctgaaaaaaagagaaacaaaagcactaacgttagtttacaaaactaagactcaagactcaaaaaacacgaacctgtttctatcaagaaaccactttactttagttttcaattcatataaaacacttaaacacaacaaacctgtttctatcaagaaaccaaacaaacaaaaccaataaagaacattttgagtttgaaatataagaaatactaataaaatcatgctaaatacgaccaatcatttgagaagtactaataagaaagcctcacgtagcccaaaagtccaaaacaaaacttcactaattaagaaaaaaggtaaaacgatggaagaagaattggtggtacacacgtcacttcccagtttggaacaaaattgggtctggaacaaaattgatggaagaagaaagatgggtcttgttcctttacctgagtgaattggagagagagtttttttctcagcaagatctcagcaaattgattcgattagcgacgcaacaaattgttcactgtgtctctgcaaattgttctttaggttagaaataaatgggctatccatttatttaagagaaaacccatttaataagtgggcttaactgggttaacccatttaaccaattaaaacaattttttataaatgggtctaaatgggctatttatttaacaacatacccatttaattaaatgggcagtgaaacccattttaacatcactataagtgagtaatgatccagcctaatgatccagtttcacaaagatttcaaattttagtctgcagcttcatcccctcttatatataaccaagaacagaggaggatgtgtgatcgatcccctcatgcatgtgtgatcgatccaaattgtaaattgtttcctacatttggacggatttaataacagtgaacaacagagagagagagagtattagttagtttaccagatgaacagggctaagttttgaagtcaacgaagcttggacttgctcctttgttacacccatctctctcttgctctctgtttaaattttgtgcaggggtgatttgcaaaagctttgtgtgccctaatgattctaaatgggtgaaccgagtaaatatggggcccgacacgaatatattctcttcttcttaactttgacatattcgatactatccataaacacacacacacacccttaaaaaggcaaaaatcagggaaaggaaaaaactaacaagaaatttgtattttatatgctcacttgtgtctttatgttgtaatgtttttgatccaatgtttgaaactttctgatatagtttcattgtgcaagaagagaaatgtggatcaaccaaattctcagaatctctgctgcttctgctccataaactggttatgcatttttggaggaaccaatatcatatccattctatgatatgatggatagattcaggatcatcatctctatctgttgtcttcttagtttactctgtctcgggttatccaaacagcagacgtgtgtgcttacataaacacagatcaacagaaccaaaagctctaaacaagaccggctcttcaacaagagacataaccaccaagtagacagagtctcccttgcactgcattagtaatcaccaaaagtctattcctgttttgcttcttctctctgcgtaacttttttacaattcatcaaaaaaaaaggaaccaaaacccatccgaagaaaaaaggaaataaagcccattcaaagaaaaggaaattaagaacaatattcaatacaaatatctgcttatgtcaaagtcattaaccgactccaacggctacattgaacaaacggttatcattatagatcaagacctaattaacactttgcttataaatacagattctcacacgcagcctcttctaattcttccttgagagaaaaaaaaaatcaaaaactctctgattcacgcatcttcttcttcttctttaattttcttcttgagagaatctctttatacagagactctgtgtgaattccgatgatccattattgaagaagtgaaaagtcgatgatgatgatgatctcctctgcaacatgatgatccataagagttgatttcacttctctccgttgagtcggtggagccaaggcggctgttaacggcgactaaaccacgtttgttctcaacgatccgtacgattacgtcttacgaggcgttctcagcaagccatctcttgaaccctcatgttgcatatcggcttggattggaggtatgagatttgctagcacgattactttgggagagaaagcttcgactaaggaggaggacgcgaatcagaggaaaacagagaaggaatccaccggtggagaccaaggaatcgcgaatcagaggaaaacagagaacgaatccaccggtggagatcaaggaatcgcgagttattagggtttcacaaccttcaggtataatttcctttcttacttaaaaaataaaaattcatataacatagtaatagttttgattatttttttatagtaataaatatcaaaggttttttaaaaaaatcatataacatagtaatagttttgatttttttaagaagttatataataatactaaattaatatgacgttgtgaaatataaccagattttggatcccgccatttaaccatggtcattagtgattccaataatccaacatgtttttcacatcttcatgtatatttagcatttatttttattttattttcttaaaagttttttaattcttttttattttattttaaaggtattataaatattaaattaatatgacgttgggaaatttaaccggattttggatcccgccatttaaccgtggtcattagcgattccacaaatccaacatattttcacatcttcatgaatatttagcatttatttttattttcttttcttaaaagttttttaattcttttttattttattttacaggtattataaatattaaattaatatgacgttgtgaaatctaaccggattttggatcccgccatttaaccgtggtcattagcgattgcacaaatccaacatgtttttcacatcttcatgtatatttagcatttttttatttttttttcttataaagttttcaactctttcttttttttttttttttttaaagttctataaatactaaattaatatgacgttgtgaaatgtaactggattttggatcccgctatttaaccgtggtcattagcgattccacaaatccaacatgtttttcacatcttcatgtatatttagcattttttttttttttgttataaaattttcaactctttttttttttaattataaaaagttctataaatactaaattaatatgacgtcgtgaaatctaaccggatttttgatcccgcaatttaaccatagtcattagcgattccataaatccaacatgtttttcacatcttcatgtatatttaatacttcgtttgagttttttttcttacaaataatgttttaagtaaattgtattgattttaaactaaaacttttttatcaacgaaattgtttataaagaaaaaaaatattaattctaagtgttgaatttaaatacgttgaaaattaatcggacttggcatctcttctttttagtccttaagtcttgtgatgtcataagttaagtaaatcgtttttatttttatctaaaattttttaatcaatcaaattgtttagaaagaaaattaattttaagtattaaatttaaatacgttgaagactaactggacttggtatcccggttttggtccatagtttttgtggtgtcataagttcaacatgtttttcacataatttacataaaagtgtttttttgcaaataaagttttaaattgttttttttatctataatgtctttaagtaaaagtcaaaaactttggaggaagctttttgacaaataaagtttttttacaaataatgttgcatgtttaaaagtcaaaacattggaggattaagcttacattattttcatcaaaataatgatgatttcgttaacataacaagtgaggatttctaaccaccatgccactgcaaatataaaacctattggagtctctatcatgagcctaacctagaagaggaaaaaaaaacatttaaccattcaaaagatattcaaaagattgttttgacatcaacttgtttctctgtaaaagatcaagaaagtgaagaacagagtgattgatatgcatcaaggcagagtttgaacttctcttgtgctcctgtgaatttccaccacatttaccaaattagtttctgaagatgatcgcaagaaaacatgcaaaacctttttttgacattaaatgtatatatacctgagaaggccctgggtgtttatctggatgccatttcaaagctgcagacctgaagaaaatctctacttcctttggtgtggaagagaagattgtgtagagcctttttagcatcagaacgcttctccttaaccgtacatgtgtatcttatagagtcctgagatcaatattttcactttttcagcttaatgaaattcaacaacaaactagataagcaaaattgacgaaagttataataataataatagtcttcctattcatgattccaaaatctgaacaaaccaaacaaccacaagatcttcaatcaaaattctcaaattttcagcttttgaatagcttatagctcatagagttttaagaacacaaattatagccacaggtctcatatacctttgaagctcgtttgccttcagaaactttaccactctgccaaaaaaatttgatacaagtatcaaaacatttaaatatcgaaacagagcatggaattagaaattgcaaaaccggttcacatcgattcaccaacacattcacgggccagtatcaatctcttttcaattttctattttgggccaaattcttcatcctttaacccaaatcttatctttcatgggccgagatttatatttcgtatttgtagttctcatatgcgattttccgatttttttaaacaaattacttgctacttcttaattcttatgatgatgcatcagacaataaaacaacatcactatttgcactatgctcacagattgagggtttttaatataatggccacgtataatatgaccgtttatgtggaagttcttttattatattattgtggaatgcaaatggacaaggacaacagagatactaattataaaatcaaaacaaaaagatactaattctaaaataaaaagaagaagatactaattataaatcatttataattgtttcctttttctcgtaatatcacctgctcgattcagtatcataaaatatatactaatgtatcagaataaatattcgattactatgttttctatgattagaggttttttaattatatctatagtttccttactataaaacaaatcaaattacgtctttttttaggttaaccacaaaaacccatataaaatctttgtctgtctatattccttcatggccgcagagaatttatcggacataactcttctttgaccataccttaccttcgttttcagcatttctctctctaatctatcggaagataaaaggcaaattaagagagagaaaatattttttctcataatctgtgttaacgtacgagatgggaaactgtgccatcaagccaaaggttctcaaagattctgacgaggatc

SEQ ID NO: 961 - DNA, 39645 bp, Arabidopsis thaliana
ttgttccggtggagcgagagacgacggttccgactgatcttgacaaagatccggcgcagaagaacgagaacatcatttctcctaacgctgcggaggaagctgcggctgcggcacgacggagcgagaagggaaaagagattttgattgaagatgacattgaagatcaacccaagcgcccatctcttagtcacttgtttcatgaggtacattttctttcaaataatcgtttatttcattttacgtagtttatattaaaacactgttcatatatagtatattggaatttactttaaattatataaaaatatgaatattaagttttgtttgaatcgttgttatttaattatttaacgaaattacgtaaagagtagtataattttcataaccacatagatttaaatgtttgtatatatatgtaagtggttatataatcagcaattgatagctttaagacaaattgtttatttgatttcttattacaatcggaaccataagtcattttttaaggataaatcaaaagacaaaaaaaagcttatcttgccttctaagttttaagtatcttttatctttttaaaaaagtaaaaactttgtaataattaatgcatatgttttacattttatatgttgaagtggaacctaaagggacaataatttatgccgattttttctggttttattcacattttttaaaaatcaatttgtggatgacttttgattacaggacaagacagtagtggaaaaagaagtaaccgatctaactccgacaaaaccagacaccaataacaaaaccggtccttcttcagaggtttcaatgtttgatactactgctttagtggcttctaatgccaaagatccagaagatatctttgacgttcagactcgaaatgacctcgaagttaagattccaaaagattctgatgttaagactcctgaaactcctaaagctaatgaagctgaagataacttttcagagagttgggaagttaagtttccagaggaattggaagctaagaagacatctgaagttgttaaggttgcagaagagtcgaaagttccagaagtttctgctcctgaattgtctgaaattaaggttacaaaagaatcagatgttcctgaagtcttggaggacaagaatatcccagaagttgttgaagtgaagactgatgaagttaaagtcgcagagtcagaacttctaaaggtttcagaagttgaagcaacagaggatttagagattaaagttccaaaagtctttgaagccaagactcctgaaacatcgaacgttaaggttacaggtgaagcagaggtaaagactgatcaacgagtggaagttgaggtcgcagatgacaaaaaggttccagagtttgtggatgctaaagaaaagatcgacaaatctgatcaagacaaagagattgtgttgcctaaaacagaggaagaagggaaagatgtgtctttggagaagcaagtcaaagagtctacattgtctgatttaggaaacaaatgagttacaagagagactacagagaaattaccaatcaggagtagctaaaattatatttttttcgaccatgtcatggtttttataaaacaaaacaaaaaacgatttagcattctttaggcaatttcagtttgtgtatgtttctttattgttgttgattttttttattttttcttaactatggggataagtagtctatatgcaagtccccgacttgtaccactttgcagaatatctaaaatatcattttctgagaaaaaataaagaaatttcgtttaacagtttagctacagttttagtaaattgacgtaattcattaaatagatgttacataatcgtaaacatacaaatagtcacaaactagtcttttaagacaaaaaaaagtttataaccaatattttacatattattaatttattttcttgcttcaaacataatctataaaaagttaatttaaaaaccacccttagtcaaagtatatagactacataatgataagttgtcgttaactaaaagttagttaaaactgatgtgagaaaaagttaaagcaaaaatttcttaatacataaagcacaactatattctagactctactagatgtgaatgattagtcacataacttatataaagcctaaattttagcacatatataagacaaaaaaataacacattattcaactaatgacaaccttcacttcattgcacacgacatcgttttccttctgtaaatcaatcttatcatcaccactgtttttctcctctctgcttttcccccacagcacacagtaaagtcctatgatcaataataatccacctacaatactacaaaagtgtacacatgtataagtttaattttttgaatagataagaaaaacgaaatattaaagaagatttgtttagaaccttccaagactgatgatctcgcacaagagaatcgctgaagagaggagagtgaagaggagagacaaaggagtaaacattgataagaagacaggtcctctcttttctataacccatgattgcaaataatatgctacgcctgttacaatgaatccctgcatatatatgtcacgtttctactattaatatgagattatttatattatatatggaaataatattatgaaatggattagagctaattatttacgcagtaaatgactgcaacgagtcttaggttccaaccaagcttccatgctgaaatatctctctctaaagcaatcgcgatgacgaatgattgaatggaactcaatagacaatgaagagttgtgaaatatagcttcgaaggataaaccttcaacacacgaccctggttgttaaatatgaaacaaaactcgttaataacaataggtttatcacaattactcaaattagcataattaagatagtgaatactcaataatgtgtggagcaatttgaatacctgtaaaacgagccagagaccccatagaatgttggaggttatcatgaggacacatcctttgagccacgaggtggaaccgccggagacgtggccgggattattccggtgaggatgttcttggccgtggtaaaaatgagggcataaaggtaatttcagtaatggacctttgtaaatagctaagataattacccctcccatgcacacagtaatccccacaagctttgctgttccttgtatgctcttaaccttaagcctctccattctttgatttaataaacaataaagaaatattagaacgagtaattaggtattagttaaaacttgtcatacaaatatataaacttgtcatattagtaagttatacccaaataaaagagccaagaagaatgtgatggccggaagggaagctgttgtggcggcggctaaagttgccgacgtgtatgataatgcgataccgtttaagtccaagctcaatgtcacactgaaatcccaatatatatagataaagctttattgattattattagttcaacatagataaaatttaactgattatagtatactagtataagtatagcatacatacccaaataaagagagcatgaagatcttgatgaaggtcacaaatgaaagaggtggagcacttttcctaaagaaaaaaggagagaatacaattaacataaataaaaattaacgtttacaatattaatatatttgcatatatgtaccgctcaaagaagaaagccagaggagccaagaagatggtagcgaaagcttgacgatagaaaacaaagacgaaagtgttcattccaccgttgaagacggctttggagatcaagaacatgattgtatatatgacttgtattatagtaaccatcagatatggtttcttcgactccatgtccatctaccgatttgatgatgtttggttttggttttgttttgaattcacggagatgtataaattgtagggttgttctttctctctctgataatctaatgttcttcttttgagttagaataagaaactctaagtgggttatttatataagtacagacacaagcacgcaaaaattggatattttactacggtggtattacaaagtaatggactaaatattttaaaagtacgtaactaagagtggaggatgaaaaaaagacattacttttgtgtcacaatctcactataccaaccaaattacattatttttgatgttgacctcaagaaaatttctcgttccgtccatttatccccacgcctactagatttactttactgtatggtgtgatttatagttacattttgaactcatagatttgaagaaaataaacatcatttaacgaaagtaactttcgtaaagagaaacatgtggacacagtggttttgattggacaaaataacgttcattgctctgttggaattactaattcagttgaatcacaaattaagtgcaatagttagacagttatggaagtttaacgattaactaagaccatcgttagtgaaatttttacaccatttgcaaaaaaactaaaaccaaaattagattgttattataattcttgttgttaattgtataataataaactaaacataaatcagggttttcatagttttacaaaacaattattttcgcaaacctatataagcttggttgtttataacttatcgagtctctcttgttccactcacactctcaaactaaacatgttccaaacacatgtaatctatatatatgtcactccgatttgctcatagcaaaataaaaatgtttctccgatataaaatatataactagatagagtgttgtcacacaccattttttctggacggttcgtggaaaccatgaccgtgtctaacgtaacgtccacaattgatttttcaaaaaggttcaaaattgatacgtaatttgattggtttgttatacaattcaagcacttgactagttgatatgtatataatgtaacagttaaagttttatgatgctttttattttgtgcctgttggttgaatattttggctttctagactctatcatgatccatattccataacaatagaagcctaaaaaataagttgtcccttcggagatatctgataaaattaaagaagcctacaaataaattaataattatcttgttataaagatagcgaatcaatttaaaagaaaccgtaaaagccaaaaaaataaattaaaggaccaatcaaataaagtgtttgatgacccatagacatgtggtttaacgtttaggaaacaaaagaagatagtgattgtacaaatgcctacgtccacgtcactacgactaatagccatgcaaaagtaattaaattaatccatatattatcgaccacttacaaatttagcttctattgtcctttttcccctttcttttttaacaaatcacattttattaatttcgtgtctgaatgtagcatgtgtccgggtcgttgaaaccaacataaaaaacctggaaaacatctttattttgttacatttattgatatgtggattctttatttagaatatttttctgctaactaatcaattaattgttagttggctatgatatgataataatctcatcatttagaacaatccacgaaacgaaacatcgcacggaccttctctaggactaggagggtcggcgccgtcgaaataaacatgtcatatatgacgactgatagaaaattgcaaaaagcccactttctatcaataaacagatgtattcgtttattgttattccttttttaaaccgtagtttgataaaatgaaccttaaaagtataataaacatgccaattatgagaaggatgagttcaaggaatatacgcatccataattccatatcccaatctttttcttcctcaaaaattaaagtgaactaccgtctaaaaaagaaaaaaagtcaatgaaagaagaaaaagcaaaacaattcatggtttgttcaaatacaagagttatcattatcgtcatactatatgtctatatgtatatatatatatatatatttatttattttttaaaacgaacgaaaattagttcgcaatttttgaacgttgcgtttaattttatacgagggcgccaccgttgtacatacacacacacacacaaaataatatcgtcagtaaagtgaatgacacgtgtctcctacatcgaaatttagttgggccaaaacgagttaaagataaatggactcgaggaaaatctggttggttcgccattatgggctttaacacaaaagggcccatataaagccattgagcacgtgacgtgcacgtgagcaaggggttttagtcaggcgcacgctgttcttcatcttcctcctcaaactcctaaaaatgctaaaacccacagctctatgaaatcatttccgccattacaatcacgcatgaaacatctccttgctctactcattccttgagataatcatgcaattcggatcttccaaaaccctcttcttccgcgtcgccggtttctcttccacctccgtcttcaagccgcgtcgcgcgatctctgttccggtcggaaatttttcttcttctagctcgatttccgctcactacacttctttgaagcgttctcaatacgaggaagattcacggagtgttagggtccctgtatggtgggattttgagaactgccatttgccgtcgggtgcaaatgtcttcaaattggctcaaaccatcacatccgccgttagaatctgtggaatcaaaggacccatcaccatcactgcctacggagacatgatccagctctccagaactaaccaagaagctctcttcgctactggaatcaatctcacccatgtccctcaaggtcaattctttttacaaaatctcttcttctacttcatttctatacaaagcttacttttacttaaggatctgtttgaaaaagtttacatttttatgcgatttgcactaggtgggaagaacagtacggatagatctttgataacagaaataatgtgttgggtttcacagaatccacctccagctcatctcttccttatctctagtgatagcgatttcgcgaatgtgctacatagattgaggatgaggaattacaacattttgctcgcgtgctacgaagaaacgacgcttggtgtattgtgcagtgctgcttcgattatgtgggattgggatgctttagttagagggcaaaatccaactgctaaacattttaatcagccacctgatggtccttatcattcttggtatggtcactatacaactcctcttcttgacccatttgccacatctaccaataataagcagatatcttctactagtgtcaaaaccgtagagttgctcgaattgggttcttctaagtctcgtcgtcctattccgaataaagttgttaagcagattggtttgatattgaggtggtatcctaagggagcagccattacagaactccgtgagcagctgcgaaagaggaaagtactgttagatagagacttttacggatataagagtttttcgaggtttctgttatctatgcggaatatcttacaggttgttcctctgggagatggtatgttttctattcatgctgttacccagggaatggataataaagccttattgccaaaagtaagttgcgagaatcatgcagttgttagtgtggaaaagatgtgtcagaatatgaaacagaatgataaagatgtcaaagaggaatctcatcaattacaagagagttctcaagagtttgttcaggtaatgaagctgatggatgttaaggcaaaagaggaaccagttaaagcaaatcagctagctataactgctgttgatgatgtttcttctttcgaggaaaaagacggatttcttaagaagctaaatagactattgtttggttcacctgaaatggaattagagcatctccaagaaaggaaacatatttccggaaatggagttcttggtgaaggaaaagtggtggataaggacttagaatctcaaattgcatcttctacctctagtgaatctgctgaggaggtaaaagtagacaatgcagtaggcaacgggaaatctaagagtccagggcttacatgtcgacttctgaagagattcaagttttcttggggaagatatacagagcttagcaatgcagcagcaaccggacctcaagttgatgacgtttttgttaaagattctttttggaatgatgttgaatctttcattaattctccaagaggcttcgtcgctgtttctcactcaagatcaaggttcttattcttctctttcccttaccaatgtttctgcattagctatcatagaaataacattcaattaatggtaagctgcttacgtgtccagagaaacaatggctaagaatcttaaggaagaaggaccttcatcactcaaaccgctcgatgtaccaaaaatgcttgatttaatatctatgttaatatcagagaagaaatggatccaagagaatccttcggatgctctaccttttagagtaactcggttcactgaggaaagctcttgtcgtagcaaccctcgcaccacggatggattgagagcgatatttgtgaatatgtcagaatcgctgtgtgacggagcaaatggtgataaaaattccaccaacgttggtatgagccagaaacctaaagaaagatcgagaagcaaggtaattgcggattgtcataagctgataaagaagataacagaggaaaacgctggaggttatagcataactaaattcaagaaagcctttttggagaaatttggataccgtttagaatatcgtaaattcggtttttcgaaactgcagtctttgatagaaatgatgcccgaggctaggattgaatcagggcacattgttacttcgtcaaccccggttccatgtgaatctgattcatcattcgaagatctcggtccagtttccaaaaagattcatgagaatgagtcatctgtttcagagggagaagattatgactcagagatggaggaaaaagcttcttcaaaacagagcggtggggaaaggaagaagaaagaagatgaaacagagagtgatttacttcaaattctgggttcttgggacactgataagaagcctgcaaaaacttttggtgaagataagcttgttgagggaatattgatgagcttgaggaagaaaccatcaggtgactctaggattcaagattgaagatgtttaatttaaccgggaaacaaacaacggtaggctaaagattccggtttattatattagtttttggtggagcttcggtttggcgattggttctatgtaaaaaccgtggtaattgaccaaaacgattttaaatcgatttagaccgtgattaacaaaatttaacaaagataaatcagaaaatgttacacataaaaaggaaacatagttcactggtaacttttatttaacttaaaatataaagggaaagctatcaataatcaagtccgggatacgttatctcaaccggagacaaagccaaagtttccggcgccggtgaaggagataattccgacttctcagcttgaaactcacaatactctctcaagttattcccttccatagtcgtaagccctaaagaagtaaacataacggaccaacaatctttcacaaccaacccaatggctccacaacaatctttgtcaattccacctttaaccggcggttcactcgtaccggtttgactaaggaaaaacttgacaatctcatcggtgcatgacttaagctccaaccccgcgttccaacagtccatcaagtttccggcgccggaatgatccgtagccatcttcgtgaactggagagtccttccctcggcgacagtgatgacatgaaaggtcgatatgagatatgacatcattagaaatgagagcagaagaggcttcgaagtagatttagtagccattgcttctttttgtgttatggattttttgtaagagattatgagtgtgatgtgacgaatatatagtagaagattatgagggagacgaaaagtttttttgtcgtttaatgttgtagtaattatcacagtgatcgtggttaatttaattaccctctaatcctctatctaagcatttaccgtgtctttattaaattatccgttacgcccagttttgcaagctattgggccaactaaattgggctttatggaaacccattaaaataaataaattattatgtttagtttagtataagcccgttctatggaaacgtgattgtaagtttcaggcgagagagatgagcgcgacggagctgccgacgaaggaggcacacatacttaaaggccacgagggggcggttttagcggcgaggtttaacggtgacggaaactacgctctcacctgtggcaaggatcgaactatccgcctctggaacccgcaccgtggaatcttaatcaagacctacaaatctcatggccgcgaagtccgcgacgttcatgttacttcgtatgaaatcagctctttctcatctgatgttttttcttttgaactattcgtgattttgattcaatttctgcagtttaagtttaagtttagatagtccaaatttattggattctggttctgtgtgttgattgttgttgctttcagcttaaattgagtacataagagaacgaatctcacattcccgagctttttgttgtttcaatgatttttgttgcttgcttgcagctataaacgatcgaattagacacgagatttcaaattttaggagtttgtgttacattaatgtcaagctaattgcagttttctgtggtggaggctgatatgatgaatgtgttttttttgtttattcatgtttcaatgatttttgtatcacagagacaatgccaaattttgctcatgtggtggtgatcggcaagtttactactgggatgtttcaactggacgtgtaatccgtaaattccgtggtcatgatggagaggtaaatgtctcaaaaacgaggaatctggattgcttagggtttagtttccttaggtatattgatgatctcttgttttttaatgacaatgatcttaccaggtcaatgcagtgaagttcaatgattcgtcgtctgtggttgtatcagctgggttcgatcgttcgctacgtgtatgggactgcagatctcacagtgttgagccagtacaggttttactcctttcatgttttgctgtttcaaaatcctgggaatatgtaataagttaagaactaaatcaaagtggattttttgttctttgatttttttgttttccagatcattgatacatttttggatacagtcatgtctgttgttttaacaaagactgagattattggtggtagtgtcgatggaacagttcgcacatttgacatgcgtatcggtaggtatgtgtaactcattacaagagataaaatttggtaatgtttctttcttctgggattgattgggaatttctgttttaattgaaatcagggagatgtcagataacctaggccaaccggttaactgtatatcgatatcaaatgatggaaactgcgttttagctggttgcttggattctactctgcgtctacttgacaggtaaaagaaactaaaccaaattgtatcttctaactaaactaaatttccctttgcagatttgtcttaattcttatgaatatctttaaaattacaggaccacaggagagctactccaagtctataaaggtcatatttccaaggttagtcattagtttgaaagataatgaaaccataatcccatatagctgcttgattatatcttagttacaacatttagtgtatgactaatgactggttttatcgtatgtaaaaaacagtcatttaaaacggattgttgcctcacgaattcggatgcacatgtgattggaggatcagaggatggattggttttcttttgggatttggtagatgcaaaagtgctatcgaaatttagagctcacgatttagtggtaaagattctttctcttctttttaacttgttttaaatcttttcagaatagtattgatgttgatttttatcttcgattgttgaaattttttgtggcaggtgacaagcgtgagttaccacccgaaggaagactgtatgttgacttcttcggtcgatggtacaattcgtgtctggaaaaaatgaagaaacaacaaatcttgacttcgattgattttgttatttacgtctcaaactcacctttcttcttctactataggctatagctggttttttggagttggaaagttgaaatattttgtagagtacttgtatcattgtatgtgaaggaaaactttttttaggccttttggttttacaatagccgtttgctggaatattttgtagattcacttactctatgtgaggaggagagtattttatacttagatgattccaaaagcccatttgacaattggggagaaaacaaggaaatgtccgttttacataaaaaggatgtgaaataatcggaagcccaattatgagaaaatgagtgaaaaagaataaaggggtaaaaagtgtggctgctgggattcgagcccaggtctccacggccacaacgtggaattctaaccactaaactacagccactttgatggtaacttttaaaatcttgtatatataatttcatatctgtgtgtggggtaacttttagctatttgattgccccatccgattgaacttggaatcaagtaatatccttttctttttgtttaaatattctccctactttaccttctgaatctaccaaattaggaattaagattctattcttctcccaattattcccacgtttaaaaagataacgaaactgaatctctgatttgatttatgaaatgttttataacttacaaaagagaatcacatagctggaaaatatggggtagcagtgaagaagaacatggcaatggcatattaagagttaagaccaatcttttgcatgtgaattctttcacatattatatttatttaatctcttatccgccgccccgtaattttatttttattaggaagacaaattcaacttcacaattaacaacggtatatcatacttccctcaagtgatatattatatattaataactataaattgttttactctttaattcgattttgacattttaaagtcgttttacgatgatgacctcttaaccactattcaaaaaataaataacgagttacaagacatctacgcaatagacgattatagaccgtactgattatcgtttagatattaaatttatttcggaagcagagtagcagagttagagaatttcaatgtggtttttcattttctaacatagtagatgttttatattattttttatattacattctaaatgttttagttttgatatttattactttactagaaaaaaaaaaaggttcaaatgtggtttgagattatatttttctctgaagattcagttttcaattttactatttttgaaacattaagaaattattttaacgccaagtaaaatgttgatcgtttagcgactaataaaaaccactttgagcttaacaataaaattacgtacggtccaaatcatatcattaatcttacccgaacaatcctactcggtcgtcggaaagtaaacaactagtttcggtccgaatctgatcaggcgaacgtacggtaacagaactgttaaaacgaaccaatgaggtcgcgagtataatataaagaactgtactcgtggaagttgaaactggccatgagctgtcgaaaggcaaagaagacctaacgttaccgctgcccgtaagaatatctcaaacgctgcccgaaatctgagagaggagagttccttaatacggaccagttagacttttttttttgtttgttgtctaaagtacaacaaagcaatctcacagctgtccaatattgttttattcatctttatataattttgtgcttaattatataggatatacttttcaaatttaatgcaaccacaaatattttacaaaataacgtattaatgggattagtccatgttggtgtgttatgacattttttagagtgtaggaggtataagaattaagaagattattggctatgaattattgaaatattttactgcacctattattttcaatacatgtgtaccaaactggtcttttaaaaaattctattaatttaagttttgccgtatatatgtatcaatttatgatacttaattagtaatatgatttttaccaatcttaaattctccttatggacgaaaaaaattaaaaacatcctcttatggactccaccgacaagataattactatttgacacgtggcattaacaatttattaatgctaataagtaattagaatttgattattccggtattccccgttccatagagttttaattatttttttcgaaaataaatgatgttttccattctgtagtacaaatgaaagctagattttttctctacatttcatcattagtttgaattataaacattaattttatgttaacattagtctagctattttttttgtaaaaatgtacatcaccaaaattaccaatatagaagggtagttttattttacttgttgtctttgttttttagtttgattttgtcgtcattgtcttcgattttaaggttataacttataaccatgttattcttcagagagttatggaataaacacattcttactttgagctcacgtcgtaaatatgcactttttggtcgtcaataatagataaataacaacgaaaattgccagcgtagaaaaagataaattagatattttaaagaaagctactcattgcgcactatctcgcagttatgattacacttttactagaaacaatttgtaaaataacaacgagtcaaaagtcacccatgagtcatgcaacacgtgtttagattaatcatatcgtttaactaaattcatgtacacgtaaagaaatttaccatttatgtgcttccaccaaaatacataattacatttgagtttccgtttagggacagagattgagctttgttccagattaatcacccgacatcatataaaatcttcttttttccggctgaatcatttgttctgtagcgactttgatttttaagcaatgacactataatttatattatatatatatatatagaaggattcttattttcgatcgctaaattaattaactttgagaaattttaaaatggaaacaaaagaaaggaataaagaaggaaacaagcaactatgtgatatagcctaggtggtacattttgttttggttaaagaaacaacacaactatgtcgcaaacgctatgagtttttcaacaccaatttcgttttcggtcatttgtagaataacatgttaatgaagttaaatctttgaacttgtttatatcaatatttaacatgctccaacgaagaagtactatttttttttatcacaaatgtttactgggttaagtggtgtatatgttgtaatggtttcttctttgtcaaggtagattatagacttgacctgatacgtctatgtatttttttttggttttaatgtgaagtaatacgtctatgttactttgattttgttttcggtaaggtctatgttactttgattgacacactggatatgtactactcaaaattatactaaatatatagcaaatatagatataactcattactcaatatacacacatgtgtgtgtaaatttgctaatcatgaagcgtaaatttttgtgcaacctaagcctatgcgttctgattgcgtaatcttaaagcgagaacaattaaattttgagaaaaaaacaaagtaatcacacaaagaaaaaaaaaatcatgtgaacgacaaacaaaccccacataaaatggtgtattcgccactcgttaattggctatgttccgcgtcgctcagcaaatggatcgtgagtgtatcagttacaagtgaagccgaaaagaggaaaagaaaaaaagaataataattgtagattttatcaataatttataccatttcgtttgaaattattgaaagaatttttttaacatcatatttatatatagattttactgtaatgcaagttatggttttcagtaatacaaatttctaacaccgagcccgccattaaggtttatgtagtttctagtagattttacattatgttaaaaacgtaaaatttgaacgatctacatattattatgtatttttctaatatattttttagttgaaacaaccaattttgtaaatagctgtggtatgatcgaatcaagttgaagtgcaacccaaacattaatcgggtctacgtacataaaatctctaatcacgttgaccaagcgctccagctcgatctgctagtaaaaacagaagcaatatattttttatttttttttatgtacttagttagtggtatatatatagttgtaaattgggtatttccaaagaaccaaagtaatgtaaactatacataagcgaaaatttaaacgtttttctattctatagtcttgaaaattaaaacaatatttactaggaaaaagaataatataagggcaccgacagtttctataagaacatgtggcacgagggcttggagaagacagtacacagcattcaatcaatcatgaaaacgacatttgatgtggtaacctactaaagttcgatctttttttatgaaagtttcttaatatttctttaatttccggactatatctatcaacaagtcaaaagattaaaaaaaatcaacaagcaaaatactgttaaaatattgttttatatataccacgaactatttgtcggcaaatgtatacatatagtatagacatcatacatgggcaaatcgcatatatttgtgtgatgtgataccatagtctcaataatttgaacatttttctcttatttaagcacggaggaaaaattagctatatggcgacttggcgagtggagccaagattaaaaaaaaaaaaagcatgttatttaaaaatatggtagacataacatacaaaaaaatatagtaaaataaacagaactgattgaacaaaagagagtgatcaaagttgaaaaataatttaactataaaaactaaaaagaaaattatcagaggatggagatattaaactaataaaaatgtaattaaataagtaaactataaattaaataagtaaaaaattaaacgtaattagaaggaacaaaaaaaactagaaaagtaaaaacataagagaggaaggagggaagcaaaagtgaaaaccaatgcagtcaacagtcaaaaaccatgatacagtccatgcgtagaacataattaacttaagcaataaatttaataagtaaaaaattaaacgtaattagaaggaacaaaaaaaaagtatataaaaaattagaaggaacaaaaaaaaaaactagaaaataggatcttggacacgatgcttacagattgttttttgtctgggaagtaaatgcccatatctgtttctcgacattttgaagtctctctaacaaaataattagaggaattaagaacttgattgtgtaactttttttttaatcttaaattaagataatactatttcattacaactattattttcttgcacatgttgcaagaacgtgagagtgtacgcagacaaataattaaaacgaaaataaaattataatgattatatacaatctcggctatcaattgattaatagagaaaattgactaaccactctgaattggctcaaaatgtagttattaattcaaaccgagtttcacttcatttatattattttcattttttaactttaaaatatatatatttaataaaccaaatatgatctaaactaaatctaaaaggctccatccaaagtagatttgattttactatatatttaaaacatgtatggtaggaaaatttaaccgaaaccaaattaaacacattttagggtgaagaaaatcacccaaaaaaaaaaggtgacttttttttgtaacaaaacaaaagacctaaagtttagagacaaaataaaatgttagggtgattcaatgcatcacataatacagtattgttaataattaatggctaataataatgtgtgtttggaagtttttactaatctcttctttacaacaacaagtggagtggaagagagagatacacacaaggtttaatgggtcccacattcttttacttctcaaaatttaattactaattttatctaattttggtgctctttttcctcatctacataattgcctttaattatctcacaccatttaactaatcactgattctcttcttccttacgcgtttgtacttaacccccttttatcatcatttcgcaggcttgcgtctgtctctctctctctctccaccattgactctctctctctctctcgctctggaatcatcctttatttctgtgactgtgtgcactttcagagaggagagagaggcccaaaaccaaaagaaaagaaaaggttgtggcttgcagctgaatcaataccatctccatatatacaatacaccttcactattcccccttttgtatttttattatatttttcccatcaaagtctgtttttttagactccggtttgccgctttgtgtgtgtgtgagagagagaaagagagctatctatcctctgatttatggtctctggatctctgacaatcgagttgagttaattacaacacattcctctctttctcaatcgatctgtgaaatccaagattgttagctgtgtctgttttcagacaaatatgaacaccggtggtcggttaatcgccggttctcacaacaggaatgagtttgtcctcattaatgccgatgagaatgcccgagtatgtttctcctcttcttttgtttccaattctctgtcttttgatctgtgtttctctatctctgttcaaaagtctctgactttttttacttttcttgtggatctggctcttaccactgcaaatcaattaagatttagggtttttagtactagtattaagattacgtacccttgtagctaattttatcaagaattgattgtgtcggtgggatggatttttccggatttgacttgtcttaattctccaatttaagagatttcttcaattgcaattatgaatctatcaatgtgaagagtaataattatgttattgggttactttgatctggtgtgagatccagtctgatagtgtcactactatgatctgatgtatttaactctactgttttgtgcagataagatcagtccaagagctgagtggacagacatgtcaaatctgcagagatgagatcgaattgactgttgatggagaaccgtttgtggcatgtaacgaatgtgcattccctgtgtgtagaccttgctatgagtacgaaagacgagaaggcaatcaagcttgtccacagtgcaaaacccgtttcaaacgtcttaaaggttcgttgtttgttagaccaaatttctttggttttttgtgaatgtagaagattttctgatttgttcggcctatgttgttgtttgttaggaagtccaagagttgaaggtgatgaagaggaagatgacattgatgatttagacaatgagtttgagtatggaaataatgggattggatttgatcaggtttctgaaggtatgtcaatctctcgtcgcaactccggtttcccacaatctgatttggattcagctccacctggctctcagattccattgctgacttacggcgacgaggtaaaaatctcagaatgtatccacattgtataacccatcttcagtaattggctcactcagatttctcttttgttttattacaggacgttgagatttcttctgatagacatgctcttattgttcctccttcacttggtggtcatggcaatagagttcatcctgtttctctttctgacccgaccgtggctgcacatccaaggcctatggtacctcagaaagatcttgcggtttatggttatggaagtgtcgcttggaaagatcggatggaggaatggaagagaaagcagaatgagaaacttcaggttgttaggcatgaaggagatcctgattttgaagatggtgatgatgctgattttccaatgtaaggcaaagaatataattttttttgttgatgtcttgttccgttgcagtgatatttatcaagccttttttttccattttaggatggatgagggaaggcagccattgtctaggaagataccaatcaaatcgagcaagataaatccttaccggatgttaattgtgctacgtcttgtgattcttggtctcttctttcactaccgtattcttcaccccgtcaaagatgcatatgctttgtggcttatttctgttatatgtgagatatggtttgctgtttcatgggttcttgatcagttccctaaatggtaccctatcgagcgagaaacgtacttggaccgactctcattaaggtacttacatcttgtgggttattacacttggaaatgttaaaactttgttttggggatataatccttattttttttgtttgcagatatgagaaagaagggaaaccgtcgggactatcccctgtggatgtatttgttagtacagtggatccattgaaagagcctccgcttattactgcaaatactgtcttgtctattcttgctgttgattatcctgtcgataaggttgcttgttacgtatctgatgatggtgctgctatgcttactttcgaagctctttctgagaccgctgaattcgcaaggaaatgggttcctttctgcaagaaatattgtattgagcctcgtgctcccgaatggtatttctgccataaaatggactacttgaagaataaagttcatcccgcatttgttagggagcggcgagccatgaaggttactagttcttacttttttataaatttgatttgatgagaaaagttttggtctaattgattcttgctttagaaaaaaaaaattcatgagaaaagttatcaatcttttgttatatgggctcttatgaaagaagatggtggctttgaaaattgatttgaaagattgtgtgttttactggttttgacagagagattatgaagaattcaaagtaaagatcaatgctttagtagcaacagcacagaaagtgcctgaggatggttggactatgcaagacggtacaccttggcccggtaatagtgtgcgagatcatcctggcatgattcaggtgagtttcaaatgcttcttatttctgaaaagccttcttatgtgttgtccttcaaaatttaattatactttgttttcttgttaaaggtcttccttggaagtgacggtgttcgtgatgtcgaaaacaacgagttgcctcgattagtttacgtttctcgtgagaagagacccggatttgatcaccataagaaggctggagctatgaattccctggtaaatgatatactttttaaagctctaaaccttcttctttgtaaattacgtcttgccatttattgaaatggttcctgactcttgatttcatctacaaaacttttgttgaagatacgagtctctggggttctatcaaatgctccttaccttctgaatgtcgattgtgatcactacatcaacaatagcaaagctcttagagaagcaatgtgtttcatgatggatcctcagtcaggaaagaaaatctgttatgttcagttccctcaaaggttcgatgggattgataggcacgatcgatactcaaatcgcaatgttgtgttctttgatgtaagtacagccaccactttcctattgtatccctttttcttgagatttctgtagaataccaactaatgaatctttatttacagatcaatatgaaaggtttggatgggctacaagggcctatatacgtcggtacaggttgtgttttcaggaggcaagcgctttacggatttgatgcaccgaagaagaagaagggcccacgtaagacatgcaattgctggccaaaatggtgtctcctatgttttggttcaagaaagaatcgtaaagcaaagacagtggctgcggataagaagaagaagaatagggaagcgtcaaagcagatccacgcattagaaaatatcgaagagggccgcgtcactaaaggtatcatacaaatcctgtttgttgttaaactctttcgttagtcggtgcattttactaaaaaaataaaatttaaaaaacattctaggttctaacgtagaacagtcaaccgaggcaatgcaaatgaagttggagaagaaatttgggcagtctcctgtatttgttgcatctgcgcgtatggagaatggtgggatggctagaaacgcaagcccggcttgtctgcttaaagaagccatccaagtcattagttgcggatatgaagataaaactgaatggggaaaagaggtaagcagccggttttaaacctttgttgtgtttattcaatcaattcttgattttgatgatgaccttgtgaaaaaaatctcagattgggtggatctatggttctgttaccgaagatattcttacgggttttaagatgcattctcatggttggagatctgtttattgtacaccaaagttagcggctttcaaaggatcagctccaatcaatctttcggatcgtctccatcaagttcttcgatgggcgcttgggtcggttgagattttcttgagtaggcattgtcctatttggtatggttatggaggtgggttgaaatggcttgagcggttgtcctacattaactctgtggtttacccgtggacctctctaccgctcatcgtttactgttctctccctgccatctgtcttctcactggaaaattcatcgttcccgaggtaaaacaatcatcttgagttctcaaaatatgaatctttatttcacgttttgtgcttattcattttccttgccactgggggttaaaagtatcatatgaatctttattccaagttgtgtgttttaagaccggaaaacgattcttgttccttctttttccagattagcaactatgcgagtatcctcttcatggcgctcttctcgtcgattgcaataacgggtattctcgagatgcaatggggcaaagttgggatcgatgattggtggagaaacgaacagttttgggtcattggaggtgtttctgcgcatctgtttgctctcttccaaggtctcctcaaggttcttgctggtgtcgacactaacttcacagtcacatcaaaagcagctgatgatggagagttctctgacctttacctcttcaaatggacttcacttctcatccctccaatgactctactcatcataaacgtcattggagtcatagtcggagtctctgatgccatcagcaatggatacgactcgtggggaccgcttttcggaagactgttctttgcactttgggtcatcattcatctttacccgttccttaaaggtttgcttgggaaacaagatagaatgccaaccattattgtcgtctggtccatcctcctggcctcgattcttacacttctttgggtccgggttaatccgtttgtggcgaaaggcggtcctattctcgagatctgtggtttagactgcttgtgattcgattgaccggtggatgggttggtgaaaaaggtttaattcccacggatcaaagagaggtaagagagatattgttttacctctaaaagactccttcattgtgttcattagatgatgaaaaatgaaaagaaaaagaagatttaattttgttacgagaattgttatttttgcaagaatgtgttgtagatatagagatgaagaagaaagttgttgtctatttgttttgttctttggtggtgagagaaaaaagatttgtcaaattattctttaattgaatatttctgatctcttttgaatattacagaagagcattttcaatctgtaatcttttatgattaaagaactttgatttattttcactaatttccctatcttatttcttgtttgaaaaattaatttactcgaggtttgattggttttgattttcaatccgcatgcttggagacgttttaaagcatccattaaaaatgttaccaaaccttagaaaattacgaacttgatcagagtggcccaaaacaaattatacaggcccaatacaggcccgaatctacacagccttttacacttttattggttctgttttgacaagtgacatggtgctttcatcatatctgcagagggcagcactcagattggttagtctttttggttagagaattttgaaaacttttttgtttctcatttgtaagtgtcactacgcaaagtaatttaatatttttgtatcgttctagttttattaaaatgtctacacatagataccagaaagaggactttaatttcgagtcatttttgaaataaaagtttctaattttgtcacatttcagcaaaaatactcgtgtgtatatgtaatgtctactgttcctttggcggctgaaataaaaatgtgggtagtacgtaagtgacacggaagcataaggattttatggaatgttactaagaatcttaatactagtacttattattaattatgatgtgatatattttagtttgactattgactattttgggattttgtttgaccaaataaaaatagtggttgacttgtcggtgttgagagttgtctatttttaggcaaagtcagccatattgtgccacgtcttagacacgatcttagttttctgtcttttaagtcggattgcgaaatacaaattggacaagaagatgataatgtaactaactatttctgcctatatatgaaactataaactacttctgtcctttctatgtctttaattttctaaagcattatttgccgaccaaaagcaattcatagcatttatattcatacattttttttaaatgagtattttgtatgacacgtatatatatctctttgggtggttattaagaatttatatgatcataacgtaaactttgcatttcaatgataaaaattttgtttaaacattaaaagtcatgatttaaacatatactattataacatgtaaatataagcaaactgcaaatactaatacataaaaatatttttagaaaaaaataatatatttaagatgtggatcacaacgtttaagaagcaatacattactgtgttattatttatttttattttgatactgatactattttatttttcattcgtaacaatttctttaattgaagatttagtcaagtaatatagtggaagattaagttttccttcctgtaaagacttggtctataaaagaccactagacgagaagatctagaaaatgataactttcaaaaaccttgggttttcttttagatatgcatgcggtcttctaaattgaaaatatatctggcttaatactacagtactacacgttgtttgaatatcctagttttacgttaaaaaatacaagttcataatgccgtatatatatggttagaacttagaatgtcaacataattcattgatttaaaagagcataattatatgtcgtatatataccacgagttatagaactacatagtagactttgatttttcggtgcttctgtgaaggcttaataagactgagcctttgcatgtatatacaagtggtttcttaccatcaatgatcaggttttaatttgttaaatataacatttaaaatgttgtctaataataagtattaaagtttattggtttcccactcaaaaccaatcgataatgaatggtttgcttcacttttttgagatgatggttcttctcagtctatctcaaatcgaattccacattaaaaccgataataaagcttttttagaccattctattccggttaacaaacgaagctctgattttcaactaaaattaattgataataaattatgacccatactataatatattttagtgttggtctctctatacaactaatgtgagatcctaacaataagaatccaaatcggtgttctttttcggtcatatatcaaaaatataaaacaccgtggtagatacaatgaatcgagtaatcaacataaagtttataatatagatagaataatcaaagatgcaacgcttatgtcgtttctctttacaccgtaggtagatacataatgttttatattagtactgtattcgtttcggcttagttcatatatagtagctagcactaaaaagaagaaaagaacatagtagaatccgatttcatgtcgacaccaccttttcaacggaagtaaccatttcttaaatgtgtttgcgtcatcacgtgttatttgcgactaagcgggtgattaaagctgtgttaattatatcatttacttatccgtacagataagctctgataattaacgagatattaattaataagtaacgcattactaattttatttatatcaatatttctaattgttttgtcgtacatcatttcgatagacaactatcaagtggcgatacgaaattgtcaatcgttgagatatttatatatacaagtggccacagtttccagaatttattccattaactcataatctcatataaaacataagtacatgattaaaaacacaactactctaaatcattaaaatactttaaaagtcacaatttatgtgaatttacttctttttttcattttaaatggatacgatttttggtaccttttgtacatagattcttcattattacacatcgcacttgtgatatcagttttgggtacctagtttgataagaaattcttcttatttcttttcttgaaaaaggacaagttgatgaaaaagacattatcgtacgccttaacttaaattaaactgatcacgcctcgttctccggttttgccatgttaaacaagtttaatatttacaagttggatgcatattcgtataataatacgtaactaatccgaattgaatgcttaattgacgcgttgatgcgaacttaaatagggattaggttaggcgataggcacacacaagcatggtgaaaacataaatttatttaataatcactatgtttccgtatttggattgatctttgaagactcgatctctaaatttgttttattttactactaatttttatttgatagacatatttaggtatttttatcgcctaagtgattaaaagctactgtatgttttagtggaatataattaaactggattagtataaaacagggcatcttagtttctaaaaagggaaatgaccggtgaaaaggtttatccagttttttttttttttttgtcgtggtttatccagattaattatactgtcgtacaatatttttgttcagcttctttaagaaaataaactgtcgcactgactaattaattagttaatagagacttgagcatcagcctaagaaaaatgtcacatcaataacaatcgtttttttttctcccatctttgcaaattatgtattattagcttcgttaaatctgcgactttttaacaatacgaaaatgtctcgtgtataacaggtaaaaataacaactacgtcaacttgtgagcacaattgcttagattggttaaaaacaaaagtccaacgatgcgtttcgagattatcctcaagttaactctcaaccaaaaaataatagaaaatccaaaagatatcaatataataattattctgcgttcagactagaatctacgagtacatatctgcaagttctgaaatctgaaccatcctgagcttaattgcaaatatggacaacaatatgtttttcttaaccaaaaagtttttgtgcagcctctattagactcgattcgggcgaataagaaaacaactcttatagttaaaagaaaaacacatcacaaatcctaaaatcatattttcttctgaacaatgcgtttctattttttttctattttcttctgaacaatgcgtttctattattttcttctgaaaaatcgaaaacgaagaaaataatacaaggtgtgggtcaaacggtcaaagataagagacgaaggttgaaacaagtgggccgtagggtgaggcccaaacggtcacgagcattagccttaccatcaccgacaccgtccacaaacggagcatctgacgtcgaccagaaccgacacgtgcaacacacgcgcattcgtacggaacggctcgtctctcaacttgaccttcaagctcaccgtttagacaaaatgcaaaaataatcttattttataaatattccatttaatggttttacctctttttcagcaccgaaccgtaaatatagtaattaataatcgtttctgaatgcctccatattttaacagtgtttataacttcttaaagtttttactatgcaagttgtcttatgacacagagctaatatacataattaattcattaccttatttatttaatttactagacttgttaaagtattcttcagaactgttcatagagtataggtcgcatatagtatatttacaaaaatatataattactcacaagttgcgaaaagattcagatacgtttcatataataggacccaattttttacaaaatttgttcaaattgagttaaatcatcaaaaccaaattttcttctgttatagatcaaatttataaaaatagctatttgctatattatatatatatatatatatatataaacattagttattaaaaaaaaaactgcgtgtttccagttcacacgggtacagagagaagccgactcattttcatttggcggcgctgaaaccatacaaagtaattaacacaagaaaattaaatttgtatatctatcagctaaacctcgtcctttgtcttaaaaaacacatcttctaaaatctctgtctttctttcttcctctttgtctctgtttcttgtttctctctctctctctctacagagttttctttccctcgaagaaaaagaatatttttaaatttaattttctctgcgtttataagctttaagtttcagaggaggaggatttagaaggagggttttgtatgtgtgtcttaaaagtggcaaatcaggaagataacgttggcaaaaaagccgagtctattagagacgatgatcatcggacgttatctgaaatcgatcaatggctttacttattcgcagccgaagacgaccaccaccgtcatagcttccctacgcagcagccgcctccatcgtcgtcgtcctcatctcttatctcaggtttcagtagagagatggagatgtctgctattgtctctgctttgactcacgttgttgctggaaatgttcctcagcatcaacaaggaggcggtgaaggtagcggagaagggacttcgaattcgtcttcttcctcggggcagaaaaggaggagagaggtggaggaaggtggcgccaaagcggttaaggcagctaatactttgacggttgatcaatatttctccggtggtagctctacttctaaaggttagttttgttgggtttttattttgtcctctataaacacacgtaccctgtttcggatttaaaccacattagtacacaccattttgataaaattttacatatttcggttgtgtatccacaaaacataaaacatttaaattataagatcattctatttgataaatgttttcaataattttatgatgtagtatatacatcaaggtatgagtcacatcaaatgtttgtaacacaaaatctaaatacagttgcacttttgttgtcctcacgcaatctacaaagcaacatgtcttatatttagtttttttattcttttcttttatcgttttctaaaatatggcgaagttagatatactttataataatttaaatataaagaaaaatgaggaataaaaaatagtaattagcgtaaagatgtaaataaatatttcgaagtgttgacaaaaataaatataataacgaaactgtacttgattatcttaagacatatactttagaattgttgtaaaaaggttggatatttaattaagaaaatgatgatgatgatgatgatatgccaaaagaatttatctccctccaattgcatcaagagtcgttttccacttcctttttttttctacttgttcattccttttgtcacccatttgcctcatcactttctcatactcgctcttaaaaaaaaaactttataatatctttattggagacattaatattatcgattctttttcttatgtaagaaagtgttaattcacgagtgacaacaaaagtgtgaaattttacatgtttgtttgtttatttgcagtgagagaagcttcgagtaacatgtcaggtccgggcccaacatacgagtatacaactacggcaactgctagtagcgaaacgtcgtcgtttagtggggaccaacctcggcgaagatacagaggagttagacaaagaccatggggaaagtgggcggctgagattcgagatccatttaaagcagctagagtttggctcggtacgttcgacaatgctgaatcagcagcaagagcttacgacgaagctgcacttcggtttagaggcaacaaagccaaactcaacttccctgaaaacgtcaaactcgttagacctgcttcaaccgaagcacaacctgtgcaccaaaccgctgctcaaagaccgacccagtcaaggaactcgggttcaacgactacccttttgcccataagacctgcttcgaatcaaagcgttcattcgcagccgttgatgcaatcatacaacttgagttactctgaaatggctcgtcaacaacaacagtttcagcaacatcatcaacaatctttggatttatacgatcaaatgtcgtttccgttgcgtttcggtcacactggaggttcaatgatgcaatctacgtcgtcatcatcatctcattctcgtcctctgttttccccggctgctgttcagccgccaccagaatcagctagcgaaaccggttatctccaggatatacaatggccatcagacaagactagtaataactacaataatagtccatcctcctgatgacttgcttcattttatttgtttcactatagagtaatagaaaacaggaaaatgattatatgttatagagttatttttccaaatattatagggtttaggttgtttgtattgttctgctttcatcctctcatgctttttttcttaatttattatatttttgcattataatttcgtttcattgtaacaaacattaaaaagaccacatggagaaaggaaaaaaaagagagttttgtatataatcttgcaaggtctcctaaagaacacaaaaaaaatgtgttcgaaccaagcagagaaagaaaactcaaatgattatgttagaacgagagcctgaaagattctttccaccgatgtgtgtggctagaccgggttctcaagctcttagtgcaactttatgaaccattgtttctttgtgaatttggtgacaactcttttcaacaagatccaaaagcttctccaagtttgttgcccacgagttgaggatttcgttgctgtctttaacaatctggaagcagattattcctgatggtctgtcgatttttgctatcaaggctttggacacaaccatttcagatagatgcttctctgcttcctgaaatataatgaaacggtaagaagagatttaaacatgtactggtacacttaagagtattttgaaactatatttacctcagtggttaggcataaaagttctgcaagtctcttaaaggtaatccttgagtagtactttgagacaacgagaatattctgcagaagatgtgaagaatttgtaaagttaagactcttcagtaacaattgatgcaatcaaagaggtaaagatagattagagctcaaagagtctttacgtgttcgattattcttagtttgagatcttcaccagctttgtcacccaaagagcctccaatcatgtttttctcattctcaaactcgtccttgtatttattccagagagatgtccactgaatcacctccattgtaacaatctgttttagaagcatcctgcaacagaatataaacatagggattgagaatctgtttcagatgggaacgaggggaagagtagtgaaaacccaaatttttatcaagataaagagaattacttgaaatcaggaatctctgataactttttatcttccaaggttgcattgagtaggctcgattgcattggatcatgtggtgccaaggccaaaaaccagcaaatctttctcaggacctatatttagaggatcaagggagaaaagttaatccaagctaattacagaacgtagactaccacaagatcatccaaacaacaatacgagacttactggaatccattgttctgggttttcctttacagaagggatatcatatatcgccttgtagctacggcatatctcaatgtactcattgttgtgagaataatacctacacaacagaatcagcacattatatttttactataaagatcacagaagtaaagggaaatcaaaattcagaggagaataatattcaaatattttgacaccaataactggcgaagaatgtattaaaccaaatcaaggacttaccgaatcattagctcatagtaaatccgttttagcaccaacaatgtaggtatatcagccggagcctcctctaccatgttttcaccttccttaggcttctttttctccttcgtggtatctgcatcaaacactcttgggttgatcttcctagataaaatttgtgcacggacaaaatctttttgatccaaacacaagcggaccttcagaagtttacacaccaataattagaatcacaacatacaaacaagaacaaagcacaaagcacaaagcttaagaaatatgaaaagataacagaaagtcttacttgttcaagaatgaaagcaattttctcagtttttgccatagcaccaaatgtctccacctataattcataatcacaatcaatgcacattgataaactataaaataaataaaaaacgatttccacgaaagttggaaagtagaggaagaaaagcttacagcaacttcttgcatgagatccgcagcttcagcaatcaaaccttgttcttccttaatcttagcaagcatcttggtcaaacgagctctctcgatttcgacatatatctacacatgctcacacacacatattcatcaagaaaaaaacttgcacggagtgatcaagattcaagcaaatataactacaacaacaacaacaatagccaactctaatccgcacctttccagcagctacattgtttagagtcttaataagctcaatccgagtttctatgtctagtgtctgatcaatatactgcattgcttgttgcaccatggattgtacagcctgcaaatcaagagacctaaccactttcaatatctcactcagttcttcattcaatttctcagtaagattcagaactcagtagaaaccgttccaagtaatcgaaaaccttaaactaccacaagcaggtttcaaaagctaaatcgatagaaagtagtgtgacctgcttaagctgaccacgtttcttcgagagattcaaaatctgttcgttgagaagtttccaatccttagcttcgaaacaaagcttaagaatctcggtagctgcttttctagttccggcgacattttctgcgagcctcatctgtttctcttcgttcagcagccgatcaatcgacgattcgagttgtctactttcttcctgcaatcaaatcacgacatcgaatttgacaaaccaaaattcgaacggaagagaaaagagagagagagagttgaaaatcagatctgtgaaatcggagacttgccattgctaaacgccgggaatcaatactccgagagagagaagaagagttagtgaaactttccggtgatgaaacagatttaacttctaaaggttcactgagagagagaatgttagcgtcgaaaccccaaccccttgaacaagaaaagcttagctcagactatttgggcctaattataacgttttatttattgggacttttaacgaaatagtgtaagacttttggtgtacatatgtaataaaagtatctattgggtctattaggtaaatattgaataaacctacctgtcgcctgtagggtcatacccaaatagctgttgggtaatatgttatgaacgaaactataggatccatttgtaataaatgaaaatctaaggtccatatggcccatttgagtaagttttttaaggcccattatcgctcgagcctcggcaactctctaacagtaacagaaaatccatcaattgctcggatttatttttctttcttttgaatccttccacttgcagtagagaaatttcaccatgattttactgacttataagactaatttatatgttaagacaaggattattgtttgtggaactacaaaattaagacactaatgaatttaagttctatccttctaaatgaaagaagtttggagactgaaaaccaatcgatatttgtcgaaaactttgatcccatatattatttggtatgttgcctagtttttccaaagtcctattactttaaattataatctatttgattgtattttggtatatgcatattttgatatcaaatatccacaacaccttcatgggatgggagcttccgtaggtttgaattcgatatataaaatcagcaaatactcttttgaggtgtaattttattttattggaactaatactacaacagagttaaagaagatatttgtgggtttctatatacacataatatattatagagttttatttcacaaacagaaaaccatgatgcaatccatacataaagctagcacacacaagctatgattattgtatagaactgttttccctcgagataatactgtacacatgcatacaaagtcgtttatatttatatgttcctataaataataatagtttacattctcacttcttttcttatataaaatacattctcacttcttataatttatgtttagtaaaagataaaatctcgggatatctttggatctcaggatatctcacaagaattcgataagttcatgtgtgtttattagcgattgtgtatcggtcttttcttgttcgcagaattataatccatatccatcaatccatcaacatcacttcctccaccttcgtgccttattttccgactctcttgactcttctccacaaccaatagcgttctattccttactacttctcgtaagcttcgtgctaaaaaatcaaaatgtttatatatcaagaactcattattgggtaatatattttgatattcaaccaaaaaacaagaagaagattcattcaaattatacttgatatagctagaaactcgtgaggtgagcgcgcttgtgtgtatatatatattagctataaatttaccttgagtaggagaggaaatgaagagtatgagaagaagtgcgacgaggaaagacttgtgggaaaccctaattgccatttttggaagagagttttttttctttggttatatagaattatcttttgttgaacctttttgtgtttatatatagagatgaatgattctatgatcagtttatggtcccaattttatatcggaattgaataacgttttggaagttattgagacatatgggtctaaggatttgacgtcgatatttctctgtcttcccacattaacatgaatctatccccacaaaattaatatttcttgtttgcaaagcaaataaatgatgataatttatgcaatcacgtcttttgaatgagaaacagaatttcggttacaaacttaatttcacatttgtatatgtaagaaatttaaaccgaaacacataccttaacccagtttagtaataaaaaaattcaggaactttggtaatcaaaaggtcggatgaaatcacgaacgaagatcaatgacttgtcacctttgataaatgcctgtttgtagttgatttcttgaaactatctcttgaaaaacgtttttcttctctttctcaacactttcctcagttttcaaactgtcaaaatctaacttctttctatgtttttaaatacaagatcaatatatattacaggaagaggaaatgaggttaggggagtaataacttgccatgatctattaaccaaaccagtttagatgttgccaaatcatgggtgcacactaccagccgaccttaaaccaacagtttagatgtacttctacatgatgtctaaattgatataaaccatccagattctataaccatattcactataatgttgtctatctcatatagactagtgggataaaactcaaggagattattgaaaatcgagtggtcctttgatcatggagatggagttgtggtccttcaaaggaatatgatttatcagaacattgaaaacaaatgattaatacgcaagtcaaataatggattcgtaattaataacctagtttacattcaatattgttctacatacataaaaatatttatgtagtcaattgtggacgaagagatatattactaacttcgtatcgagacttgtaagagatgatatcgtcaagtttgttgtgtcatgtttttggaaccattttcattcatgagtactcttcattcattattggggttgtgcgttcatgacttattgtaagagaggatatctcagctttacaggatttgaatacaaatattaggcttagaaaatcttacttagccaaatcatgaatgcgattctcgttgataacgtgaaagtttgatcataaactaaaatttggattataaataatggtataaactggaccacaatagtagaataggggaagtagattattggagtaggggtcggggacattgttatagagagtgcttaaatatggcaaaaaggacgtaaagtttgttgtgtcatgtgtttcccaattagccattcattactataactcaatttcttcacctataatttccgacaagagttggtctactttctttttccatttatttaaaatcaatcatccaaaattaactattttttttattgatattactattccacgtgaatgaaatatggttcacaattttatatttcactcgttaaaatttatttgctacatccaaattattatatatatgaggcaaatttaagaaatttttaaaaaattgacaaaacagtatacatccaagtccaaagtctatgctctaaattcatatacggcgttatattttaacaaaattgacaattctagtcaataaatagtattgtgatccgatttgatcgataagatttatggactaaaaagtttgaactttattttattatgaccgttttgataccccattgaaatgtatatggacctatgacctgactcctgaaataattatgtgtggacctaattatttataaattcttagtgacaagttgtttcgaacactttcaaattttattatagctctagtttatatgattagctagatgagttgattagacttttacgtttgaaaacaccgtggcaaataaaaaaagacacaaaatttggaaaaaatctagatagaaatcagccaaaatgtcattgtgccaagatgtagtgacaatctccagacaaccaccttgatgaatgtcttgttagtacagataacaccatgaccaaaagaagaagaaagtgtgattctgtaacttttgtttttatctgtccatagatttttgaacgagaagtttcttctgaggattagcataaaccacgtagctcggcgaagatcaacatcagggcaatgtttttgcagacaagttgaattgaaagagggaccatgagagcacatggaaggttttggcttcaattttgatcattagtctttgtctctctttcatcactgttaacaagtctacatttaagtcttgagagctttagacaagacatgaaatcatcatatcgcctatcgacaaaatcactatcagagatttgtctatcttaagggtcaattcacattcatccagcttctttgaaagattaggaaaaagtgttttgtgtattacatgagacaatactttaccacaaacaattgagactttacaatggaatgatttatgtttttcatctttcggcaaatgaaacaagattttattcagtaagataagtgttcacctgtagagttgggattgtagttattattaccagactcagcctcacacaagttgaagtcctgaagggttcttcgaaccggacttgagagaccatttggtggaatcaagagtttctcttggttacaatcataatgttgttgttgtgctatgtgacttgaaggaacatgagctactgatgtatttacgtttggtggagcgaattggtgctgataaaactcttgcatggggagtggtatcgacgtctcctcaggttcatattcaagcgcattctgcatatatggttttaaaaggtaaacacgaataactttcagatcaaactaaagatcgttgggactttaatgcgtagctagtcaagagaggtataatcaatctgaattccaattacatagcaggagcgtaatcagaaacgagatactgttttcaaaggaaagtacctgtaagtaggtagtaatatcagctgtggatactctagttccttgttcttcttgtctcacaatccattggtaaagcttctcctgtaaaaagaaagaaaaaagtaaaactcaatggaccaatcaaacctcaaatctcatactacaatgtcatgaatcactattgaatgacgccaagaacgtcaagctgccaccaaaagagaacagccatcctagttcatcaatctagtaaaaaacaaaagtaagcacttcaagatcaaaaggccacaacttttatcagtaagactgcttgcttagcctcatatctaaactagcttcatagatcataaccaatttcagagtgtgtctccaattaactcacgtacgacaatcaatcgaacataaacaagccaaagagatcaactttaccaaaacaacacataagaaacaacattgaatatccatgattcattctgtgactctaaaatctcgagagcaaacagaaacccaacaacacataagcactcaatttacgattcaagatagtcaaccaacatcaaaacaagcaacgagaagaaaacttttcaactatgtttctatctatcgaacccagaagccaaaaatcgaaactggatataaaacaaggtcaagagagagagagcagagaccattccgcgacgttcaccggcgaggaaagaaacgcgttggtgattcatggcatgtgtatagagctgcgagagcgaattagcagcgcctcgaaacgcgccatacatggttcgatcaacctcatcgagccgcgtagcctcggattttcgtttcttccccattagagtccgaacgaatctcacaaaccctagaaatagaattgtccaagttcttaacaatttgtaatttagggattttagaaagaagaagaaggattattgccttattggtgaagggaagaagaagaagaagaaagacttgtggcatttactctgtagagattctgccacgtggctttcatgctacttttaagggtcccatatatctaaaaacctgggccccactattggctttgcagacaaaaattttgaagctttggactgttttttttttctttggtccacgaatttttttttttatgtgtagaaccaaaccgttaataatttgtggatcttcaatgaaaatagtagctaatcacatattttgagttcagactgatttatataccaaaaattaatattaataaactgctatctcattgtttcaaggatgtattcgtttaataagcaattcgaccaattattaacagcgatatactctcttaaccaaaaaaaaaaaaactaactgattccgaaaaaaatacacacctctttgtagcttgtaattctttctaaaaatagaaatttattttaagcttaattaatctttcactaacaacctaaaaacattcctattacaacgaccacccaagacacgaaaaagaattttaccgactggaagaagaaaaaacatcaaccagacaaaagaaaagaaaacaaaaacacatcttcga

SEQ ID NO: 962 - DNA, 81494 bp, Arabidopsis thaliana
gatcaaacaaaccctaattatcatccatcgtcgccttctcaatatatatggccggaagagcagcgatgctcgttaacgtcgggacggttataatgaccgttttgaccctggctagtttggtcggaggcttcggtgtgaattggggcaatatcgcatcacatccgttgaatcccaacattgttgttcagatgcttaaggacaataagatcaataaagtgaagctttttgacgctgattcatggacgatgaatgctttggctggtacgggcatggaggttatggttggaatccctaataaccttcttgagtctctcgcagatgattacgataatgctaaagattgggttaaagaaaacgtgacccagtatattcgtaagggtggcgtcgacatcaagtaaccttcaaaactttttcatttttttgtaatcatgtttttaccataattctatctgatcgactacatgataaaccgatttgataaatagatcgattttggttggctatttatttccaatttgaacaaaatcgcaccaatgagatgatttcatttattcagacaatttttttcctgttaatttttaatattcttagtttcttgttaaaatttaataataataataaatttgacattatattcatctaaatacctacaaaccggtaaaagtcgctgttttgggtgtatatttgaccgagaattcattcactaggtacgtagccgtggggaacgagccgtttttgtctgcatacaacggatcgttcttgaagacaacatttccagcgttaaagaacattcacaaggcgttaaaagaagctggacacaccaatataatgaaagccacgatcccacaaaacgcagaagtttaccaatcagccaacgacaagccatcagaaggtgatttccgcaaggatgtcaaacaaacgatgcttgatatcgtcaatttcttccacgaaaacgacttacctttcaccgtcaacatttaccctttccttagtctttacctaaacgagcattttcccgttgagttcgcttttcttgacggtgatggtcagacaatgactgacaaaggaaagaattatgataacgtgtttgacgccaattacgacacacttgtttacgcgttgaagaaggctgggattcacgatatgaagattatcgttggagaggtaacgtgacaagcaagttattaattagatatatttatcaagaatgttattgagtttggtttatgtttttctttaggttggatggccaacggatggtcacaaatatgcatcgccgaagctagcggagaaattctatgcagggcttatgaaaagacttgctaaggacggtgggactccaacgaggcctgaaagattagaggtctatctcttcggtttcctcgacgaagacatgaagagtattcttccagggccttttgagagacattggggaatctttagatacgatgggacaccaaagtttatgctagatttcacgggacaaggacgccaaatggtgcccgttgcagctaaaggtgtgcagtacttggaaaaacaatggtgcgtagtgaacaaagacacggtcaatctagacgaagttggtcctgatctagactatgcgtgttaccacggggactgcaccgcgatggaagccgggtcaacttgtagtaagctaaccaaagtccaaaacatatcatacgcatttaacatgtatttccagatacaagaccaagacgttagggcttgcgatttcaaaggagctgcaatgatcaccaaggtcaatgcatccgtgggaagttgcttgttccctgttcagatcgttagtggaagtgatgatttcaggatcaactttgtgttcggaagattcgtcgtctttggacttgttcttcttggattgctcacggttatataatttgtttttttgttgttgtttggttttctttttgcaatttggagggatttattcgacacgattaattgttatttgttattcgttttaaaaatgtttacttttgagttagttcatttatctgtgtttagatcagtataatcaaatcatacactcatttatagacttgtttttcatcttcctatattatttggaaagtacattttaaatgtaactttaatttttataattaattacatgacaatgccattaaaaaaaattaattaaaaacaaaatcctttaatgacgtaattaaggttaccaaaatcatttaacgacaatatttatttcttaattatagggcttattatatctaaagacgggtcatcaaagatttcctaaactgaagcaaaatataccgaatatttaaatatctatctgttaccaaattataaacaaataagttaataaatcaataactatttggagggacgggtttttgaatcaacattaataaaaaagtaaaatataattgatccactgtttcaatacgggttaaatatttaattattattttttaagaccactaatattaaacatatcaaatcatcctaatttagaaaaggttatataaaaccaaaaatgttatgtggtatgtataatgttactatatataaaattaaactataaaatataaatgtattagagaatgatacaatttgtaaaacttttatatgtaataaataattttcaaatttttaaaattactactttaaaaataaatcacgggatgggtaaagaaattacagaacggattttattttggaattgagttatatggtggatgtatttgaatcaatatttataaaattttaaaatattattaatatgctgttttagtaagggttaaaacttcagttttttaacaattgtctcatggattcgttgtatagcgttacttaataacaattataaactgtaaaatataaatattttataaaaataaaatttgcaagttttaatatatattaactttaaaaaataaattataccgcagtataccgcgggttaaaatctagtttatatatatttcacttaattttgtctatgttcactatacatatgtaaactcaagagtcaagactattcaattatatcatcatttcgcaaacttataataacaaattatataatatagtgataagtgaagttttgcttactatttatcaaagatttcatcttattttcaacaattctttcaatttgtaatgttatcagtaaaaaaattgtagtatataatctgctagttaataatacgaaaatatttgttattattgtacgaaattatcaattatgataattgtgtagtcatatcaatgtaatgaatgctgctgaccattctatttcttctctccttattcccctttgctcctccttacttttactaaaattccctcaactcttacgataagagcagagagaagaagaagaagaagaaagtaatcgtgatttgagagagagattcaaacatacttttttcgatatctatgttaattttatcttcacgatatgcaatgaaacgagatgttttaatcattgtaatctttacagtgttagtattaatcattatctcccgttcaagttcgatccaagctggaagattcatgactacaggaagaaatcgtaatttgagcgttgctcgatcactatactacaagaatcatcacaaggttgtgatcacggagatgtcaaattttaataaagttagacgaagatcgtctagatttcggagaaagacggacggcgacgaggaagaagaagagaaacgatctatccccacaggtccaaatcctttgcacaacaagtagagtactgactactgagaaagatgcaacatacttcgacttcgtaaattgttcgtttggtgtatatatgtatcgttataagttagtttacttttcaagattaatagtctttaattaggttgggttggaaactctaaaatagtatgagataaatttcaattgtttctagcatttaaattttgtatgctcaaagttgctggaacgatatggcaaacagaaataatggaatcgaaaaaatatcgtgatatgttagaataaactgagtaaaagtacgtttttgtgaattttcttttgtcattgtaatttgttttaacaaaatacagtattattcttttttacgtactaataaggtatattgttgtatatataaaggtcagtaacttgtaactcatcttttttttttgtttttttttctgttttagctgataggtggttggtgttcattaataaatgtccatatatcactttcaaagcaattcactaaaatatagatatgtaattattttttattttttcagattttccccttgaaaaaggggttctttcaattagaaccccacactaacacactccttcacttttggccagccgcccttctttttcagtctttcagtttatattttagcctcttttttaaaaaatactatattttattgctttttcttcttcttaattactttagttaatcatagttaaaacacatttttttgtgcaaacgtttaagttttaacactatctgattttaaacttttaatcatttgcatgtaaaatcactcaaataggtaatatttatatgattccagtcatgtgtttcttaaaaacagagccacactacatgtttctgtgtttattctcagttaattagtttttatgtttgttttaacacaatacagagagaatattattgtagttacaaaaacaattaagagtggcaccaagaaatttcgtcttaccttttaagacaagattaaaagaccactttgaaattttgaatcgttgacttaagaatagacttagcaaaaaaacttggtcatacatatatgatatatgtgtgggtcaacgattcatatatgtatgatgatacattgcaatgtgccaaaacttctggaagaacaaaaaacgactaataagaaaaaataaaatatataaaatgttgccaacattaaaaaacgcatttgctgtttcccatcaatattggagtatagtttatataagatttttaacaatattataagctagttaattaatagagttaatctttggtaaaaaaacagacggaattttataactttcgaaatcatattgatctgcatatatatatatatatatatatatatatatatatgtggattcaccagaccagatgagataaccattttgaaggatttgctaaataaaagttaggccaaaaagaaatcaataaagtttgtgacaatatctttaatagtataatttacatttacataattcaataagtcaaatcttattgtgtcttggtgtgcactgtaaagtaaagtcctgtctgcttcaaacgcagcataagcaaacttacaacttaaatcctcagccgttgatccaaagaccaaaatccaattatcaacgttacctaatgtagacgataaaatctcttaaaatgggcccgtaaagcccaagcaaaaaaacaattactttaagtggaagctcacttttcgccacccttattaacgtctgtccatacgtcataacagatgacgtcatcatcatattccttttttcacacgtggcattgaagcaccttcctagtatctaccctgaaattgcttgacataagtagtagttgtttaataatctttatctcttaattatcctcttttcttaacaaaaacttgttacaataattttcatttttatataaataactgaccattataactctttctcttctcttcttcacttgctctagttcttggatgctttaaacctctctctctctctctctcaattatttttttttctatttcaaaaacaaaaaaaaatgaatatctctcaaaaccctagccctaattttacgtacttctccgatgaaaactttattaatccgtttatggataacaacgatttctcaaatttgatgttctttgacatagatgaaggaggtaacaatggattaatcgaggaagagatctcatctccgacaagcatcgtttcgtcggagacatttaccggggaaagcggcggatccggcagcgcaacaacgttgagtaaaaaggaatcaacgtgagttcctttttaattattattgttggcaagattcttaaccaagcaattagtatttcattatatatagttttattcattaatctttttgataataaatattgtagtaatagaggaagtaaagagagtgatcagacgaaggagacgggtcatcgagttgcatttagaacgagatcgaagattgatgtgatggatgatggttttaaatggaggaagtatggcaagaaatctgtcaaaaacaacattaacaagaggtaacttattcatttacaaattactcatttgatctaattaatatgttttactagtacttgtttttaacataacatatggttgcttgataattttctataaccatcttgtaatcctgttgttatagaatatatagccactagctagctagaccatatagtgatttgaatactatttaatggacccgtattatctaccaacccacttggaataaaatttagcttctatatacatcatgcatgtgtgttttgtttatacaaatatataaaaggttcctatagcaaaattgattgattagtggtatatggatcaatgaatccatggttgataatcagtcatcgtatagatttattttgactcatatatcataagagaaacaaatataatgaattcatcatctaaacatatcactttcattcaaagcatggtttgaaagcaatttacacactctgtaattggttaatgatattcttatatatatacatacatatatatatatatatatatatatatataacttggtgcgatatattataaaagtgattacaatttaacatgtggtggatgaatttataatataaaggaattactacaaatgctcaagtgaaggttgctcggtgaagaagagggtagagagagatggtgacgatgcagcttatgtaattacaacatatgaaggagtccataaccatgagagtctctctaatgtctattacaatgaaatggttttatcttatgatcatgataactggaaccaacactctcttcttcgatcttaatccaaatctctcatcctcgttgagattgtaagataccaacaatattaatattataatctcaatgctttgtataatttgataggtgtataataaaggagttacttatttcgtggttataaatgtttaatgtatgtatattgctatgagtacattttgtaggtcactgactcactagatataaaatcttaagcgtatatttatttaaaaagtagtgttgaatttttttgggtcacggttgtccaaaatactgcgatctgaatccaatccttatttgattagactcaagaatgatttagaaaaacctgaattacttgtattcttatatccattattaaaccgacatttgacccgaaatgcgtcagactaagattgtaccgggaaggaaatgtgaaaaaagcaacttgtaaaaaaagcctgtgtgacagctctgtaacttgtaagcgtcaacgaggtcaactgtttcggtttagttgttaccggtaatttggtttataatggattttgatcggtgtgatttatgatccggttttggtgcgttgtgtagattgtcccgaaccgatctcatcttctacctttcaacaacttaagcaaggaaacgaagtcgtttcatatctgttcttccgcccaaatctcaaacactagtaagtaaattcgaagggagtcttggatctctctgatctcgatccagattctctctacttctcttatcttcgatagagaaatttgtatcttcagatttattcgaggaggaagacgaaccctacttgattgatttaggaggtggagagatctttctgaacaagtttgattctgttggtaattgatctgaaatcctaggttttagccgtagatctgctgcttgtttcgatcgatttgggataccgtaggtattgattccatagaatttctcgctcgaggaaggtgaagaatctgcccagattccggagatttttagttagtcttggtgtgcttgttgcttcggtaatgttagatcataaaagtcttccattgtgaggaatcggaggttgctaagagtgtttgtggaagctgcttcttctggtattggattagaatcgggactatggaagttgattgaaacagtgttagttttcttattttgatacctaatctgctcttgttaagcaaaaatgaagttttggagggaacgtgaaagggaaaataaggagcagatcttagcgccattatgtgggcaagttcgagtgttggtagttggtgactcaggtactataacaagttatagtttcatgtagatcgttagatttgattacctattttatggtatcaaaccaagttagaaatgttaccattcttttgtagttttgctgaatcggggtacttctgctaaacctagatcatgtgtgactcaggaagatagattctctgcactgaattagaccatttggttaggagttattgttatgtggtcgttgagctacatcttttagatcaaacctgagactctagtttgtttagtcgacagtgttttccttagagtctgtcacgtactgtgtttgcttttgctcatgataattgagttaattttcatctctgaatttcaaatctttttggtaggtgttggaaaaacatcacttgtacacctcatcaacaaaggttcttctattgttcgcccacctcaaacgattggatgcactgttggtgtcaaggtaacttaaacgtctctgttgttcttcaaatggttagggaactcaagtttcaacccttttttattcttctcacatttcagcacataacctacgggagtccagctagttcttcaagtagcattcaaggtgactcagagagagatttctttgttgaactctgggatgtatcagggcatgagagatacaaagattgccggtcactgttctattcacaaatcaatggtctctcccaacctatccacattgttgatccttattgtgtctgaaacaatgtcataaagcgagacatttcctatgcaggagttatttttgttcacgatctctctcaaagaagaacaaaaacgagcttgcagaaatgggcatctgaggttgcagcgactgggactttttcagctcctcttccctcgggaggtcccggtggtcttcctgttccatacattgtagttggcaacaaagcagatattgctgcaaaagaaggaacaaaaggaagcagtggaaatcttgttgatgcagctcgtcattgggttgagaagcaaggtttgcttccttcttcaagtgaggatctccctctctttgaaagctttcctggtaatggcggtctcatagcggtaagtaaaccatattagtaagtattagcttctgtattagtatttagtgggtgcttttgattatatgatctaatgtgggtttttacataggctgccaaagaaaccagatacgataaggaagctttgaacaaatttttccggatggttagtgtcattaccacacctttcttttcttgtcagatttctaagacacccttccctaaccgagaagaacattttcggaacttttacagttgataagaagaagatatttctcagatgaactgccagcagcttcaccatggtctatttcgccggttccaacgtcatcatcgcaacggttagacgagattacaagtgatgatgatcaattttacaagcgaacaaggtaacaacaatgctaaaaagccaagtctttttccttctttgttgggtttggtctttacggttgattgttgcagtttccatggagatccatacaagtacaacaacacaataccaccacttccagcacaacgcaacctaactccgcctcccacgctctatccgcaacaaccagtgtccacccctgataactacaccattccgagatactctctttccagtgtacaagaaacaaccaacaatggcagtgccaggtcaaagcgaatggatattaacgtctgaagtctctcatctcttgttagctcttctcattccaagaaaactttatgttgcttttggatctctattattctttttgattcttctttgtaggttggtaaagtgaatatgtgtgcttaacccctctttgatttgtacattgtggggtttgatcttatagcaaattctttgaatgtttttttttcttgggttatcatgtattacacactgaatgattacaaaatcacaataatgtttgttatttttgtttacaatctaatcatatcagtttgtataaatttcatgttatttatgtttcaaaatcttcttccacattacaattatgataaattggaatattaattaatttgaaataaaccatttattccttggaattaaatggagatagagttacagaggtacgacaacttcagttcatagcatcgagagaaggcaaggaaggtatgtaactttttcttgccctcgtagttccattttcattgaaacttcttctctttgaaccctctggattctaggctactacaatcagctgaaaaaaaccctaattcagtctctctttctcgtcgtgcaaaaaccctaaaccctgggaattgtgagatcgatctcatgtttcagtaacttgttaaatctgtacctctttctgttgatttagatttagatttctgttttcaattccgtttctgttccgaaattgttcaaggtgaaaaattcaacctcaaaggaaaggttggatttttaatttcaattacgacgatatcagattgttatcttccttaaaaattcaacctttgttttgaacttgtgttccagatcaattttgtttgcaatgcgcagtgtaaaattcaagtcttaaagaagagaaaaatggtggaggtgtggtggtcactgataggagcagcagtgcctgcactaattgctggtcaagcttggaggataaagaagagacatggcgaagaagagaggatcaagagtgctcgaggaagagagaaaagctctgatgaaatctttgtctgtgaaagagtttgcacttccaaaagaatgctgaaaaaagttggagctttctctaaagatcctatccccgacacttgtgttactgtctgcggtgtatctgagctcgacgcttgctctgatgcttgtgctcgaactgtttgcgttaaccagcatcaagttgctaattggaatgacatttgtctcagaagatgtcaaagtgaatgtcttaagctctcttcttcttcttcttcttctcgctattcttgaatttgaaatgctatgatttgttgttgttgttgttgttatcttttgaaatgggaatggtatttgaatttgaagttttcattagtttatataataacattctgagcaaatttggtggatggttacatttcatcatgtgaggtttgtttagtaactttctcagctgttttctgaactacttcacctacaacatctcctgctagttttgcagactcttcaatggcttctttgcttacttctagactccttgtagctgcttctctcactttctctgctttatcttcttcctctatgttgcttttgtcgctgttgcttctgaaactgtctcaagaaaacaacacatgagcttaaattaccagacattagcgaaaatacgagattataggagatgaatgcattgttgtttactctagatttggagggtaaagcttcatctggatcttctgcattgcaccttgaatcaattcccatgaactcggaggaaacttgttgccaaaaatcccacttatgatctttacaatcgatggattctcttctttcttcgcggcactatcactttccgctccatctgcagataccccggatatcaaaatgatgatgatgcagaagactgagacgccgaatcttattcttcttgatccattcatatctatatatcagttaagaagctacagagaaatcaagagaggagccaaaagaaaatgatagaacagagagaaggaagaaagagagagatgagaaagagttggcgccatgtttctcgcatcaaaagaagcagaacacatttttggtttgaacggttcttgcattgaccttaaagagaattaaatcaaaactaatccaataaaagcatctgtcttataaaatttaatgttacataaagactaatcattttaacaaaagaaatgtatgtttagcagctccatcttcttggggacatctgtcctgaaacaatttaagaagataattccatggcgcatttgacttcttgatagctataatcacttgagcaacatcttcttaggggaaaattttcatttgaagaagctagcatgatcaagattcatcggtttctcatactgtactgcaacacactcctcagtaacaacccaatcgccattcacagcgtttgcacagctctacaaatagttaacattaagctatgctcttgaagattttactttaattctttgggatatgtgagaagatcctataagaataataccttggaacaagtgtagacaataagtgtcatccaatcccaattatccaatgattgcttaattcctttatcaacaacaccttcatgtagaaaatatattaatggaggcatgagttgtatctcaaagtgcctttgagagtcgcagttcctgcatttatccggagatttcatgtcttctgtggctagtatcggcttaccgccataccagtacctgaccattgcaagaaaattacatagcaaaagtgaagatttgaaaattagaccaccataggatacaagtgaatgacaattacctgaaacattgttccggatttgcatctagccgttttttgaacttaagataagtcctatctgcattcagggctttgtcatattcatatttctcatcctcccacttttcttcggattcactctcatcattgttgccggttcctttatccttaatagacagagacgaataattctgtgagaatcgatcaacttcttttgaggggatctcttcctttgtataaatgtagaagcacggaaccaccgcaccagtctcaagtttaatatgatcctcaactcttgtttcagatttcaaaggtgaaggctttgctttagtccctgaactagcattgccacttggtttactcttttgtttcttcgtaatggaagccgcagcagaagaagcctctgccagcgccttagctaaactcgcaaaatcaaaatcttcatcatcatcatcatcatcatcatcatcaccgtctaaccgatgtgttttaggaaaggccacaggcaaatccgctattttagttgatcctttctcttttgctatagctttctgaatgctaaaagctctccaactgacacagtaaggagcaaatttcagaccgtgagatcattctctcatataagtgattgagagtgatcaaagaatcataagtaacaaaaaaagaagacaatacctttgttcagaggttccacatttaggcatcaagcaaccaaatatatagagggtacgctcttggatgtctaaaatttcagttgagattggggcatacacctaaatgcagagaacgaaagagaccaaattgttctaattattcagcttcttaaactcttgaaacctaaaaagagtgaagctttggatttgaacaaaaacctgagctacgagagaaagtttacttccacatgaacaacaattgagtagttctggtttcagtgcatcatcgggtattggcggccaatcctaaaaacgcactttgatcaaaaatcagaacgaaagaattgagctttctatgaaaggaaggaacagagagagctaggaaggagttattaccggaagaccaccgattttggttgtgtagtgatcagaaggctcaagctcatcttctgcccacttcccaggcaaccccagaagaattccgaccattgttacagtttcccgatcaaagtagaacagagctctttggtgaaaatagctcctacaaggtttcgaaactttcgttgtatcgaatgcgatgttgatgatgatgaagagaagagaagagtagaccccggttagtgctttgagataaagccctaaccggttttcccggtttccaatcgaagtaaatggtttaattgagttggacgaatatttgagccaatattaggttttgcactgaaattcaatggtttggttcggttcggttccatgtttgagaataaagtttcttaatttttacccaatggggctcaagtgttgtagaaacattaatactctctctgcatttctaaaagtaatatctatatacattccacaatgacgattttgtgagactgtgaagaagccttttttataaatcttgactcctttcagttttcaatgtttgttcagttccatctcttggagttcttgctagcctttgacttctgtttagcttgttgaaatgcttgcatcttctgcttcttcctcgcttctttctctgcttttgacatctttgactttgccttcacttttggtgctttctcttctagctctgcttctctctctagctcctttgttctagcatccagattcttctccaagtaatactgagacattcacacattccaaaagttaatacagagatcatattatactggaaaaaatgtagaaagagtgcaatccgaagtgtacattgtagtcgcctgcataatcttctaaacaaccatcttctacttctatcactctgttaacgatttgtttgatgaagtatcgatcgtgggataccgcaatgactgtaccttggtactcgtttatcgcttcctgattcaattgaaaaagagaattagcctatctccaggtccaggaacagagttattatcattgtatccaaagattctcaacaaattagagatgcctactactaacctcgagcatttcttttgaaggaatgtctaagtgattggttggttcgtccaaaacgagtaaagtagatggcgtcaccatgaatttgcagaaagcaagacgcgctttctccccaccacttaaaagagagacctttcgatcaagcatgtctgctttgaagttgcagcgtccaagaagaccttttatatcatcacttctccagtcttctgcagcttcacaaacagtttcaagcactgttttatccaaatcaaggacctcagcctagcgaaagaataaccaaagggttgaaaccaaattatgtcaataaagtgagcaaacctgtctccaattgtttagctcttgaattgattgagtaagtgaaaactgacctgattctgttcaaagtagtttggcagtacattgtgctctccaagaataacttcacctttcacaggcttctctaaacccataattagcttcaataacgtacttttcccacaaccgtttggcccaaggatggcgattttctcccctctttctattgatagattagccttcttaaatagcatctgctttttcaacaatacacatttttcacagggtcaaacgtgagcgattaaggatttatactattgtcatgagttatactctagtaactcaccttatcctcgaaaccaaaatcaatgtttttaacattgactaccgatcttccacttgtcccacgctctggaaacctaatcttcatctgcttccgctgaaatggcttctctattagctcctgttcttgaagcttctctagtttctgttacaaacaatacaagaggaaacataagcttcaacgtctccagacggttcacagataaaagagcaagccagaatattggcttaggaaacagtagaaatttttttccattaatgtcacgccctagcaatcaccacaatagttcagcaaattagcatattctttttgtttgcaaaccttttctgcagtggaagcacgaccagaattggcaccagcaccaagcctggcgatcaagtccttagttgagtcgatatctttctgttgcttttcccacgctgcattctgagtttcgatccactcagcctttgagatcacatactgagaataattaccctcaaatgtcctggacacacccatctcagtttccacaattttagtacataactgatcaagaaaggctctgtcatgtgaaataataaccataggcacatcttgcttttgcaaataaccttcaagccactcaatagtatcaagatccaaatgatttgtcggctcatcaagtagcagcaaatctggatcctactcgcaaagaaacacacaattcattcacattagctttgagttcaaactcattgaaaggataaaactttaagtaaacaatcattcatatacctgaagcaaaatctttccaagtgacattctcatttgccatccaccactaaacgaagccacaagcctatcagcatcctcaggagcaaaccctaattccggcatcaacttactaatcttagcatcaacggaatctaaattcacagcctgagctcgtctctgcaacaaatcaaattcatctaataaccttcccataagatccaaatcatcaacagatccctcaatagccttctgaactttctcaagcttctcagtaatctccatctcttccttgaaagcagtcatgaactcttccctcacagtcttactcatcgaaacctcaaattcctggctcaagaaagctactttcatattgggtttggccttgattacgttaccagaatcaggctcttcttgaccagtgataatcctgagctgagtcgtcttcccagctccgttcacaccaactaaccctactttctcacctctcttcacttcccatgtcacatctttaagcacagtcacgcctttgtagcttttccttatgttctctagcttcacacctgaagatatcccagaagctccgtttttggaactcttcccgtttcgtttccgatcggagtcttgctgagagggttgcttcgagaaaagagattcgatttcgtcttgacgctgtttaacggaggtctcgaggctgatggtggagacttgggctctgatggtggagatatcgcgtctagggttggaaatggaagagattttgatgaaattggaagggattggagatgtacgtagaccggtgaagaaagttgaacggaggtcgaggctatggagattcgttgataaacccatggttatatgtagcgatagagagcgcgagagaatctcgctctactgaagaagaagaagaagcagcagagtaagaaaccctcgagagagaaatcaaaagctttgataagagtttctctctatcgttttgagcgtgagccaccagattttatttgatttttttattagtttgtatttttttctctatattcgaaaatatatcattatcaattatcaataaataaaatcaatacttagaaaataaattaatattattgacgaccaaaaaagaaaaacccaataaaattatcttcagttatcacaaaaaattggaatgaaaatagtgaaaaatcgaaatatgtatggagcatgaaatatgtatggagtactattttacaataaaaaatgtatttggttgcaatgtttgtaagtactaatggtagttgtattgcaactttctatgaatgacaagtaaatgcattctacgattgtataattctagtttttgaagaccatattttgatataatgccaaaggaaagaagtgatacaaatcggagtattcatttttactaactttgagttctctgccacatgcaatgcaatgttcttacaaagtcaataaatggatatgaaataaagacaaatataacacacacaaaaaacaaacgaaagaatctaattttgtggtgaggaagaaggagaagagagggtagaagtcttgaagagataacaaatccggtgaagttacctcttttgtggttcacatagctcctttgaaaaacagacacttctcatactctgccacgtgtctaactatatcatcaaccacgtcagtttctctgtggatctcttcacgccacatcgtcacgcaacttgatttctttttaaatttatagttttattaagtttttggtcgttatgtatatggttttagtaagttgaattcgtaattacaattttaaatgaatatgcgtcaacttattcacccgttaattttaaattggctgttcatggaacttaaaacgtacgagcacacatcttttttctcaaatatgactgaaatagtgaaattggaaatgaaaattaagaatcaacatgtatatatatcatgtaacggctcgcatcattaaacatgaatttatgttaatcgcctccatgactaaatagttcgggattgttaatagcagtcatacagttgacgaagcaaagtcgtacttatttatatcttattgtggacttttttgttgctgtagatgatatttaagtggatacagattcactaacgtcggctaggtttgattttatctaacaaaatacacaaaatgatgtgagtttttttttttgggttcttagtggagtcagtgtgtgtattcattcagtgttcactaaccgctctaggaacaaaaaagataaatgaaaatgaactaatcaactccaaacaaattttgcttaagctattggaaaaacatatcactataaatttaataaaatcagttgccggccttcaaatcttcaccaataaacttatgttttaatatcataacttaaaggttagaccattaatcgacagtatactaaacgacgtcatttaacaggaaatgagagcaaagctgacgcggattaagcgtgtgtgcgtgtccgaacgaatggcagtatcgtaattaatgcacaaaagctaaccttttcccgaagcagaaaaaaacaaaataaaacaaaaatatttttgatatgttgtgtacagtatagttgtatcaccaccaatcgacctgttactttgctgtattaaattttggtatactttttctttcgcttataaattgctctgtatcacccatcttcctcctaagatcatctttaacttattataaaaaaaaaaaacaggattcactgctagctacagaagctttgatcacatggaagatcgaaaagaggtttttattttttattttctggtctaatcccttcgtcttctgtgttttctccttacataatattaaagttaaagtgatacattaaataaaatgggatgttcatgtcaacttcttgcattaatattcgattttgatgtgagaaattagtctctgaatcttggtgaaaaagtctttttttgtgtgattgatttttaggattgtgtttttttctttctaatggttcttgaaaataaaagtaattgaaatggagatttatttggcagaacaagaactcgccatggctatcagtaccacagtttggagattgggatcaaaaaggaggatcaattgattactcaatggatttctcaaagatcagagagatgaggaaactcaacaagagagatgcttctcgagccagtcttggcaacgaggaagaactcattaacccttttcatgatcagcctcctgttgatactgccaagcctaagaagctaactacggttcacagtgacaacaacaaccgcaatgagttctctcaccatcacccacactctccttctgtaagattcttgttgctctatcttaaagattcattgttttgaatgtcagtccattgtatatgaatttgtattagctcctgcgttcattgaaaccggtaggtaggtgttttgacttggttaggatatgaaatccaactttttagccttatatggtttatttctggcaaaatgggtagattttgtttgggtcacacattgtttaccctagttcgttgttcatgctcataccaataccaaacttttgaaacttatgtttttgattgcatttacatgttaacactttgaatatccattgtaagattcatattttcttgatgaataggatgataatgtttgtgaattgttcatttgatgtggaccttcttgggttggttaggtttgagaatctaatattgtaagcattatatggattcttctagcaattgggtaaaatgtggtccttcaatgtttggtcaagttggttgcttattgctgtttatgactacacatgaaattaattttatataccccaccaaacttcacaacttcagattttgagtttaagttggatttggatcttgattggatatgattgtgatcatatggttaaggaatcacatgaatgcatagagtatgttttatattgatgataaaatattgaaaagaatatgtaaaactatattttaaaacagagtaaacttatagtagtacattaccctacaaagttattataatggattctttctttcaatctgagtaaagcataatcctttattttgtacctaccatgtgaagtgacataaataatgttgttcttttttttggataaaacatacttaatcttgtttgtaaatgactttggaacagaggaggagaagaatcttcagctgcttcaactgttgcgttaaagcttaaaggtgtttacttttatttatgataataacaacaaggggtgatatttgaagacagaaatgagaaatggtagtgccaccttgttttccacatgtgtttcttcggctgcatcacaattaaaatttgtctgttgttgtttactgtgtatctaactatgtttgctaaatgtcaagtgtagtaatatatattttttgtaatttttgtttggtgtatttagacactgataattttcattattgtgtaatgtagggcagatttgtgatacattacgataatgcgtttttagattaatgaaaaaaaaatgaatggtgtttactcgaaaagtattcaaatatcatgtttgcatatataacaatgaagttacgtttaataaaatcatcctctcgaagttgtagagatatggattacaaccaattggcaggaaaaaaaaagccttaatccatacgaagttatggtggtggaatttataatggatatatgcaatatcaaacagtagttgtttatttattggtgttgtatataattatgattttataaaaagtaagacggttaagtgaatcttttgttaccgttgtgatagatttccttttagtttttgcaactcaaataagaaaaggaaacaatcgaaatttccttttttcatcaaacaaacgttacttataaatacacccattctctcttgttcttcgaaaccctaatccagaaataacaaaattcatctttttctttctctagttctcttctagaactatgaagtaaaccgtaagattgacttcatccgtaagattgatcggagcagagaaagcatatcttttcgtgaattatctccatcctctgttgtgaatacatcttaagtcaatccagatcgatttcatgtctcaaagtctcccataatttcactcgatcaacgatctcggcggtggattctgacgaggacggcgaaggagaacaagacgacgaaggatgcgaaagcggaaaagaggatatctagaagacatggacagtgaaagcgactagcgagtagagaaccaaatcatgatatgtgtttggttctgttcccatgtcctccgtccgtccggcgacatcatctgaaaatcttgtgtttcgtcaatcacaagcaaaggtatttctttcttaatttccttttctattttttgtttcttttattaaaaagaatttcaaacttatattattacttttttaattaagttatattattattaaactatttttatattcaatatactttacacataatataaatttttaaaacttctttttcttttattaaacaatgtttgtaaacatatttttatattactatttaaactttaagggttttctttttatgaagtgttaaattttcagattttgtgtaaactaattggatacatcatccaaacccgtaagaggtgttctaggttcaatatggtttacacttatttttgatttttgacacttgtttttcttttattaaaaaatatttttagaattatatttttatattactattaaaactttaaaggttttctttttattaagtgttacatttctaggttttgtgtaaactaattggatacatcatccaaacccctaagaggtgttctaggttcaatatggtttacacataatataaatttttatcacttgtttttattttattaaaaatattttaaaattatattttcatattactattaaaactttaaaggttttctttttattaagtgttaaatttttatgttttgtgtaaactaattggatacgtcatccaaacccctaagaggtgttctaggttcaatatggtttacacgtaatataaatttttaacacttgtttttttttaaaactcatatttttgtattactaataaaactttgattttttttactaagtttaaaattttttctacacaaaatccaaatttctaagatagttctagttcaatatggttaacttacaagttatacaagtgatgaaaagttaatggtttaacccaaaatatttaaaagtgtcagtagaacatagacgttgatatggccgagttggtctaaggcgccagattaaggttctggtccgaaagggcgtgggttcaaatcccactgtcaacaaatcctaattttttggagattgtttttatcaatgaacaaaatttattaagcaacagtgagattgaacatgccatcatcatatatggcccatatcaacatcgatccactatttcaacaacatgcttcgttcgtcttctgcttactttattgcttttaccattagcaaagttacaaaaaagataagaaaaccaaagattcttcttcttttccacgtcaaatgttttcctcaaagccgtccgtacaatgacaaaagatctctgagtctgtcagattcagtttcaagattatcaaagctcgttgaacttggaatcctccaaccccaattccccacctttttttttgtgtacaaaaccaaagttacattgttatagacaatgtatcacaaaccaaattactattgctatgagctaaaaacaaaattgctatcagttgaaaacaaaatggcagtgactaacctcagtggctggagtgttcatcctggcagaacttccaagtcctagaatgtcttgcatcggtatgattgcggtttgagcggttgaagagaatgcagcttggatgactgaccatgatatatcgtcttctccagctatcgacaggtatttcattgcctgcaacacgaggatattgccattgtgaatatcttacaatcaaaaactgagggaaaaaacagaaacctaatggtattgagattaatgaaatgaccttagacttttcttcttggtccagagtgtcccaccagcctcgaatctatataccaaagaaaaatcaacgagacagatacatttctttcggtttattttttatccattgagtaaaatcaacttacagtgtcgttgtcatgagttccagagtatacaacttggtttacttcatgattgtgaggtaaatgtgggttatcggcgcctcctccaaaagctgaaatcagataaataatcaagtagactgagagaaattaaaaaggcagtgaagaacatgaggaagccaaagctattttaccaaattggaggacggccattccaggtgctccgatagatttcctcagctcaactacatctttagtaataactccctgtcttatggcaaaagtatagcctccattagcaaacaatcacatgcaatattttcaatatgtaatttgccttgcagaaactgagcatatgattctagactcggattattgaggaatacaggacatcaagaatttctactggttcaattgatatttcacagtcaaatgatcggccatcaaatattctacaagcaagtcttgcaagttcattataaactcataaattgatacacatctattataacgtatcaggttgagctttatgtaagtgctgagtatttgtataattaagtctgatagcttaccaaatcttcagctatgattttgatcttcccaacgcctttggaaatggcatcaaataatgactttccaggtcctacctacattaatacaacttttgcagttcttagtttctttaccttactttattttacatcaatgaattaagcaaagcaccttccatcgtccaaccatggcaactttcgcttctgcaaaatatcacaactgatcaatcctatgcaaataccaatccaatatgtagccaacatatatgatcagtcactcttttctcgtttgaatttaaactcaccagaagggaccgcccaaaaccctgcaaatcctctgaagtgatcaatcctgcattcgtcatacaagtcctgtgcgcgtcttattcgattaacccaccaagaatattggtcactctccattgctttccagtcataaagagggcttcaaatcaaagaataggatatggaacaattgtgaagtacaacaaattgtttagggaaagccagaaacaaattcacgttgaatatgctacagtaacactaaatatattgcttacgtcgagacaaattataactaaaaacaaacagtgccttttcctaactatttaagtgaaaaggtaaacaaaacatattatcagtaaactaagttagcagagtgagtagcatcaatacctgccccacagttgaccagtttcactgaacaagtcaggaggaacaccgctaacaagaagaggaaagcctttcttgttctgtgtaaagcaaaacaaaaaaagagcgactttcaggaaagactaattttcttcctggtacatatgataaaactgtttgcctccatatgttaaaatttacttgccagtaagaaatgtttcttatttgcccaaacgtctgcactgtgatatcctacataaatgggcatatctcccattatatcaactccttgccgccgtgcatactcacgaactttctgccactgcctttggaacaaaaattgcttagcaatgaacaagtctatctgcagcaaagaagaagaggttactctcaaaggctttcacaaaacattattcatgatgaaatcaaatccaagaagttagatagagccaccaaaaaaatcttacaaactccttttggctttcatatatagcttccaaggcagaaagatgacggtttttaagtggttcaggccactcaaaccaactgtatgcatttaaagtattgtcaatagctgcaaaataagcagcatcttcaagccaacctgtacatagtgaacacgaaaacctcaataaaattttgtcatccatattaagccagcacattgttaacaaacgattctttaaaaatgtatatgtctcacatgatatagaggggtcgttacggaaatctagcagtttgctcttcagttcaccattgccatcaataagcctctttgctgcctagaaaaggtcaatgatcaaactctacttctcaagccaatagaccaagctctagtttaccttcgtaatcaagggactctttaacttgttggcagtctgatagttcacagagtcagcatcactggataaatataagatatcagacttgagaatgagaccaaaaaaaaaaaagagagtataaatttgaaactgtacattggttgtgggagctcatccttgattaacaagccgtctttcacaagctcatctagagaaatcaacaatgtgttcccacaatttgcatcctagaagaagacagttaccaattatatctgagaaaaatgtgatagaaacaatgaattttgaatctatggaaaaaaaatcacaaacctgtcctgcataaggagatcctccttcgtctggaggaacaagaggaagaacctgaaatatcatcaacattgctgttaaattaatttcgtctactcttgagactaatcacagagaaattcacctgccaaacggagcaaccagtagaatgaagccaatcgatgaaccggaaggcttcttctccgagatcaccaatgccatgaggaccacgaaacgacgtcgggtgtagcaaaacgccagctcttctcctgctctctggatccggaaccggtagccactgctcatattctgatggaaaatcttcaccgacgctaatactagaaagacacgtggaattactcgaaacgacctccattcgaaacgactgcgacggctttgtcctgttcctgaggacagctgcgtcgattaaagaatccggagaggataatcggaaaagcttgagagaagaacagagtgaaggagaggacgacggcctaagtagaatcgacatggataatgatcatccaattcaaagctccactccactctaatccaccagatgacaaaatcaaaaacagtcgagatattttgttgctcttgagagagtgtgagagtgagatcacgtgatcatcacgtgcggtgtaaggaaactctcgtgaatgggcgccattttcaaggccgtattttgggccttttttaggccgtcgagatcggatcctatatcccttaaaagttaaaaacccatgagatccagaataataaattggttcaatggactattaaataattataaactgtttcagctatttattttatgttttactatagtcaatatatttttataaatatataatttaaatgcagtggtatcatctaccatcctcgcagtttcatcgactggtcaatatattattcaataaacatgcagcttccgtatatgatacttttctgctaaaaagaggaatttgcagttcacagagaggtggtgaggaccactcttaaagatattccgatatgaggaacaaataattggagcatggtcccttgagccctgcctgatgcattacaaaaagtagcatcataataaagtggtaggtgttgttgaactatttatccgatggtgacagaatttatgtagatataataatatcattccttgattatccatctggaaggtacatccatctccacaattgcattcaactattgaagcaatcatgtgttgataatccccttctgtttattttagtagaccaccactaaacatgttatttatattagtgtatcaagagagaagaaaggtatcttcaacacgcaataataaatctgacatttgaaaaaggaaaaacacatccttatcgaaatcactagtcgaagtcgcatttgtcagatactattgttttaacttcaaactctaacttccaagttctataacataagaaaaagaaaacaaaccccaacagctaaaagtataattaaagaagcaacatttgagatctcaacctctgtgttgttgagcatgaagtgattgtttgggctcagcaccacgcaatgtaccaatccaagctggtggctgcatccctgtctgctcataaaccgtatcaagaaccggtggtaacatcttgtagagtccagcaatatcgttcatcgtagctttaccaccaccgttcatcccctgctcagcaccaccatggttccacacgctgatcttaggctgcaggtccctgatcgcaacagcattggtcttggcaatatcctgataaatgccattgttgatcatcaagaagtctctcatggctgagtaatcattgttaactgcgcctaagagggtcttgaggtaagtcccctgagcatcggccattgcgacaagtccctctgcatctttctgttttgaatagaaggcagcatcagctgcagctttcgtcgcttccgcttgcttctgcttctcgtaaagaacagcttctgcttgcttttgcttattgtacaactcccagttcgcttcttgcaccttagtttcatactcaacactggctttactgaggaactcagctttaagcttctctgtccgagtcaatgcattcatcttctctactttagtctgaagctcagcttccctcaaagcaacagccttggctgcttcaacctcagccacacgagagttttgggacaaagcagccttttgaatcgcaagtgctgcatcagccttagcaacaagagcctctttctcattctgaaacactttgacttcagtcttcaccttgatctcctcttttgtcccttctcctagcctttgagtagagatgatctttgactcagcgtcaatcttggctgcattctggattgtgagtccagtcctttctttggcaccaacctctcccttcatctttgcctctgctacatcgatcttggcttggtttgctgcttccatctgagtcttctggcccaagtaagagaagtactcatgtccaggcacatcaacaagctgcttcacattggcgttgtagatcacaagaccaaactggtttagctctagctgaaccttgtcaaacacttccttcttaaactcctttgttcctacaattccacaattcaaacacagttcaaacaattatattaaaacagaactcagaaataaagaagataatcaaaaagggtatgtttggttacctttgaagacctcttccatagtcatggaagcaacaagaacacgagtctctccttcgataacaccctgaacaagctcattgacgtgattcgagtgcttatcgtgttgagacataagcatggcatacaacaagagagcgtgaggatcatcaacgcgaggaccgattgtgaaaacagcaggaataacaaagggaagtttctcggaactcatagcttgaacctcgaacgtgtagttcaccggagaaacgtcgaagacggtgcaagactgccatggaaacacccaagacttctttgcaagcttgatgtctgtgatcccaccaccggtgatcgcaagatactgcgatgctttagcgactctgtaactcattctttcttcgtcttccttgaaattagggttttgttgagatttagggatttttctagtacaagtttgtttgtggagaggatcataagaaaggatttaacttatatacaagtttttaatacgcgtaaataaaaaataaaaaaaaataaaaaaaaaatattctcttgaattaagcttttatattcttttctactttctacgaaatttcattgaaacgcggttatttacaaaattctataactgttttggctaaatttgaatgttaaaagataatataattgataacaaaattatgtggaaatcttgtattttgatacatatctacataatttatttttttatgtaatgataaatacatgcatattttttatagtttagatgttgtttttatgtttatctttaactttatttatttgtaagctataatatatggtggatacacgtgaaacatccaagaaatttcgggcatgtatatacaacatagcatgtaaattcaatatggaaatttaatgcttccgaaaaaatattatagctatatttttaggttttttttattttaactactgaatttacctaaagaaaaaaaactactatatttacacatttatagctaattttatacgtttgtcgttgatttagaaatttaaatacatctggatttttttttttttttttgtctctatcataaacgaagaatacattagctaatttaatgaataaacagtaatgactaattaaaatataaataatttataaaaaatcgaattaaaatatttaataaacactataacaaattacataaatatcaagtgttttcacctatttaaccaattaatgtgttacacgtggactatcaacaaaaagcaagatttttgccgttattttctcgcggtgacctgaatatcacagcttcgtcgttttatcttttccccttcacccaactccttcgtcgtcttcgtttgattgtcgtctttcttcttcttcctcctcctcaatcgttacctcaaatctctcttcccgggaaaaactcttatctctctacaaaaaatggtggattctgggaaagagtttttggttttagatagctacaataatatcccatggctaatttggatccaaatgttggtcttcgtcctcctcttactccttctttgcgtcatcggaatattctcctttgatatcgtagataacagctactcgtcttctgattctgttccttctacctctggttcatctctctctaagcgatttctttctggaaatccgattccgatcagtcaccatggtttggggttttccgtcaattcaagtctcgtacagtctcatcaggtaactctaatactatctgtctctttcaatttcgtcgacgaatcatggatttagtcgtacctgctctacgttgacttactgttcctaaactgagatctcttgtggttggaattgatttttgaatgctgaattagataattagtagactgagacgatttcagctagatcgatgttcgttcagtttcttcattgtggcttctgggaacgggaaacaaaagtaatggggaatttccaggggttttgtggaacttaaggggtttagattgcaattaagaattaatgggagaaagtggcagccataattagctggaaagtagccacttttgattgttagagttagctaaaagttgaaatgatgggtttttttcaatgttctgggttctgaaattaggaaatagtgaaaagttatctaaacatagcaaaagtaatcatcctaagtatggtttctgaatcatatcgttattgttaatactctttgttctaggtttttgacagtaaggccataaccatcagggtttagatgtgtgatgatctctcaatctatgtttagatattcttgaattctttgaaatgtctctttctaaatttggttggtagtttagctttctttaggtaacgaaccgaggatggtctttcctttgttttaaagctatttgcttgcttagttttcacaagagatatgtcttgttttgtctttaagcaacaatattagattcctcactagcctttctttcagagatgtctagtgctacatgactcagagattcttggattcttaaaaaaagaacctataaatctaagttgcgtttcagacatttagattatgatccggaaaatggttagaaccaaacagttctcttcaagtttgtgtggtttatctgttgactggaatcatcgtgaagtgcattgatgttgcatctgttgtgatttgtgaatatgcttaaccactgacttgtttcttagattcatcctttggtaatgaactcatcggtttttgtaatcacaggttggaagctctcaaagcataaaaggagagataacaccagctgtaacaaggagagtcacaacagtaacagaggaaggagaaggttcgttggagaaagattcaagtcatagtttgcatcatccatgtactttgtttaggctggctggatctgcatttcttaagtgtttcgggattgaccggagtactgaagaaaccgaggattctttgagacaagaatctaagaaagagagatgattgaagctcttgtgaatagagaagagagaacattactaacacgtttttattatgtgtttatcgtagctatcgagtaggaagagattgaagaaacttgtaagtatagatgaaaaggtgaaattgttggtgtaacacgaacgagttgactcaacgcattcgcttttttctttttgcgtgaaaacgatattgtcactgtggttaaattatcttaaatgtggttattttcggtggtgatatgtatatttgaagagaacttttgagtcaacatattttaacaaataatttaaatcattgaaaatgatcaattaaatgtcaaaaaatactgattactaatttatgatcaatgttttctcagaggttgagtcattaaattattaatttattaccaaccaattcattagatttattatattttaaagaaactaattgtgtacagacatagagtttagtcagtcagtcaactattagagtcatccaaagccactagcttatttttgctgataataccaaattagtgtattttaaatgcatgaaccaattcattattttgtcaactacgtaattaaaaactcaaaagctgactaaataaatcatagtcaaaagtctttgagaaactgtattctattttgaagactgataccaactaccaagtttaattcactatatagacaaagttgtatctctttatcaattactcacattgagagatacaaagttgtctctctgacatatacctagctgctcgataactcaccaaactattggatttcaatggagaaattagataaacggagggaagaagaaacttatctatggattccagttcagtttctcgaccaagctctcatagctgtcttgaaatgtattggtcttctttgtcagccagcgaagaaaactgcgccgtctccggtaacttttaaccagccggtaagctttgtttaacaacatttatcaaatttacaagattatacactttacattttactatgcttattaatttttcttttaaaaagttgttgtttacatgctaagttgtttttgcgggttaaaaaggaatgatcaaatttgatctgtattaaaatgaaaagatgtcgaaacttttggaggtataagtaaaaattgaaaccctagttaataatctgatttagttttgatgacgatgttgatcatattataaatgttaatattcagtcagacaacataatattttgagtatatttataaagtttattatatttgggttttaatagctaccaaaatatgtctaagtaataaaatgaatctaaatgtaatgtaggaggaacaagaggaagactatggtgttgctctgaaagacgatgatgtcgttgtgttgcttagggacaacaaggccaaatcaaagaaaagggataaagaaaagcctagttcaggtcgtcctggccaaactaatagtgtacccaacgcggcaatacaagtttataaggaggattaagaagtcaaaaattgagtcgaaaaatccaagaggccaatgagtcagtcattgctccttttttttttttactcaaacttctatgaaaaactcgtacgtagtttattttggtttcctcatttttcaagacagcaaaattgaccagaatgtatatacttttgaatcggaactaattgttgaagacgtattattcttgatcaaagcatgcatatatctagtacaagttaatctgacttgaatacttgatttgacaatttctaccacactttgtttacctagtaatctaataccatgtgtattgattgatatagctttcagctgatttcaaaattaataatttttaccaagaaattgctgtgtcgtttttttttttagttatacgtctttaaaataagtaaattatagtgaaaggtacggttatattttaaacggataataattgagttagtttagatcaatcaaacacataaacttcttcgctggtcttcacgagtaaacgcctaaaatctagtattaaacaaattcctacaactgacaagtggggacctttaaatacactagatgagtatccacggtaagcgtgggtttatattgaaaattgttaaaaaatatttacatttatagtttttttgcaaatttatatttattctttatttatttttgtattgttaataaaattatatcaataatatgtaattatattttatggttatattcatttgtaactcgaaatatcaatttatatatttcatgtataaaattgattatttataagattttaatattttcacttcatgaatacatataacaacaatatatgatattctgaaaaaattatgagcaattatgttacttgtgtgatttaaaatttgcctaactcaattataaaccaaatcttgttttatgtacttcaacaacattgtgataggcttatgattaaaatttggattgatatcaactgaataagatttgaaaagtattcgtatgaaaaaataaaaagataacaaaaattatatgtcatttaagtcaatacaaaaatatagaatgacacatgtcatttttttgtgtgatgatgtgttattcatttggagagagttgaccaattttcatatatatgatttgttttataaggggaacaaaaaatacaattgtttaattacattatcgtcgtggctttatagaaccaatccaagacaacaaaacaattataagaagtaagagcatcgtattttagtcaatcattcatctttctcctaattcaataaacaaacttttaaccatttgatgtattttttaaaaattaatgtatttaaaaaataaaaaaaaaatttatattctgaacatactaatgaccataaatatttagttcgattgtaatttatttatttgatccaaacttcctataagaaattaggggaaatattaaatattcaatctatagtccaacattcgtcatcggacgacgacgagtgaactgttttcgtttttgtttgtaatgtttattccagtatatgtaaaatattagctgagtcatcaacctacctaaagccaaacgccacatgcttattttcactaataacaacaacaaatcatatatatttataattacgcgtgaatgaatgtcattcttgattattttttgtcaactaattaatcaaagaatcagaaaatggactagttattcttattcaaaagtcacgatttatgaattcaccaaaaaataaaaaagagtcaagatttatgaaaatgtattttatagtaataaagagtcacacccaataccgagttagcccactataaaaggcaaagatgtctctctgcgcaatcactcacatataaaaaacagcttcactcctctcaccaaaactaatcagattaataaaagttttcctctgtcttatcagatctcaatggagaaatcagatagacgaagcgaagaaagtcacctatggattcctcttcagtgcctcgaccaaaccctcagagctatcttgaaatgccttggtctttttcatcaagattctccgacaacgtcctctcccggaacttcgaaacagccggtaagctttgcaagagtatattttggactaatatgagattattaatttatgtctgttctgtatacactataaagcggttatgcatggaatttttaaaaatggaaataatttaatctcttatttgaacaccaaaaaaaatgaaaaagatgttaaagatttggtagtaacaatttataaatgaacgtttgtatataaatatattttccaatacttttggagttagctaggatatgatcaaagtatttagctatttttactttgagttaatcctgttaaaaatatcaaattacgtttagatgagaataagaatcaggtaattatattttggttttaaaagtcattagcaatgttttaggaatattatataacatgaatccaacagatatgtacatgtgtttataattgcagaaggaggaaaaagaagacgttaccatggaaaaggaggaggtcgttgtgacgagtagagccacaaaggtcaaggcaaagcaaagggggaaggagaaagttagctcaggccgtcctggccaacataattaggcactttaagttacattgtttagtctaattatttgcagtcgaaatgtgttaatttaatatcactgttttacttttttattatatcaacaatctacagacaaacaaaatttcattaagttcttgttcactatacgagttttttcctctttatttcatgcattttttttttcccgtatttgatgtgatatttgggttgaacaaaagtaaatatgttcgaccatcataagttcataaccagtatcaatattaattgaacgcatttaatatccatccatatcgaacgtatctgtcaaatgttaaacaacattaaagacgaacctaattgatatttttggatttattttaacagtcaacagctatttggttctacctagctagctcacattaattataatttaatgtcttcactcatagaatggtcatgtaaaattactaaagaattaagttttgcattcaccatacttttgtttatagatcatcataccaataatttataaagttagatgttataaaataaaataaacaaaaaccttaaacgcagtgataatcatcctatcacaattcacaacgtgcattatgaatggtaatattatatacaaagttgacgagtgctctctatgagtaacgcatgatcgctctatgatttaataaaatatactccacgaggagcagaagcaacaccaacttcgaatataaaacacatttaacaatcttcactgtgactttagacatcatgatttttttggtgttctttttttaaaaaactcataatctggtgataagtctcgtagttacctcatcgtagaaccacaatttagtatttacacaagaaggtatggtctgattaaagtttgggggtctttgtaattaggcctacaataatcattcacaaatttgaaatattacaatttatgagggaccacaacacctaaaaaggcataaatgcattatgcccagtggcgacgaaaaaagtgcattaaaccaaaggaatatatgtttgatttttattttaatgtgggaatgggatatgcaatattacaattatgatattatctgaaattttatatctttacaaaatttgattttcaaacttaaattctatagtatgatctacatgaacactttatattcttatgcaagaaaaacaagtcctttgtccaatcattgacctcttaattgaatttgaaatatttaacaaagtacccaatagataattcttttgttcttgttaaattagattttcaaaatactaagctttagcattaatttgaataatcaaagatcttcctttgaattacctattcaacatttgtttaataacttaattcaaacaaaaaccaaagaagagcgtgaattgactttgaccaaaaccaaattctctcaagagttgctgccatattttgaccgcgcgccacgtagattagagtcaaaattgttattttattcacttcaacataaaaccaaataagcattatcggttttcaacataccggcaccaacttttccaaagtctgtatgtacctaacaaaaccggtttatcatagaaacggtcaacacaccaaaaatagttgaccaacaactacccaagtgatatccctttaaaaggagtcgcatatgtgttaccaagttccatcatcaacctaataacacacaacactaaatctctttcccaaaaaaagattaagaagtcaacgatggagaatctcagaaatggagaagataacggttctttgatcccatttacgttctttgatcaatcttcagtgacgattcctctcttgaagtgttccggtctcgaaagttcatcatcatcatcttcttcttgcgatctttcgtcatcacacagcgaggaagatgagagtatcgatataaaggaggaggaagaagaagaagaagaagatggcatgaccattgaaatcaaagcgagagggaagaacaagactaagcctacgccaagttcaggaaaaggaggcaaacacaattagagttcattcatataccgaggaaattaaacaaataaatgcatttgtataaaatacttagagctataatacagtggagtttttttatagtcatttgtttcgaatatgaattggattaataaagatcgagttttattttattgtttcgttacagaataggagaatttaattgcagaatcatgatttatcatcgcttagttcatctcgcaagataccttcttcacaggatcttgtcgagtcatgcaactgaatttgaacaaaaaatacttgctaaatgcagcttaagcctctatgggcctaacctatttagcccattaatgatttgtaaagaccagattgtcgacccataaattgtctttaaacttaagtaaatggtgacgactgacgactgacgactgacgacatccttgaagagttaattgtttatctattagttaatgctattattctccggttttggagatattaattactattatccagcctgtcattttcattggtgcaaattaaaaaagatttctatttttccatattcatcatacacgctgaaagataacatttagccgttggatgtatgacacgtcagcgataaacatacgtaatgaaggtttaaatgagtaaataattacgatattaccccttaagtccccgcgcttaatttattttttgagggaaaataaaagaaaggaaaaaaagaaaacaaaaactaacaaattcttatttacatctactgatggatgggacgttaaaatcacgcaagaaaggacgactgaaaagagagagaggtacagtccaaaaaaacctcttcgtcttctttgattttcgaaattctcagatcctaaccgccattaataccccaggttgctttttccctctgtttctctcttcttctagccaaagctgaagattcacattctcctcctctcgctgataactttgtgttttttggatttttttttggtctagttacactcgagaatgaggaagggaacgaagaagagaggaggttcgagaggaggttcgcgaggaggccgtaaaactggtgcgtcttcgtcggcgagtaagaacgatgatgcggtggtagaggccacgacgacgcaggagacacagcctactcaggagacagaggaaacggaggataaggtggaatctccggcgcctgaggaggagggaaaaaacgaagaagaagcgaacgagaatcaggaagaggaagcggcgaaggttgaatctaaggctgcggaggagggagggaacgaagaagaggcgaaagaggacaaggaggaggaaaaagaagaagcggcgagagaagacaaagaggaggaagaagaagcggtgaagcctgatgagagtgcgagccaaaaggaggaggcgaaaggtgcgtcgtcttcagaaccgcagcttcgtcgtggtaagcgtaagagaggcacaaagacggaagcggagaagaaagtatcgactcctagagccaagaagcgagccaaaacgaccaaggcgcaagcatctgagcctgagtacttcgaagagaagcgtaatctggtattctattttcctcatcttctggtttggatttgctactcgcctttcgctgacttgttgtgtgtgtgtgtttaacgattacgaagttagatctgagatattttcttacgttttgttgttcttgcagaatgttataattatagcgtcttggatagaaacttttcttgaagatttgtgtgatgtttctttcatagaattataatttcttgtcgtccccatgatgttttgctcagaaattttggaacattttgagttttatgaacctttgttttggttttcatgtttgttttgtataacaggaggatttgtggaaggctacattttcagtgggaacggaggtatttagtttcaagaagtttggcagcaacattgcttttggagctctcttatcctcatgatcaaactgttgtatttgtggcttatgctctgtatattgtgaatacagtgggaccaacaggatgcacttaatgaattcaactgggattttacaaatcttgaagtaagtggcttctataatactgtttcatttcccattgttaataatttatagttcatttagtgtggcataacttttttttctgtgcttaactagtatgttatgaagtactctttgctttgtatgacaggaagctctggaggaaggtggagagctctatgggaagcaagtctatgtttttggctgcactgagtgtaagttatacctagatagcactatttgtttcttggtattagattaaggtgacatttatcttgtcgactgatttgcttgcaaagtcatctggtactgcaatgtgcatctctctcttccccttttgatatcatctatcttatcattgcagctcattcagtcacttacaaagatgaaaacaaggatgtccttgttcctgttgtcgtttgtgtaagctttggtttcgttttttatatcatgtcactggtgtttgaaaaataagctcggcattgtgattggaaaacaagatcatattgtttatctataactgacggttaattttggttcttatctatttacagattgattcacctattcccccttctgatgagataggagttgcatcggttcaaggagaggttggggaaattattgcaatgaaaactatgaaaatggcttgggttccttacatcccacttgaacaaaggtatatagacatccctgagttgtacacatattttcgtgagagggtcttaagcaatgaaacagatagtatatttgtgtattactcttcttacttttgatgtttatgggagttgttgctaatttcatctgcttttgttcttctgcagggatagacaagttgataataagaactttccaattttcatcttgggctgtactcagagaaggtaaatactctgtggtatcttttcctcccaatgtcttgttaccatgcaagttaggaagttatagaagacgtgatttgttcattcgctttgtagaggaaaaagaattacattacatatggttttgaagcagatagctttatctgaaaacgtgatgcaacactttgcattcttcgatcattcccattcacattcagtaacttaacgagtgcagaatttggtgtattcagcctagctttgtatattttctttgcaggtctgctctcaaacatttgcctgacgatcgtgttaaaaagttcaactattgccttccttgtgagctctaattttgatgcttagctggttgttattgatgttatattctcagtaccatgttttcatttgcttgagatttgttttccctagacatcatactgtaaatattactgttttactatgatttgcagacatcaacaacccatataaggttgatgactctgagaagagcactgtggttaaaataatgttcccttctgagccaccagtaagttatttttgtctttcttaactgatcgacaatacaatttggtagtttcatttttaatcaaacttacttttcctttgtgcaggttgaatgtgaatatgactgggtgaaaagcgtcattgaggtgcagtatctgacttttccaataaaacaccttacttgaattacttctcatctcagtttattttaggaattcaccgacagtctgatcaatgaggaggtattactcccggaacaaaaggttgcgttcgaggtaagcaagcaagagctggaattgatttgatgaattcatttgagggaggtctctaaaatcactcacccatatgtttccttttttcaggagtttgtcaaagagaaaagtgacaaagctatggcagcttatgacacggtatcatgtttcataccctctgctacagagccgcacatatacttaacaatggattctacaattggcaggcacaagaagccctagagaaagcaaaggaaggactgagcgaagaaacaaaaaaagcctatcaagaaatgaggttgtacaagttttatccattgccttcaccagacacaccccacactgcaggaattgagaaggtacaaaacaaatccaacttagtttgtcaatggaactctgaatattattgccaaaatctgatataagtttgttggtctctgtgcagtccccgttcataaacaggtacttcgggaaggctcacgaagtcctgtaaccgtttctcctaaacccaggaacctttttgtttcggcaaactttatgaacaactgagaatcaaagaaaccactatgggattgtttaggccaaagatacaacacacttacaaataacaattgtctttttggagccggattttttttttttgttctctgttttctcgcttctttgatgcaacatgcaaccaaccaaatagtgttgagagactaagcaaagattaatctaaagagaaagagtaacaacaaaagtaacaacaaatgggggcatttcctccacttcagtaacgagaagttgaagaagaagaagaagcagcagcagaatctgacacggtagaagttctttttttcctctcttcctcatattcagcatcatcagtctcaagctggaatctacagacaggacaagagttccttgttcctaaccatggcacaatacaatctccgtggtaacaatgtccacacggtaacttcttaccagtttctcccatcaccattccatctttacacacagcacaaaccataaccatctctccctccgaagaactaacctcgaaagtctccaatgcctctattgccgatttcgcagccggtggtgcgcctctccttcctccgccaccaccaccatctccttctgctaaattctgtagcaaagcttcgtatccggctgcatcgtctatgtaatcagccggatttcctgcgtatcgatctgattccatacggaactcaatcgaattgtcttcgattcccatcaaaatctcagcccaatcgagaattctgtttcttccggttctcgactgcgtcgtcgtgagaggaaaacgatttctcctcctcagatcatcttcttcgtcttcttcgtcgttgacggttaaattctcttcctcatcctcttcttcttcatctccatcatcttcatcttcgtcttcgtcatcgtcgatttcgtttctactattgagctccaacctgaagaaatcatcttcgtaagataaaacatcaaggtgtcgtggtggtgaacgctgagaaggcgcgtgggctaacaagcggagcatctggaggaaatgcgagccaatactggagtcttctacattcagatctggggaaagtggctgcggtggcgccggcgatgaataagcggcgggagtcggttgaattgactcgacgaaacctttgttacattcgcagcacacgacaaagtcatctaaggtttcaacgacgacgcgtttgttgcagtgatagcaccagtgcgacgccgtggcatccggggaagacgacggagcatcggacatcgtgcaattaatcgtcgggttttcaggctttcgggtccggattcggatccgataagccgattaagaggatggagaaaataaaagaaaaaggtctctctgtattattattatcgaatttttaagacattagagaatcctgctcatttacccacttgacccacccacaatatcataatattttcttctatatatgatatcaccatcatcataaattcataatacttacaatttaatcaaactgttcaattgctgtcaaacataaaaatcaaattgttcaatccaatttaaaccagcttccaaatcaaaactgacttgcacttttatccaaaaacttgataagataaagtaccatttgacccatgaaattttgtcatatcgaaaagcataattttaatttcttttgacaacaatacaaacatataactcgaatacataactttgtaatagcgatacaattgtttcaacagcacccataaaataaaataagattaaaaaacccaaatcgttacaataaattacaatacaaagatggcctcctcgtctcaagcatagtcagacccaccatgaaggtgatacatagcgaagtctctccattcaccaaatgttgcaaatggcaaaagaccgtttatgactggaagaacaaacagaatcaccacatacacgacactgcgccttgcccaatatggaaacatactgttacaacggttcgatctggtctcttgagtcacgtttataggaccgaacattagaccatacaaagccaatgtgaagacatttgcaacgaattgcaaaaggcaaaacacttcccaaactattagccagagtttgccatcaccgcccaatgtgtccacacacaatttacccgatacaccgcaaaatataccgaggaaaagaacgatgaaacttatcggcattgtctgcttcgtacctgatgatcgtttgtttagaaagtaagtgaagacaatgatcattaacacaccgaaaaatatctgcacccaaactcgaacccggcagatgaaggtgttgaagcctgagttaatcgatgaaacttgtttaggaacccaccacgacgaacttttctcctcggattggtcgcatactgaggtagcatcctcgattctctttattgaaaaattgtaaacgccaagtaccatagaagccaacatgctgaagacacttacgaggagccaatccatgattcttgtgaccatctcttcttttcttgtatcttctaattcggttttgaatttctccgctctgaatgcagctttcgaaacatccaactctagcgccgctttccccaggttgtttgattcaaattttaatcctagcgccgtctctttgcaccttaactctcttatttgaagaccaatctccacggtctttaggtcgtttgctcgtgtttgctcttttaaaaacctttcgtctgtggtcaaagccattgctgaacttctaggagggacacaagagagttgtagagtctcttcgaaaagggcaagctcattcatcaaagaggttgctgttgcactgccttgcatcacttcataagcagacgtagcagatgaagtctccctctcaaatagctcggtgtctgagcatccgtctatggtagagcgatctaaattacaactcccaccatcattattgtttgactgatgtggatttgcacattcattggtcaatttaaggatctttagagtactgctgaatgtttgctcaaagttggtcgcaaaggaaccaagcttattaccataaacctgtaaccacaacattatgaatcagaaagtctataaatataaaaatgcggaaaacatagagggggattttagcttacattggctaatgattcttcgacaagagtagcaaagatctggagagcataatcaatgaagttcttgtatcactaccaaaacgatggcaaaagaaagattgaacagaaactgagaagaaatcatttgaagttcatactacttacctcaacaagatcatcaacataaacattctgacctgcggcattctttctcgcaataacctagagaacaataaaacagagtagaaacagagtaagaactacagagcatatgcaagtcaatgactttggcggctaggtaggatgaaatttggtgaaatcacaatcagaactacaaatccgagtagaaactagaaaggctcaagctttaaggcaagtgagagagaagacaatataaatttgcaatgttacattgaagctcgatcatagagacccccaagaagaacttcagcttctattgattgactctgattataatttgaggagaagatcctctcttcgattcagggtgaagaattcacgcaagtactgagagaagaaaattcagattcaatccttttgactctgattcagatcctctcctctgtccagttttgaatcaacaaagcctaaattgaaagactttgtatttaatactatctaaagatcaaaactttcaacacaaccaaaacctagtattcacgcaaggtcaactataggaacaacccgtaccagcaaagccaatttcgtatcaaaacagttatgtgatgcaataaagatcaaagtttggaaattgatcgaaccatattagcaaaagcggcaagtgaaaagcccagaggcttcgccaatttttcagcttgtcgttcaccaacgcttcgtcgagccatacctaaccgcatagggtttcgtaatctatgaaccactctcgtaacccttttagtagaatttgaattagaggtagaagatgtagaacaataggacgaagaagcttcgtcgttgtccataatctctttcttctttcccttgagttttctcttttccaaattcgatggattcgtatccttcttcttcttcatcatcatcgtctcatctttatgtacgtcaccagattgatgatttggctttgaattcgccggattggtgatttgattttggggttccggcgaaggagggaggaggagggcttccatagccttaaaatataacttatggggtaaatttgcaactttgagaaaagtatttaagttgtaagactttggtcgcttcgtgactagtgaaaagtttcgaatttccaactttttcctctgatttaatttgtatttttaaaaattcgtcataattagcttaatataggaaaaatacttgaccaaatatctgaattaacttgtaagttcaacgaattcttcaaattatacaatgtatatgttaatgtcaattaaataggtaataatatgtttactcgatttttagcgataatttgatgtttctaggtgctttctgttcaatgaataggatcggttcagtacttaattgaactaaaagtcatacatatagcttaggaccagattaacataccaagtagtcgagtttaggaccgaaccaatcagtttggtttgaagatggaccataaaagtgtttggaaaaaggaacaataaaaaaaatcgcacaatgtttgtggctccgataaataacacgatgaggtgtcttaacacaaccaatcaaaacacaagaacatctccttcactaatctcatcttatgccacgtgtccttttcatatccaccccttttattttatcataatttttttttttaacattctctgtggttcgtcatgaacctcaaaaaacctctcactgcaaagtgccaacaaacaacaagtcttcaccttcttcttcttcttcttcttcaaaatctcttgtacgcaaataatccatgagaaactagggtttaacttgagatctctcttccgaagtattaccatcaatggcgacttcttcttcttcatcgtcgtctctgcttttaccaaacatcaatttcaactcaagacaatctccaacaatcactcgttccgtttcaatcgccgggatcttcttacccagaaaccgattaagctacaatcacaatctccggattcgtacgagattaatcagagcttctaaagacgataatgtcgctgttgaagatcgtgataatgcagtgaagatcaacggtgattacaacggaagtgcacgtttaaacggtaacggctctgcgagaaaatccgtcaacggagattttaacggaagtgctcgtttgaacggtaacggtagtttggtgaagtatgtgaacggaagtgtaacggtggaaacggaggaagtgacaaagaagagaaaagaagaagtgaggaagaagagagtagaagatattggtcaagaggatgcttggtttaagaacaacactcaacaaaaacaagttgaggtataaagtaatgtacttttaatcaatatcgttttgtttaatgattcaattccttgaaagtttgctactttaatattgttttacaggtttctgttacacctggtggtcgatggaatagattcaagacttactcaactattcaaagaacattggagatttggggttttgttgtacagtttattttcaggacttggttaagcaataagaagttctcttataaaggttgatacttgtttttgtttgcttacgtctaggattaggacgattctcattttgtctaaattcttgaaaaatcatgtgtataagggggaatgactgaagagaagaaggttttaagaaggaaggttttggctaagtggttgaaagaaaacattttgagattaggtcctacatttatcaaaattgggcaacagttctctactagagtggatattcttcctcaagagtatgttgatcaattgtcagaacttcaggtttgatttctttttattctatttgaatttgtacttgtggcctgtgaggctcttcttttttaagttttatgatcttatgctttgcaggatcaagttcctcctttcccttctgctacagctttatccattgttgaagaggagcttggaggttctgttgaggacattttcgaccgttttgattatgaacctatagctgcagctagtcttggtaaacgtctttgtgataatcttctcataaatttgcaagagatgataataaaattaatggtttttgtttttaattcatatagggcaagttcaccgtgcaagacttaagggtcaagaggttgtccttaaagtacagagacctggtctgaaggatctctttgatattgaccttaagaatttgagggttagtgtctctataccacagtcattatagagcttttccatgttgcaagcgtccttatctcgtgattttcttatccgctcttctgaagctatttgcatgatgttctgctgagtcaatgactttgttatgcttctatttaggtgatcgctgagtatctccaaaaggtggacccaaaatcagatggtgcaaagagagattgggttgcaatctatgatgaatgtgccagtgttttgtaccaggtatgatgatgtggtttaatgttttatcacttcttgtgaataagttttggaccattttaccggagagaaaaaggaaaatgattttgattttgagtgtgcttttgttgctaattgtcctttgcgtagaagctcagtcaaatcttcctttctgtatcccaacttgagtgacctctaactactgcagtaataacaatgtgctatattttttcaggaaattgattacacaaaagaagcagctaattcggagttgtttgctaataacttcaaagacttagagtatgtaaaagttccatccatctactgggaatacactacacctcaggtattattattacctatgaccattagttcaccatttgtgaagccttaagctcgaatgcaatagttatgcattgagttctttgcaggtcctgacaatggagtatgtccctgggattaagattaacaagatacaagccttagatcagttaggtgttgatcgaaaaaggtttgtattttcttacatcttcctcccagacttatatttgttatttctctttgaatccaaaatagtttcgttgttgttgattgataacttggtacaatgcaggctaggaagatatgctgttgaatcttacctggagcaaatcttatctcatggattcttccacgccgaccctgtaagtctctatccttttttttttacactaagtgtcaacaatctttaatttggtgtaccaatacgaaaagactacaatctaatttgcttatgtatctttctgcagcaccctgggaatatagcagttgatgatgtcaatggcgggcggctgatattttacgactttggaatgatgggaaggtactacattttattatgctacaacatgactctgttagtatgtgaaaaactgcttcggttcaatatggtgaagaaatgtgatctccttttatcaacttgttaaacttatggttctgtacaacgtgttttacacttgcagtattagcccaaatattagagaaggtttgttggaggcattttatggcgtctatgaaaaggatccagataaggtatagtctctaaggtgttctcactttcagtcttctaccgacatgccgcatacgacctgagctcatacttaaatatatatgaattaaccttcttgtggcaggtccttcaagctatggttcaaatgggagtgcttgtaccaactggagatttgacggcagttagaagaacagcattgttttttctcaacaggtaatttacttgatccttgtacccttgcttcttatccatcgagctacctattaaatcattgttacttgtttggtttctctaaagtatgtgtgagagtgtgtgcataatagattccagtactatccctctgataatatcacttagctgattgtgttacagttttgaagagcggcttgctgcacaaagaaaggagaaagaagaaatagcagcagcagaagagcttgggttcaagaagccactaagcaaggaagaaaagcaagagaaaaagaagcaaaggttggctgcaatcggagaagacttattagccattgcggctgatcagcctttccggttccccgccacattcacatttgttgttagagccttttcaggtttgcaatgtcattcgaatttgtattttttgtgttcaaaactcaaaaaatatactaatggttactttcttctgcagtattggatggcatcggcaaaggtcttgacccccgatttgatataacggagattgctaaaccgtgagtcttaacacactatattttatcttcttgttaatcagaagagtactcaaatacttttgttatccagctatgctttggaattgttgcggtttcgggaagctggagtggaagttgtagtaaaggtacttgcaaggcttatctctactatatatatgatcttatcacatagctttatattcatattcaatcaaattaactattgtaggacctgagaaagagatgggacaggcaatcacaagcattctacaatctatttagacaagcggatagagttgaaaagctagctgtagtcattgaacgacttgtaagaaactaacactctcacccaccacaaactcccattctacatgaatttctttctaatgagtttactttcatcctcaggagcaaggtgatttgaagcttagggtccgagcgctagagtctgagagggcatttcaacgcgttgcagctgttcaaaaaacagtaggaagtgtaagtagagctttccattctcatgtcttttttacatcaaaatctcttcaagtcgttctttgaaagcatttcatgttttctgttttatgtgttaaagttggtttcttttcctctttttgttaaacccattgtgtttctctacaggctgttgctgcaggaagtttagtcaatctcgcaacaattttgtatctgaattctataaaagtaagttggtactcttgttctttttttttcacctataaacctctttgtctgctcaaattcaccaacgttcttgtttctttgtgttctcagacacctgcaactatagcatatacagtatgtgctttcttcagcctccaagttctaatcggaatcataaaggttaagaagttcgatcaacgggaaaaactaatcactggaacagcttaagaacttgcttggtatgtcatgatttatcacctcttgatgtttacaagttacattatcagactcaaattctcacactcattttttggcttaatttgtacagaagaaatgtattaaagcttcttcaatctccataaacccttttgtgcatttcacaggagtgttaacaatttcactggtctgcaaataaaattatcttatggaagcttgagaggcaagagatggtcaactagtcaaaccaccaccactctctcatctctgtcttcttaaagttcgataataatttttggagaggagactctggttgttcatcaacagagtggtcatgagccacatgtattgcttgtgtatagagagatttagaaattaggaactttttcgtataaatatactcattgtactcagctactcactagactcatctctgttttagtaatattttgaatactgtatctcaaataaattaatcttatcaaatagaaaccatagttgaaaagtcatgaatgattcttaactgtacaaaataataagctttggtaaaaccctaaactttcgtttccaagatgcaatttctagcttctctcgtttccaattccagaaagtttggtcggagatgggatcgagctctctcgttgcatcatttctcttcgaatgcgacaccagcttcgatatcaaatccagcgttcgtcgagtttctcagggacaatgggttccagaaacctctagcaattgccatcgcaatgcgttaccctaacctcaaatccctagaacaacctcggtcagtgattcaaatgcttaaaagttacagtttttccgatacccagatccagaaatcgatccgggtccatcctcgaatgatgttctacaacgtggagaaaattctagaacccaaacttcgattctttaaagatattggatttactggctctggtcttggtaagttcgtctctcaaaactcatcagtcgttggtgtaagtctagtgaagaaattgattcctaccgttgagattctgaaatcgattgttgccccaaaacatgaagaccttcctgtcattcttagtagatgtggttggcttcttctcagtagagaccctaacttgtttctcttaccaaacatctcataccttgaaacctgtggaattgttgggtctcagcttgcttctttacttagaagacagccaagaatcttcaatctctctgaggaaaaactcagaggatatgtctctcgtgctttggatcttggttttactttgaactcgaggatgcttgtgcacgctgttatctcgttaagttctttgagcgagaaaacgtttgatcgaaaggttaagttgtttatggctaatggattctctgaagatgagataacagatattatacgaagatctccaggtttgatccggtgctcagaagataagcttacactggggtttgagttttacttgaagagaatggggttagagagggaagctttggcgaaacgtccttgtgtgttgtcgtataatcttgagaagagggtgattcctaggcttaaagttttgcagatcttgagggaaaaagggttgttgttaaaagaggagaagaagaagaagaacatggttggcattgttgagatgactgaggaagcttttctagagaaatatgttgtgagatttggagatgagattgctgaggaactgctggttgcttacaagtgcgtgtgtttagtcgatgaaacgctacttgatcgtatcaagatctaattgtagatttcacaagtccaaacttgaaattttgtcattgtatccaaacttcgctcatccgtaactgtgttgaacattataatttggaagtaactcttaaatcaccctttattacgagcttgaagcttctcatataataatgggattcatatgaagcgattctttttctatttcagcacttgagcaaaaactcaagattgtcaaagcgtcttaaaaatttgactcatgaatttaaccggtttgattttggttcgttgtaataaccggtttaaaccagagattgattccggataaaaaagcttaggtttttccgcgaagccgacactgtaaggtagggctaaaaccttagaatagccggagagaagaaggcgagaagaggagcgacaagggcgaagctgcagaattcttcggtaattttcagattcggttgaataatggcggctgcggcttttgggcagttaaatctagaggagcctccaccgatttggggatctcgtagtgtcgattgcttcgagaagcttgaacagattggtgaaggaacttacgggtattcttctccattctttttttttctgggttttgttccttgattccaatttatttggttttgtcagagtactcgtgctcaagactgaaatttctcaaatttgaacgatttcgctagggccacttgatatataagtttttttgaaacaattttgattgtgaaacgtttatatatagttattgatccatatattgttgatttgaggaattttaactttgcctcttatctcaataaattcgattttgttgattgaatttgggaattctcagattcttggtatggtagatatatatatatatatatatatatatatatatatatatatgttgcaataaacttctgaagctgtctcttttgatggtgtttagattcatatattaaaatttggttttgcagccaagtgtacatggctaaagaaattaaaactggtgaaatcgtggctctgaaaaagatccgtatggacaatgaaagagaaggggtaagctacatttgaactaccagtactagctttgacaagttgcaaatttttgtgagtttcgtatgacttatatttccgttttcattgtttgcatggagtttccgataaccgctatccgggagatcaaaattctgaagaagctgcatcatgaaaatgtcatccatttgaaagagattgttacttctccaggtaataaggaactcttatcttagcttgtaattgctttagaaattttgtcaaaaggggtgttaagtttgatatgtagagttttgtgactgtttttgtctttaaaaggtcgagatagggatgatcaaggaaagccaggttagtgaaacttattcaagatcgaaatattttctgtacaacttagatgcgactatgagagatctatttaaactgcttacggcctaaagcttgttgcttttcttcaattttagataataacaaatacaagggtggaatctacatggtctttgagtacatggatcatgacttgactggacttgctgatcgtcctggactgagatttacggttcctcagataaaggtattgcatggctagacaccttgttgtagtagcctttgcaaaaacccttattgttccgactttgtctgacatttgaacatatgtaaaaaagtgttacatgaagcaactgctgactgggcttcactattgtcatgtgaatcaagtgcttcaccgtgatataaaaggtgaatatatcccaaaatacattgttgaccattttgttctcttgtctttatttgctagttaacctataatatattggtgcaggttcgaatctacttattgacaatgagggaaatttaaagctagcggattttgggcttgctcggtcatattctcatgatcatactggaaacctcacaaatcgtgtcatcactttgtggtataggtatgtatgcctacaaactttgaagttatatacaaaaaagtgacaaagaataagtattgcttatacgtgcagctttttctctacttatgcattgtttattgctgtaggccccctgaattgttacttggtgcaactaaatatggaccagcgattgacatgtggtcagttggatgcatatttgctgaacttttgaatggaaaaccaatcttgcctgggaaaactgaggtcaggatttcatcttatgattatcgtggtgtgtgttattacagtgttctttgatgatgtttccacttagcgttttagtcatatttttttctttccagaatgaacaattgaataagatttatgagctttgtggatcacctgatgaaagcaactggcctggagtttccaagatgccttggtataaccaaatgaaatcatctcggcccttaaagagacgcgtaagggagatctacagacagtaagtataaaccattatgtagttgcgactcttttatgcaacagttactttgatccaggagatctcatttggtccttttctcttctgctatagctttgatcgccatgcccttgaactacttgagaaaatgttggtacttgacccatctcaggtaccaaagaatttttaatacagagaattaagagccttggtctagacatttaagtcctttcattttcctgtctgttggtacagagaatatgcgcaaaggatgctcttgatgctgagtacttttggactgatccgctgccatgtgatccaaagaggtaatcaaattctcttaactttcttgttatgaaaacccatttggttcatcatacatcacaaatgacgatcaagaacaattagtgagtgattcagcttgtactgaaactgtgttatgtcaacagtctaccgacatatgaatcatcacatgagttccagacaaagaaaaaacggcaacagatgcgtcataatgaggaagcagccaaaaaacagaaactgcagcatccacagcagcaacattctcgtttacctccacagcaacacggtgttggccagtctcatgccgctccactttggcctgctggaccaaaccaccctatgaacaacaacgcaccaccaccccaaatacctgctggtggccattactatggaggaaagccccgtggtggtgcacctgttccaaaccggtaccctcctagcggaaaccagactggtggttataataatcagagccgtggaggttacagcagcggagcatatcctccacaaggtcgtggtgcaccatatggcgccggtcctagaggacctagcggtggctatggtgttggaccacccaactactcacaaggtggtggtcagtatggtggatctggtggctctggaagaggtcagaaccctatgggtggtgctagaaaccaacaatatggatggcaaccgtaaagagaactcaaagagactcgtatggtgtggtcttggcttgatgtctttaaggcagttgtgattttagatatgaagacttatcttcgcgaaagagaatctattttcatttgatttcttgtcttaatggcattcttccaaacattctgtgattgttgtatgtttaaatcaaggtttatatatcagaacacaggaaaccaaattggatttttacccaaatcttattatttcttgcaaaaaaacgtttcacaacctcttatctgttttcgatgaagtgtggaaaaactacacgaatcagtgtaaaccccaaaaagaaaacgaaaaaactctcctctgaagcagctccagcagtaattgtgtcatttctcattgcttattgtcttatgcggatgattctactttcagaacaactttcatgaactcgtaaacaaagtaactgattgccgcggaaggcaaaacctgcaatagtgagataattcacaaagctgtaaaacctgcaataagctggttcaagagattaatttatgactagtattaaggaatcaaacctgcaataagctgggaatcaagccagcatatagagcaggaacacctccttgttcaatgatcttcacacaagtagccactgcgcttaaccttttagcatgtgactgcatttgtaaacgccttctcacaacttcaaacggatatgttgctgcttctgagcaagcccctgcgattgctccatataacaaagttctcatgggaccaagctcgagttgatcgaaagcattaagttcttcaccttcttgcttcatgtgttcaagccgtttcttaccttccggtgtatgaaggtaagctgattttaaaatatcatagacaccgtagaacacagctcccgatggagccatactaacaagtgaaggtacaagacctttgtatagggaaaagaaaccttcagtttgaatcatgtgacggaatgcaccaactacaccacctaatgcttctccaccgggtgccaccataaccgttcttatctgcaattcaaaaccaaagtaatgctaaagaacctccagagaatggtaaaagaagctcaatgaagtttttgttgtgattccacttacagtatcaagtggtagacaaagcaaactagctgttactccggcagctgcaccagcaacaaacctctcgaaatttgtcgtttcttcattcccggacaatttcagaagctgacctctatatgtatcatatgcatagaagttgatggacttaaagggagcagttctgagaatattaaccaaattccctttccaaaatcctctaatcccttcatttgttgcaatcctctgaatgagttcaagaagattcccttgctctccgcgaacaatgtattctagcttcatccgttcaagaggtgcaatgcaagttctgctcaaaccaaaacccaatgagccaccaaactacaacaaaccaaatcaatacaaaatctcaaataagcatatcagtaagtaaccccaacacttaaagtctacaactttatactgacactcaatctcatttgacctcaagagtttcgtagaataagtaaagaagaaggagagaccttgaaaccatggctgcaaaagctccagcccataaatgcttggttgtgttgagagctcctgctccattttccttaaccctacgcttctccttagattcttgaccaccaccgatcaacaccgaacctttctccgatttaaagccgttttgaccattatacccttcaccttcttcttcctcaccattactctcgttaatcgataaactaacagacagaaacagaggttccctggtcccgtttcgtctcctaaacttcaaaaaactcgacttttgactgaagcgacacgaattgacggaacaatccttcgacgaaagaaaagagacagacgaggaaggaagagattcttcgagaaacaacccaccgcagatgatttgaccattgtgatctaatgactctgatctgattgcttcagctatccatcgatcaaggccacgcattttactaaattttcgatggcaaattcgacaaattgagcaaagtcgaaaacttttaacaagacccaagaacaaattggattcaatagctgttgggatcttaaggaagacgagaagactaataatattgatagtttatacacacagtagttgctctttctcaaagctttaagctttcatatctctcgctctctctctcacactaaaacagagaatattttaggttggttttggttaaagtgtgtgacttggtgctttttttctgctgacgatgccaatattggttgacacgtcatcgtctatatttcgtttattttgacaaaaataattctttcttcatagaatgcatacatttcttcatgatcagacattggaagaactcacaagataagagtttgattagacaaaatattccatctcctagtttgttatactaaacagaagagtggtcaaaagtttttttttactttgtttttgattccatgtgtttgagattgtgagaggagtcagcaggagccttggacagaggacaaaggcgttaagtaaaggcctttgctctccaacaagttagccgcagcatcaaagtcctttgtaagcagatcttccattacttcctccagagattttgccatcgtctgctcgtgatgtatgtagtgaccgtatccctatcacaaacaacacattcactctaagaaacaaacatatactatatcgtgtatctttgcttcagatacataaatgtattacctcaatgaatgccataggatgagatattggttctcctcccaacctgcttcgacttaattcctatatacgtaataacttagaatgtcaggttttggattgggagcttttggtttggatttggctttctctatcaaacctatttgtcctcaataaacaagttgagaaagaagaaaaaagataggagaagcaagacaataccttcatctgtagatgcagaagcttaacatgatcaaccatggcattcagtgtcaattcatggttatccccctacaagatcacataaaatcaacaattaagattcaatctctcataagctatatgtggacaagctctggttgcaaaaatatgaaatatataattctaacaatgttacctcaactttatgtgggagcaatttccctaatgccttgatgttatcggcaattctctgcttgcgctcctataaaacgtagaaccaatggttcatataacatcaaacaacagatggaatcatcatacgtgatacttacacgctcattggtataacatttgttggatcgtgtcgagggtacatctatgtcattgtcaaagagctgtgagaagtcacggttgttgttgttgctccgttttttccaacttctaagcttctgatacaataaacagaagtgttagctcctgaaaagagagactttccagatcagacattacttaaataatgtgatgaaacttgacctcagagtagtctggggaccaaggctgcacagacttgcgagaggatcgtctacgtccaggaaccttactgctgcttccctgatataatatatgcaagtagattatactactttcagatccgccaaaggatgtaaaatcgaaagaaaagacaaaaagtagagatgttatgagatacttacagagagttcattgttggtgcggctttgtacacgaatagagggtttcaccaaggaagaaccaccaatgttgtcagaagagtacatggttcggatccctcctcctagaccagttgcagggccacgacttggcagaacaactttctccacgacgtaatcgagaggaggtttaacatcaggtgtagaatcttcgttgagcaaagcaaggtaactatgtggaagcttagatggttgaagccattgagacagagacaaactcccatcgtcacattttactgcatttccaacaaccgactttgatcagtgttgaaagagaatggtgctaatctaggtggagcaagtaaccacaagcctgaaatgttcaaaatgtcatacagatactatagaacaagtatacctttcaagttagggggattgtcggaaaccttggtcttgttcttgttgtgaggttgagtggaatttggggaagagaaagggaaaatctcagagataacaacagaggcagcttcatcagcatcatgttggtgctcaattgcaacacctcttagaatctttggatcaatctgtaatgtataataaaaacaatgtgacattatttaagcaccaaaatgaaacagcagaactcaacaacaacatttggtagcacgtgagatttgttgccatcaatcatttgctcatactataaaataacattaattgaaatattaaatacagatagctttcttggtttcgctgttggatcaaatatagtaataccaaataactactcaacttgatttcatgaagaaacaacgaacaacaaaaacaaacaaaccagtggctttgcaaccacaacaatcatgagtgaaacagagataatgattaagagcttgttttacctgtggaaataactccgtgagagattgataaaccgatctaaaacccatcactggaaatctgcgacaaagcaaccaaaatcacgaatcacattgtgcttaaaccctaaaaccctttttcatgctcagaataaacagacgaacaaaggtccagaaacaaaatgggtcgcgatttgaaatttaaacaaattaagctaagaacaaaactgagatttgattcaatagtcccttgtcactaacatcgtttatgcggcagagcaaattttctcaggttttgggttttgctgaaaaagtgaaatgctttcttctctatttattttctggtgaccatgaataaaaatggttgacacgtcatcattcattttcttacaacgagttttttgattacacatttccagtattttaatcatatagttactaccttaatgtagcaaattacaaaattttgtagagaccttagattattttattaaatcaagttagaaaccgatgtttacagagacatttagtctaatcacaccaactataaagatctttcatttctttgtaacaacaaaggatttatccaatttttatgagttgctgattgagtctgtaagcataataatgtcattaacaagaacaattgctttcttgttgatgatttgcctgagatgaaaacatgagtggctttagattcacatccaccaaatcctcttgtttcgtccaagaaactgcctcgtttccttgtaacgccgatgtaatcttacagaacaaaggctgcactcagcaaaacagcaaccaagttaaagagaatattgtatcacattgacttgtgtgtgtgtgtttttgtttgtttaccttaatgttgaatccagctttagcactagtctccatgaacaaagctccaaactcacgagctttattctccccttcctctatcgaaacttgcctatagtttaatcaatcacatcacacaacatcatatggggtttgtgaaatgaagaagctatcttttgatttgattttaatggacatagttataccttttattaacaagatcggttttgttaccaacaagaacaataatgacatagctgcctctttctgcacgaacttcttcgatccacttggaggtgtttataaatgattgcttacctgcacatatataacttttgtaagaagaaaacgagcatgatgagtggttatgaaactatttttttgttatagagtaaataagtcgcataactggcaacatcatagacaataacagcaacagaagaatctctgatataacttggtactaggcttttaaatctctcttgtcctgcagtatccctacaagataatcaacacaaacacgaagacattttcatagctagaataaggagctgagtgaatggtacagactacagagccaacccaagggacagttttttgtaccacaattgcagacgaaaagtcctatcttcataccgcgttgtttttgacaaaaagtctattccaattgttgcctgcaattcacaaaaaaatcataaaaaccctaaacttcgaacaagtattttatttgattgattccgaatcgaaagaaaagcggtatacacaggacagagataattgatcaattttgaagcatttattgagtctaatatcctcagattcacacgtatcaaggcacaattgttgtcgagacgatgatcaagacaaaaaaacatgatgcataaagtgttgttggaatcgataagaggcgaacctgataactggtgtcgaatttaccgtacatgaaacaagtgatgatgctcgttttccctacgccttgatcccccaagaacactagcttgtacccttttcctaaatctcccatcctcgcctctctttctcttttcttctcccttttggctattgaatcgcgtttatattcgtaccgccaattatataattctattcaaaactgtatacatcatgtgtttttttttgttaatagtgtaatcaatgggttgatttgcgtatgctatgggcctaatataggccttacttaaactcaattggactcattccatctttgaatgtaaatatactacaaagtcttttgaatgctccaagaatcacactatcatctacttagttaataataatggcattaagatatctcattgttgtaactagcagctattctctgaatggaacctttttcttacaccttcttcttcttcttgtcaatgtatgggtatttctggtacattgagatactactcatcacaagaggaagagcaactaggcaatacgatgatggcggttttccttcaaacgcaaattgaagtagcgccgtcacaagtaatgccgacacaatcacaaatccctgcaaagtgatataacgacattacatatttcagcttttgattgtgtaatatcagtctgggagggtttttttttgttttacctttcttacaccaccggcatgtgatgtaactaggccaacaagaatcccaccaagagcattgcttattactgggacctataacaacagtcacagtgcatacaaacaatcagaattcactgttttgctatcaaaagaattgttttgtggataaaaaaaagagatagtttattaccagtgttaaagcagtccaaccatgaaagaagccatattttttaatcgcttcaccatctggagatttaagagtacttactaataaacagaggcttccaacgatagacatttcaaccgtcattaagtatgatgaatgcttcttgacctgtaaacggtaagacagtttaggctacgaatgaattgaagtacagattttttattggaatatgatatgtaaactctggatgacctgagaagcccattgacacagagaagaggctaaacccgacaggacagaggctgccaagaccgggataattccataaaacagcttttgatccgcattaatgccgcttgaatctttgttagagccttcaccaacacttagaaggactgctgccatgatcaatagacacaaggctcctatttgtagaattgattgcttctgcctacaagatgtcattcgagatgatgtgttaaacacttttcaagcaatagatattcaggcaatcacactattaagacatggtaggtatcacgttggagcagagaagcagcccaaataaagttattcaggcaatcacactacaaatctctaattcaaaaatgtgatgtaggcactcgctgaggaaaatacaaatccaacaaactcaaaatttcaagcatcctatcaaaaacaagaccataagaacaagaaaaataaaggttaccttagtattatgaaagtaaagaatgctgtgaaaaagattttcgtctgattcagaattgaaaatgtcaaggaatcaagactcctgtatgagatctgcagcaaactgttctgcagtgcatatatggctgcaggaagtcctgatgctgtcaaggatcccatcaacgtccactcttttgctaatcccttcaaactaccatttcttgccatgagaatcagagcacatatgacctataaaaaagaacatacagcagaagcatgaaacagtatttcataaatgcaaaattttcgaaagtagaaaggaaaaaaaaagatccagtaccttaacaatctcgcacgtcaaaacagatgaagttacaataacatcctttctgcaaaaacaataatgcggtaaagtgaccaaaccatgatagagacaatctattaactgtttaagaagaaacaaacaaatggactagtgaacacaagtctactagttctaaatatccatggcattttgccgcaaaattaggcaaagtgactcgatatcgagtactagataacgcgaaaggttacacggtaccctacaaaaccaagatgaacaactaaaacactatgatgaaaagctatattcaaggcatcaatgtagcaaactagtagattcaaattcatctctctaacactttagaaaatggcttagtttaacagtgaccatgtctttttccacaggaacaacgagaatacatcacaatcgtcgcatataacttcgaaattgtaagtttacaacactattctcaaccacaattcgcagaaagccaacaaaacagatgcccagaaatcgaactccatctctactcgctacataagactaattacaaccaaatctcgcaattcccgataaaagcgcacgaaatcagcgaatatgaacaaggctatcactaacatcagagatttaagaggcataggttgttgcaagagaccgtacctgatgcagcgtttggagatcagaggctgggctccgtactgaagtgtgagcaatatggaataaaacaaaaccttagggcccatactcgacggactctttgctccgttagccgtcgccatgaatctccggccgtcgagaatccagaaaatccgccttcgctttgttctgatcttttggtcgagaattggtttgtgctttgaagaacgctttttcactttttctacattggacgtcgttttctcaagagatgaactacaaaacgccgtcgtatttgtttgacaagtgtaaaaacaataatccttgctaagtaaacactttttgggaaattttgcaagaatttatccatattaaatttgtcaaatctagattacaaaaaaaaaaaaaaaatccccaccaaattttgtaattataaatgtaaaaatattatgaagtattgatagttactacaatctagtagacattaaaaaatcataacaccaaagttaaaacattttctctggcgatatgcatcccgggctattggtattgccgaaaatctacgacgtcggaacataaacgtggacccgtattgttcgcgatgttgcacggagctggaaacaaatgaccatacaatcttctcatgtcctcgggttgaaatgatatggagagctgcaggctttcaaacttcccaattatgtgacaatggaataccaccggaagagaagttgcgtatcatctttcaaatgcataatgattcaagggtggatcgagttacaagatttatgcccttttggttaatgtggagaatatggaagagcggaaacgacctagtctttaaccacacgcgaacaaaattccaaactacagtggagatggctctcaatgacaccaaggaatggttggacaatacaatgacaaacgagcagcaaaatgggaacaggaatgcagatccgtctcgtaataccaagtggtcgccgccgggaagagacaaattaaaatgcaactatgatgcatcgcaccatgaaagaaacacagtttcaggacttggttggatccttcggaactctcaaggtactgtgatcgagtgtggtatggggaaatttcaaggtcgtatgacgacggaggaggcagagtgttcaacacttatttgggctatacaagcttcctatggcttcgggcataagaaggttatttttgagggagataaccaaaccatcacccgaatgataaacacaaagtcatctaatccaaggctacaacactttctcgataccatccaaagttggataccaagttttgaatcgatagaattctctttcaaacatcgagaacagaacggatgtgcggatttcttagccaaacaagccatcaaagagaatacccaatggtctctgtttcattcttgtccttattttctgagtccatatgtaaacaacgattactcttaagttctaaataaagttataagttgaaaaaaaaaaaaaaaatcataagaaaatctacaagttatgttttctcaatcacatccacttcttaagaagacataacatgtaacatgttgatatgaaaccatgtgattagtggaaatgaaaagcagaatgtaaggaggttacaatgtcagaacatagcaaatcatatataacttgattgttcctttcttcaaagcaacaatggaattggaatatagcatccactaaaagccttcaaaccaatcatacgagataataatgcgatttcaaaactgatcaagccataaagatgaataatgagccatagttgcattcgttcaatccgtgatttcgtaacgcgaaaggccaaaacgttattaagttccaatccaaagtaattgacaaaaaaacaaatggacctcgtgacaatgatgatatgaatctctcccaatcacaaaaatgagtaacaaacaaacactaaaaagattagggttaaaaatcataaatagtcaaaatcaacggccgtgattgaaagccaccctataaattctaataatcagtttctgagtgaagccattgttatttgttttcgttgccactctaacacaatgtgtgggattctcgctgttcttggttgcatcgacaactctcaagctaaacgttctcgtatcatcgaactctctcgcaggtactcttctgtttccattgaatcaatcatgaagcctgcccaatgttactgaagaatcgtttataatttggaataaaggtttcaacttttttagaggaaatgtgtgcgtttactcaattgatgaatcatagatagacccgaattgatgtttagattggttacttttttttgtgtagattgaggcacagaggtcctgattggagtggactccattgttatgaagattgttatcttgcccatgagcgtttagccatcattgaccctacttcaggagaccaacctctctataacgaagacaagaccgtcgctgtcactgtactttctcttgtctttcaaacaatgtcaattagtatcatgtgtaaataaatgtgtcaaagtgttggcctttgttccttgctggtcatctgaagggtaaattaaatttgcttatgatgtcaggtaaatggagagatatacaaccacaagattttgcgtgaaaagcttaagtctcatcagttccgtactggtagtgactgtgaagtgattgcacatcttgtaagtatccgttattgggaaaagactgattttttgtttctggatttccatcttttggactttttttttttgcatagatctgaatttggccaattagtgaagaagtaactgagcatatctctgttgttgaatcttatgtcttgcagtacgaagaacatggagaggaatttatcgacatgttggatggaatgttcgcgtttgtccttcttgatactcgcgacaaaagttttattgctgcaagggacgctattggtatcactccactttacattggatggggtcttgatggtatgtgatctaacgttttcctaagcaattcacttcaataaggctaagcttatgctatcttttgtaatcaattacttttctaatgtttaattaaatcccttataggttctgtctggtttgcttcggagatgaaagcgcttagtgatgattgtgaacagtttatgtcttttcctcctggccacatctactcaagtaaacaaggtttgtataccgtttaaacaaatacacatttagtctattctggtgggttttttgtaataaactttaggcatttttatgatgtagaagtttcatgaaatgtctttactgctttcttgtaggagggcttaggaggtggtacaatcctccgtggtacaatgagcaggttccttcaaccccatatgatcctttagttctgcgcaatgctttcgagaaggtatgtttggagatatattctcttcaaaatgttcagtcttgttgcaacggttattgcagttgctgaacagttttaggaactacgaatgtgtttctttaatttgacattttttcaggctgtaataaagagacttatgactgatgtgccttttggagttctcctatctggaggattggactcgtctctcgttgctgcagtagcattacgccatttggaaaaatcagaagctgctcgtcaatggggttcacaattgcacacgttttgcatcggtttgcaggtcttaaaacttcaagctcaatatcaggtttcttaaaaggcgccttcaagattctaactatgtattctattttttgttttcagggatcgccagatcttaaagctggcagagaagttgctgactatcttggaacacgccaccacgagtttcagtttacagttcaggtataaaatttccttgatatagtcatacagatccattatcattcatggttttcaaaatagacgacttaacatcttcctctaatgataattccaggacgggatagacgcgatagaggaagtcatttaccatattgagacttatgacgttactacaataagagctagcaccccaatgtttcttatgtccagaaaaattaaatctttaggtgtaaagatggttctttctggggaaggttctgatgaaatactggggggatacttgtacttccataaggctcccaacaagaaagaatttcatgaagaaacatgccgaaaggtatttccttgtcaacttactttgctgatctgcttttgtcccctcactgaatcttgtttatgcttttctttacatacagatcaaagctctccaccaatttgattgtttgagagctaacaaatcaacttctgcgtggggtgtcgaagctcgtgtgcctttcctagataaagaatttttaaatgttgcaatgagcatcgatccagagtggaagttgatcaagcctgatctcggaaggatcgagaagtgggtgctacgcaatgcctttgatgatgaagaacgaccttatctaccaaaggtttgtttacaaataactaaagctgtttttgtgcctctctgcagtttttttcgataaactctgtaatttcactaataatgttctaacaaaatttctcatcttctggtgaattcagcacattctatatagacagaaagaacagtttagtgatggagttgggtatagctggatagatggtctgaaagatcatgcaaataaacatgtaagaaatgtcttttattaaggcaatttcccgataaatgttggaagttttttgacataaacttccatttttcttggtaaaggtctctgatactatgctgtcaaacgcaagctttgtcttcccggataacacacctctgacaaaagaagcgtactactacagaaccatcttcgagaagttcttcccgaaggtaataaaatgccataaattttcaaaatctcacataaacgtctctgctttgctgatttgttttgttgtatttcctgagcagagtgctgctagagcgactgtaccaggaggtccaagtatagcttgcagtaccgcgaaagctgtagaatgggatgcaacttggtcaaagaatcttgatccgtcaggccgtgcggctcttggagttcatgttgcagcttatgaagaggataaagcagctgctgctgctaaggctggatcggatttagtagatcctcttcctaagaatggaacataagagaacaacactacaggcattgaggatataagcaaatgttttattcttctacacagagagatcgttatcttctagagggatcaatgaataaaagcttcgtccatttctagctggagattccatggatctccagttagtgcaagtgatacacgttgtctacatttgtacctaagtttctgcattttttgtcgttcttttgtgttagacaagtcttggaccctagatgatacttcagtttcttagacgttaaatttgatgaatccgaacttgtttgatttcaaagcctggcctttctgcaatgtgtttttgtgcatgttctggcttgtttgttgttactcaacgcaggatttgttataatatgtacaatatatctagtacacacataagtcaagcaagtaagactccgtggcccaatggataaggcgctggtctacgaaaccagagattctgggttcgatccccagcggagtcgctcttcatctactatttttatttttcttacgcgcattgcttataaaagttttttaatgaacgtgggataaaagttttcagattcgtatttattatttcaaaaagacagatgacctaacctcattactcgtgtatggacttttttttccttcaaattatattttatgaaatttgagtagacgaagtaactgctccccttcagatttagctaaagagccaaccacgtgaagtcgtgaatcctctctgtcgttttcgtattaacaaacataagaaattaagaaatgaaaatctcgttttcttatgtataattgttttatatcgatcaccggtttctctaggtctaggtatagctgttccaatatcatgatttttaagtttagttttcaacatcattaagtaaaagtgtgaactcattatcatcatcgctttccctttagaatttttgcaaacacacgaaaataaataaattgtttggacatattattgagaaacatagtcaaatgagcccgttcacattctgaatcatataagttacagtcccaaacccacgttttattaaaaatgtactactagtcaataatttatgttgagtcatatttatttattttgacacagttggttttcgcagtttcttgtttattagtttcaaattgcacttattagttttaaaaacaatttaatttgatatttggtataatatctcttttgaattatttacaaactttattacagcctggttttgaaaaaaaaaaaatactttgcataattgctactttgctaggattactttataaactttttcagctttgattcatttaacattaaacccaattaaaatattttattcattttagcataaaaggggaaaaaaaagaaatatatatatatatatatatatatatttcctcttttcaattaaatcagctgttaaaagtggaaaaaatcaaagagatatcaaaatattgattagaagaatatgtccatattcaattattttatattatctttattaaatgctttaccttacaacaataacttaaataaatttttgggattcccgttacattacttaagtaggacgacgtgcgtctgcttcgtctcattacaaagcagaagaaacacaaacagaggcagagatcttaagagttaaagactaatcccaacaatggcgtctctcaaagtcccaagcaatgttcctcttcccgaagatgacgccgagcaactccacaaggctttttcaggtctctctctttttttttcatcacttgatcgggatttagtttcttcttatacgatctctaatctgtaatcggtttcgttaatcacaagattaatcatttttgatatcttaagtactctcctatactcatcgttgagtattatttagtttgttgatttaatcacaactacattggtgattcgggatttactcttgtttgacctgatctgtgttctgtgtcccaccacaagatcaggatcatgtcttcttatattagatacagtccgatgatgtcctaattgattgattataatgaaaatatgtttctttttgttctttagtgaaccaagattatgcttgttttgtgttctccttgggagatttgtgacatgacaaaatgtttgttttttgggtttggtctgaaacaggatggggtaccaacgagaagctgatcatatcaatactagctcacaggaacgcagcacaacgcagcttgatccgcagcgtttatgcagctacctacaatgaggatcttctcaaagcattagacaaagagctttctagcgactttgaggtatttttaactcttttctttctttctttcttttgggggtctctgaaatgatatagtgactgatttaggattgtgaaactgttgtatttggtgtttttttgtaacagagagctgtgatgttgtggactcttgatccaccagagagagatgcttatttggctaaagaatccaccaagatgttcaccaagaacaattgggttcttgttgaaatcgcttgcacaaggcctgctcttgagcttatcaaggtcaagcaagcttaccaagctcgatacaagaaatcaatcgaggaagatgtcgcgcaacacacatctggtgaccttcgtaaggtaatcattcaataaaccaaatcttgcttgtttgttttgtatttgggacacatgtttctgacatatttgtgtgtcctcttttgtatagctcttgcttcctcttgtgagcactttcaggtatgaaggagatgatgtgaacatgatgcttgcaagatctgaagctaagatacttcacgagaaggtctcagagaaatcttacagtgacgatgacttcatcagaatcttgacaacaagaagcaaagcacagctcggtgcaacactcaaccactacaacaacgagtatggaaacgccattaacaaggttagcttaaccaccaactgctttttcatttgatgttacaaaatcttgttcggaaagcttattatatgaagtgaaatttttgcagaacttgaaggaagagtcggacgacaatgactacatgaaactactaagagctgtaatcacatgtttgacataccctgagaagcattttgagaaggttcttcgtctatcaatcaacaaaatgggaacagacgaatggggactaacccgagtcgtgactacacgaactgaagttgacatggaacgcatcaaagaggaatatcagcgaagaaacagcattcctttggaccgtgctatcgccaaagacacttctggtgactatgaggacatgcttgttgctcttctcggacatggcgatgcttgaaactgtttcaactttcgagttcctcctttctcttactgcatggtttgttttaaataaaagagttgtgaaactggttctgcaactatttatcaatgatcgtttgagtttgttaaatttgaatcaaaatctgtttttctttcttttaaatacaatctaaagcacaaactaaagcaaaagcctcataatctaagcaactacagcttccgcaatctctactactacacacacaacaaagcttctctgttttcttgtcattcttgatcagcatcttctccatttcttctaaagcttggacctttaaagctatcttcaacaacaaaggtctttcatcttccaaaacccaatttttggattcacccatcaccacaagtctctcaatctccatgcctggcgactcgaaaaccgattcccaagaaacctctcctctcccaacaacctcagatttagatgatttcctaagaaacgtcgatattttcttcctccgtagttcaaaaacgactctctgttgcttcaattctttgacagctgcttcgtccccttgacactccagaccaaaagattgatcccacatgagttggtctgatttcgaagagagctctctcgtgtttacttcgatctttctgttgtgtcctgcagagagatagaatctaacgaacagagtactagcttgtgacttgatctctacgtttcttgcttctactattctcacttggcattttagtgaacgaagtttcttctccataacacccattttcttgcttactaaatcgaatcaaatcaagaatcaaagatgaggtattgttgattgatatgtttgcttgaacaaagactctgtatttatatatccttatgatggactatgatgataaaatattataataatttatgtaatccataagaaattacttttgtatttcttactgatagttgtatcactcgtaagattattctagatctgcgtaagtggtcatagattatccattgcagaattcgaaaggacaaaactttgtcactttcttaactttaatagtatataatatacattgaagggttataaataacatgtggactaggttagataggcttagaccaatgaaattttaactctagtgtttattgcaatacgatgattcgtataataataatattgaagtggtacaagcgttgatcttccagatccaagatcttatcaagaatcagactcaaaaatctaaatggacccacaaatttttcactttaaatttgttatgctctatgtcatgaaatcactgatactactaagtattataaaaaaattggcacactccgaagtttctaacataaaattggcacactcaaggagacatggtaagcccatgattttaggcccgttttcagtatccccactatatctggcctacctttcaggtccaattatagtcaccaatttaccttttttggccatggttgtttagtttggtttaaaatggttttttgattatagtttttggtttttgtatattgtccgtggcaaaatatatttcgcaaacctatagcgaataaaacatccgagccaaaactcaaatgtcaaatggtccaccttatgtaaagcattcggctatccggaaactctctaacttgcattttgttaatattgttagtgtatgtttgtttttttttgaatttaccaatatccaatattgaatacacggttattagtatactaagacttttcgtatttagtagattgtcataactgtagaatggatatataaatttctgtttatttgatgaaaagaactgatgataatcattctatagaaataagattattatttattttgtaatttttaatagtggaggaatttagccggccaactggaaattccaacttaaaaaacagagaggaaaatcttttggttttcgtcacccaagattcgatacaattatttatagaatttctcagaactgatcactatcacaaattctattttctaagtccatttaagaaacggtccatctgatattataaaatcagagtacgtttactaaatatctttatatgttacgacaagtagtaagaactaagaagaccacctgaatatacatcaacattgatattacattacatattacacatcacaaagaaacaaatcacacgaacaaatcaaatcatgcttatgaagtcccattactatatgatcactacactcatttagtctcatttttctctcttaattttcatcattcttgtacacgaaacgcaaaaacatattcattttactcataaggaaaaactatcgttatcattttagatcatagatgatcaactaaatacgaattggtttcttcgatgttacgaagccggttttcgcttttttctcgtccagcttaatttgcttctccctgcattctaagctacaaaatgcgttgttccctctacaaaaacgattcaatatatacaaaaaaatattcattaaaactatatagcatacaaccatgatcaaaacatatcatttcaaattgtgtgaagggttaattacgtttataaaatttacaaaataaaaagtaaataaaatcgtacctatacatgtaaatgtcacgatgatggcagagacttcgattgcagagactacaagtcttcaagaaatcatcgtagttactagccatcaccaccatcggattgtgagggtgttgatgaaaggttagatgatcggacggctgagatgcgtcatagatcgtgggtgtatcgagtgtgatcatcttcatgctagttgttctcttgatcagtgatccatgacgctttcctaacaccatcttctctctctctctctgtctttctttctttctgaagaaaaaagaagaagtgtgtagtaaaggggaggaagaagagaagaagaacaaagttatttaaagaaaaagaatgggagaatctaattatagagataatattgttttatttttataatcttctttagttagtaattataattctttttcttttttatatataaggtaatcatattggtgtaaccctgtaaatagattaagagttaagacaatcatttaatccgagattgcgtaacaaagttcgactttcatacccccatttttgccccttattcaatcaatgcccaaaattatagtttaaagtatttattgcttcaatctattagaagaattacccgaaattatgttattatcctggatatgatggatacagtttgcaagtatttttgtaatcaaccagtgaattcaaattttcaaatgttacctatatacccaaaaaaaaagacaaattttgtctagacgaatagttttcggtttagtagtcttatcattagatgtactcatactagtgatagtcagacagtcctttatatataaaaatctcttacgggtaaacgaaatcagaaacacttctatatagcgaaagttttatcacatatataataaatatcttataatggaccaaaaacatgtggatcgatatttaccacttttgaaaaaaattgtcattgtaaagtctgatccggttgtgtataaatctagatcattgtgaactggattagtcaagctaaacgggtttaaactcaagtttgaattagattgaatcggactatatatcccttatatagaagaagaaaacaattcataaaacaaaattgtgatatatcataagcattaggaacatgacaaaagttagtgcggacatgtataaatggatgaatgcgtcaccaaactgtccaaaaacttttggacacatagcctctttcttatttttagctgcactgtcttgtctcactatttcctcattgcctctcacctttttatttttgtttttagtgaaatattataagtcaaagagttagaaactccaaagataccaaaatttattactttgatctgatgcacataattgagtacaattctaaagttaaattatcaaaaatccacacagccccacaaatgtaaaactcttttgttacatcaaaagaaaaaaaaaatagtgggataaagtattgaagaatcagtgaatggtacatgagctaagcaataaagtttagaaaaactaattttgtgagagcacaaaaggacaaaggtatcaacaatggaacgcatcaaaggacccaaaccaattatatttcgatgaatctttgggcccttaaacaaagatgacgaaaaaaaaaggaaaagcaaagcaagtgtttggtcctgtaccaatagattccttttattcatattattaattgaaaaaaaaaatcaaataagtaattgatgtttcctaccaacttgaaagaaaaagcctagacaagtggctgcactttagtttttcactttctatcattttaacttttcaagagaaacccacttatgttgtacatacattttccagacattgtaaatttttgactcgtttaacatttttatcaaaagcagtaaaaaaaatgcatatggatttgacaggacaatatccacgtgttgtgatcgaatggcttaatcatgaaaatcttcacaaaagacacttaagtactgatcatattcacttcactaagacaagaaacttgaaagcaaacttgcaagtgtattgtttattcagttatatgggccttgttagatatgtaatgttgggcctatctcagatgatgcctaaccctaaaacccaactgagacgattctctaatgctgtcgttttgggagagccgaaagtttacgccgtcagaaagaagaagctatccagtttaattcggtttggttcgtaggcaggctgattgattcttttagggaacagacatcgagactgcggaacctaactgagttttgagaacgagtcgcggccgaggctgagtcaactcggtcaactaatggtgagattaattgaaaggttaacaactctgcaagacggtagcaagctacttatcaatttacctaatcaaaaacctttttttttttgaccgaacacaaatactcgacggttttgtaattcggatcattatacctttcgagtaacgcatttttttttgaattatcgaaatttttataatgtatatgtgcataattttaggtttcaccattagagaggcaattagttgggagcaaaagactttgatcaaagctattatgtgcaaggtcctccaaattggtttggaaaaaacgttggagagtactgagtagatgaacatgcgtcacataaaaacggttaggatcgttttgagtatctctggaggagatgtttttaagaagaattttctagtcttcgacacatcaaataaagaagtaagtggatgctcttagttctgtgttttcaacatatattttcgggtgttttaagtatgtgtatctggaattttgataaagagtttttaaaacagaaagcttgatcattttaaaatagtattaaagagtgatatttttttattaaaaactgttactcgaatacacatatagtaagtaaataccacctaatgtatatgaatatatatgatgatagtaattcacctatcggttctttcacatgaaccatatatgtagtagtttgccatacaactagttcttaagaaggatgttatcacaacttcacaagataggtgtaatgatgttcgttctggtagacttgcttttagtatattctcctcaaatgagatacattgcaaattagcatttgtatttagtggttattattgataatattgtataattgcataacgacataaattgtataataaaaatatgtagaatgaaacttgaataataaattttgtattcattggacaaatttacagaataatgtaataagtttgttttatgtcataaataactatatcccacttctttgtacgataaatgtttatttgtatatttagacgaaaatgtaaatccttcgttttcgcattttgttaaacattatacaaaaaaaatttgattgataattgtattaggattgtcatttcttcacgacgcatattaccaatcagaactaatatatttgttttcttccaaaatctaatatgctagttgcttttgtattcgaaaattttgtgactcgtatgttgttgatgtgaaaaatggccatccgaatagtcaagtgttttcatcatgatacatctatctatatttattatgattaatcaaaagtagcaaccattgtttgaaaattttgaactttgaacttaaatcttgttttttttggtgacagcacaatgcatataaatttcgatgatttaattaaaattcttatcatggctactcgcataagtttagtaaaggtttgaataatggccatccgtataagtttagtgaaggtttgaatactaatttataaaatatcagaattataaaattacatgaattatccagccctctcttaaaagtttatcgtcaaataataactgaaatctttaaaattaaccgtacccgagtcatattcactagcactacttttcgatatttgtatccgaaatggataaccttaacttaagtttttaataccaaaacatatggaacaaaaaaaaatctaaaaccgccggcaaaaaacaaccaatttctgttcggtggggatgatgatcggaccggtctaaccgactgaattaaatgtcaattcttaacaacgacgagtgttaaaattaaattatgtgccttttcgtcgcttcaaaacgcaaccgtttccacttcttattattttttttctctcgtttaacaaaacaaaaacaaactgacttggatttgtcattttttgtctagccaaaaaaaaaaaaaaaaaaggagagagagagagagagagagagagagagaaacgaagaaaaaaaaagaagcaaaaaacattgtgggtctccggtgattaggatcaaattagggcaccagccttatcggaggaagaagccatgggtagaaaaaaagtcgagatcaagcgaatcgagaacaaaagtagtcgacaagtcactttctccaaacgacgcaatggtctcatcgagaaagctcgacaactttcaattctctgtgaatcttccatcgctgttctcgtcgtctccggctccggaaaactctacaagtctgcctccggtgacaagtaagctgctactttcctcttctggatctaactcgagttctgtcctttctctctttgtttaatcactttccccatatagcaataacctcaaatctagggctttttgtttccttcaaatcaacttagatctccccctttttctgtatgaggagagctgatgctttagcttaaacctaatttgagattaaacattgtggtggccaagatatgttcttgctttttttaaaaaaaaatatctataaggatttttatttttttatcttacctttgattttttacaaattttaatattgcatgtgattcaagaattttttctacacgtgttgatacattctcagtgttgtttcaagtaaattttgaatcgctaattcatctgttgttcactttcaagattcaatttttatcttatatattttttttggtttaagaaacttactagtttaattttgagatttgatttgtatatccaatattgcaatgcacctccggtgaatttgtttagagagtaatgggggttaatggtaacatagaccaagagttctttgtttaaattagatgccacattgtggaattactgatccggaatgtaatgtagtccatagtgtttgtttttattttctcttcaattgatttgtcgattaagtacctttcaatggtctcttgttgatttaattttgaaggctaattgtagtgcttggataatatttcacattgatacttgccacacatgctacattgcttatcaaatcggatatcgattttcactcttttaaccctcttttttttctgttcttgaaatgaatttagtttgggattctttggtaaagaaactcaaaacaataacttagtctacgaccaccttatatatgtcgcagtagcgtagtggattcattaagtagatatcgagcatcgatttctaccgatagggtgaaactagtagactattatcatctcttcaatgaatttaatagtcttccaactttggttgttgatattcctaaccacatgaccttttgacattcgtctatcttgaagacatctcaactactacttctcttttagaacatttctaatgtgagtacaatgaaccaaaacgaaactacattgacaaattaactaatattgatagggtgttacttatagaagacttacaaagaaaattgtcattgtgataagaaaaatatatcatctataaaatggaaatataatagatagcttcttctcattgccttgatgttaacaccaaaaatgctggatcatgaaagtatatagaattattaggatcctttcttatttgcctccattttacaattgtcaaactctagtcgtagcaagtttctttggcagttcctttatatcttaactaagtggcattatacaaagtattttgtgacttaagattgattcttaattatgcgcactgtctaggttttcttctttcggtgattaatgttaaattctaaacttaagatgttagaaagtgcattctaaggtagcctatattcatattattgtattaatatatcatcaacaacaccaattaggataagagttgtgatc

SEQ ID NO: 963 - DNA, 17878 bp, Arabidopsis thaliana
ttaccagaaagccaaacccattttcttggcttgacttataatcctgatatcatagagtcagaaaacgttttattttcaattccctgctgagtcgttcgactttatgtgtgattgatttaatactaggctgaacttggattgaatagtcataatcatagttagatattgatatgcattagttgatacgaaattgaaagagaatatgatggaatggaaaagtaaaacagaagtagtcttctcaaaactagagtaacaaaaaaagagtaattgtatgtgtttttattttaagctacacactcttcacattttctaatatagacgacggcttaagtaaagttgattaacaaaaaaggtgttggtaagggacacaaattgatgcaatatgtaacattatatatgagcattctttcagtccggtttatcccctctataaagtcctctattgatgctgtatctaattcgtagttttgaaatggtttggtgtttctaatgaattttttttttgttcatgatatctccagcatgtcaaagatcattgatcgttacgaaatacatcatgctgatgaacttgaagccttagtaagttagctacgaatatcattaaaattcttctggatgcagtttttgatgttatgaagggatagaagcactggtcgaacctgagataactcaatgttttgaatttttcgtactggacttaattctctctagttacagttattgcatttttcggaaaactcacaatctttctgaccattcccttcgttttctccatgtgcaggatcttgcagaaaaaactcggaattatctgccactcaaagagttactagaaatagtccaaaggttagcacaaagacacttttatctccctcttcttctgatgaaaaatacttttttttttcttttcttttggcgaattatgaatacagcaagcttgaagaatcaaatgtcgataatgcaagtgtggatactttaatttctctggaggaacagctcgagactgctctgtccgtaactagagctaggaaggtattttgtactgctactaagtgatcaaaccaattatcccaaatttgttttgttaattagttagatctgactacaagtatagtcttttgatattttcgtaatgtcttgttgtagacagaactaatgatgggggaagtgaagtcccttcaaaaaacggttagtacttttgttttttatttgctatcaaagctatattgtagggtaatgctgattttttaatactattaacctcggattctgcagatcctgtaaccaagtttaactctagatatatctctaggtcctgatttattcttggctttatttagatgaaaccctaattagaacccaaaaaaaaagcacttataaacttgtgatcaaattcgacttttctccctcgatgaatcaccgaattggatgaggatcatgctcagatagctttagaacttgttagaaattaatgaccttatgatcttgtccaaacaggagaacttgctgagagaagagaaccagactttggctagccaggtgacaaaaacatctcttgaagctaattcatcagttgatacacaataaaaatagaaattacacttgcgttaaacatatatatataaaagttgaaggactttgattgatgttaggcattttttttgtgaaacccccatatatcttaaaatctatgataaaagtcctttcaaaattcaaatttcttgttactatttagttgaatgatcagttttaattaatgaaattttccaaaaaaaaacagcctttttacaatatagattgatttcttgttaatgtttgttagctgtaggaaaataatataagaaagtttcttacaggtggggaagaagacgtttctggttatagaaggtgacagaggaatgtcatgggaaaatggctccggcaacaaagtacgggagactcttccgctgctcaagtaatcaccatcatcaacggctgagctttcaccttaaacttacagcctgattcagaagtttttacaaatttgtaaattataaaaagcttcataataatctcaacctttttatcttcctcgcgccaatgtggaaattaaggttaaaaataaaataaaacagaagctcatgcgaaagaattgtaaaactaagataaagctatagtagatctttattgtaccttcgtagacgatataagatttattcgtgtgtttgtctttttgtctgcaagtacggattggatttaaagttttactttcttcagcgtgaagaaccctagacatagagcttcttaattcttttggttttacttatttagttgttagttatttgattacttgcacgtgacgtggcatagtgattttttccttttccaagtttatcagttctacttttgaggaactcaaaagactattcttccagaaagaaagaatatggcagaaaaatacttgtcttggctgtgcttccagcttcggcccattgaggcccatcagaagttgttttcattttttgtttcatttgcagctgttactgtcttactgataagtaaattagtaatataatatatttctgtttaacttggttcgaatttttgggttttggaaaacatattaatatcggattggtttggctttggattcatcttcgagttttgaatgtttgaattttaattttgcgggttatttgtttccaatcaaaacaagtttatcggtcagttttagggtcagaaccaaaattaaaataagcctaggatcctgagaatgacaagtcacgagcggaatatcgtcatatgatataagactaacaaaaacatattgaagctctctgatctttcctctagattcgtaagagatagacagattgaaagtttgaaacatacaaacacagaacgattgacgacagccaagaacaagtattagacttaccagtgatactaattgtatccaaaatggataaccttaacttattagttcttaatacatcaaaacatgtgaaacaaacaatataaaactgccgggaagaaggagtaaaactcgcttaaaaccaatttctgttcggtagggatgatcatcggaccggtctaaaccgactggattaaaagtttcattttaacaacactccccctaaggaatttcaacaagcgtaaaactaaaataaataactattacatgcctcttcctcgcttcaaaacggcaccgtttccacttgttattatttttctctctatcgtctaacaaaaaaaaaaactgacttgggattttttttcatttgtctagcccaaaagaagaagatagaaacgaagaaaaaaagcaaacacattttgggtccccggtggttaggatcaaattagggcacaaaccttatcggagaaagaagccatgggaagaagaaaagtcgagatcaagcgaatcgagaacaaaagcagtcgacaagtcactttctccaaacgacgcaaaggtctcatcgaaaaagctcgacaactttcaattctctgtgaatcttccatcgctgttgtcgccgtctccggttccggaaaactctacgactctgcctccggtgacaagtaagcttctttcctcttctgggtctcactcgagttttgtgcttcttctttttttaatcttatataataacttcaaatctagggctttttgcttccttcaaatcaactgagatctcctccttttttttctgtgtgaatagagcctatgcgttaccacaaacctaatttgagaattgagattaaactttgaggtggccaagatatgttcttggtgttcgtttcgtgcttttttttttcgaaaataaggatttttattttatatcttacctttaattcttacaaaatttaatattgcatgcgattcaagaattttttctacacgtgttgatacattctcaatgctgttcaagtactttttctgtcgctaattcatctgttgttcactttcaagattctttttttttttttttttttttttaagaaacagtgtgtctatttgttaaattttgagatttggtttgtatccaatgttgcaatgcacctcccgtggatttgttgatagagtaattggggttaatggtaacatttaccaagagtctttcgtttaaattacattgtggaattactgatcccgaatgtattgtagtctagactacactgattgtttttaatttctctccaatggatttgccgattaagtacattaaaggtctatagatgattttgaaggttgattgtaacgcttggataattttccacattgatgcatccccacatgctacattacttatctaatcggacatagatttttacccttttcggtgtgtaccatacacagtataactagattaatgagctcaagatgttgtgcccctttttctgttcttgcaatgaattcagtatgggattctttggtaaagaaactcaaaattttaactaagtctacggccaccttatatatgtaacagtagcgtagttgattttttaagtagatatctatcgtcgatttcgaccgatagggtgaaactagtagactgttatcatttcttcaactttggttgtggatattcctaaccacatgaccttttgccattcgtctatctagaagaaagcttaactacttctacttctcttttagaacatttctaaagtgagtacactgaaccaaacgaaattaacctacattgacaaattaatattgacagtgttttttatataatacttacaaaacatcgtcaactggataagaaaaatatgtcatctcgaaaatggaaatgtaatatatagcttcttctcattgccttttgatgttaacaccaaaaaagcttgatcatgaaagtgttaaacttataacaaagtactttgacttgagtcactgtttaggttttcttcttctggtgattaatgttaaacttaatatgtcactatattaacgtataaagtgaagtctaaggcagcttatattcatattattgcatcaacatatcagtggacaacaccaattaggataagagttgtgaccttcccagaaaccatacccattttcttggcttgtcctctaaggataatcctgatatcatatagttttcaatccgctgctgattcggtcgactctatgtgtgaatgctttgatactaggttgaacttggattggatagtcataatcataattacatatttatatgccttaattgatatgaaattgaaagagaatacgaaattgaatggaaaagtaaaacaaaagttgtctttgcaaaaaatagagtgacaaaaaaggaaaataactgtaaacacatctacagtggttttattttaagctacacactcttaacattttctaatatgtaggcgcatgcttcagtaaagttgattaacaaaaaagtattaattgatgcaatatgttataagcattctttcactctataaattcctccaaccgatatatactgtatccaattcatagttttgtgtatattattgtttctaatgaaatttttgttttgttcatgatatctccagcatgtcaaagatcattgatcgttatgaaatacatcatgctgatgaacttaaagccttagtaagttagctacgaacatcatcaaaattctctggaatgcagtttttgatgatattatgggatagaattactggtcgagcctgagataactcaatgatttgaatttcttaaactggacttaattttcttaagtaacagttgttgcatttttagaaaaaactcaagaactttcacaatctttctgaccattgccttcgttttatccatgttcaggatcttgcagaaaaaattcggaattatcttccacacaaggagttactagaaatagtccaaaggttagcactaagacaccttttatctccctcttcttctgataaaacatacttctttttcttttggcgacttatgaatacagcaagcttgaagaatcaaatgtcgataatgtaagtgtagattctctaatatctatggaggaacagctcgagactgctctgtcagtaattagagctaagaaggtatttctactaagtgatcaaaccaattatcccaaaatcttttgattagttagattaaaaagaatagtcttctgacataatccgtaatgtcttgttctagacagaactaatgatggaggatatgaagtcacttcaagaaagggtacgtttagtgcttaatttggtttttaattgctatcaaagccatattgtagggtaatgctgattcttgaatacttttaacctccgattctgcagatctggcctttaaccaagtttaactctagatatttcttttggtcttgtcttagttccttatttgttcttggctttattttagatgaaaccctaatttgaacaacaaaaataaagcatttataaactcgtgatcatggtcagatagctttagaacttgttggaaactaatgaccttttgatcgtgtccaaacaggagaagttgctgatagaagagaaccagattctggctagccaggtgacaaaaacatctcttatgattcttcgagctaattcatcattacacttgcgtcaaaacatatatataaaaattgaaggagtttgatggaagctaggcattttttttttgtgaaaatacaaatatcttgttactatttagttggagctgtagaaaaagaaatttgaaggacttcaatgaatgcaacacagttttgagtgaaactcacaatttagttttaagcaaaagaaaagtatactcttaaaaatctagatttcttgttaatttttgttagctgtaggaaaataatgtaagaaagtttcttacaggtggggaagaagacgtttctggttatagaaggtgacagaggaatgtcacgggaaaatggctccggcaacaaagtaccggagactctttcgctgctcaagtaatcaccatcatcaacggctgagctttcaccataaacttactcacagcctgattcagaagcttttacaaaattgtaaattataaaaagctgcataataatctcaacctttttatcttcctcgcgccaatgtggaaataaaggtaaaacaaaacgaagctcttttcttttatgcgaaagaattgtaaaactaagataaagctaccgatctttgttgtaccttagtagacaaatatcagagttcttgtgcttgtcttctttgtctaaaagtacggattggattcaaaagatttgctttctttagcgcgaagaaccctagagcttcttaattcctttggttttccttatttaattgttagtgtttgattacttgtcgtacgttgagtggcttacttatttagttttaatttgcttcaaccgtactgtccgtatcagatatttggtcattttccaagtttatcatcaattctacttttgaggtaccaaaaatagttctctcagaaagaatatggcagaaaaagacttgtcgaggctggttaggactgcgtccagcttcggcccatcgaggcccataatttaaatatggtggcccatagtataatgtatttcagtttaactcggttcaaatttttggatttttggaaaacacactcggtcaaattttcagattggtttgaaatttggttcggctttggatgatcaattctatttttgggtcggtcggtttagagtccaatcaaaacgggcttaccggttatctttcagggtcacaaccataacccaaataaaccgatgatccggacaaatgataagtcacgagctgaaatgacgactcagctcgaaagatatttatttacgagcatcacgaaagtagaacatttgtcgaatcgatttgttggatattgatattacgtggaactatcttacaccatttttattattaaccaagggataataacaaagaccaacgcgccacaagggaactcgacatgcgttaatacgtgtctaaactcctattaaaaacgcaccgtttagactctttgagtttgtggttttggtttaagcgagaattttttcttttcctctcttattaacaaaacaaaaacaattttaacttttttgaaatttttagcaaaataaaaagaaaattaaaaaaaaaagacacaaaaaaaacgttcagtgtctccggcgagttatgcagacatcacaatcaaattaggtcagaagaattagtcggagaaaacagccatgggaagaagaaaagtagagatcaaacgaattgagaacaaaagctctcgacaagttactttctgtaaacgacgaaatggtctcatggagaaagctcgtcaactctcaattctttgtgaatcctccgtcgctcttatcatcatctctgccaccggaagactctacagcttctcctcaggtgataggtaacaccattacctattttatagtttctcttttgttaattaaatctttctcgaggaacatataaactacagaactagggtttttcttttacccctttgaatctttgaagctgattttcgtgttttgttcatccaagtaatgatgtataggtttacccaaatttaagattaaacaatgtggtgtccaaagtccagagatgttcttggtgtttgttttgtgttttatcatattctattgttttcatttgttgcaaggatttaattttcctatatctttttttttgcttgtgaaaatattatttcatgcacttggagagatttttctacacgtggtaatccgtactttaggtttgtcttgggatttcaagccatcttaattgtttgtgtgcttattctgctgtagaggtatagaagatcaatgtacattgtttacttttgagattaatttaggcccattatccatttttttactcaactcaaatgaaaccccggtagatttgttgagaaacttatcaagggtctatagactggaacagatgccacgcactctttttgttgcattccttggttaatttcaagtgtaaagaagatgatttatttactacttctctttttatttatttgttgcttaaggaaaagggttctagctagctgattttgatggtcaaatttagtgtttggataactataaagaagactcaaattaatactatccacacatgctgcattattcctttgatcggatatcgtattaatttctctctttgaaagctcatatacaattcatacacgcacattttcggatttgaacacgaggtatatatgacatgacggtaacactagtacaaaccatcgggtttacaagctattttcttccactatacttgtaagttttgcgtgcatattacaagtacagtggaagaaaatagcatgtgtacacattgagtagctctttctttttcttctagaattgttcccttctcttttgtaatgcatttttaactctttctttgttgagttattgggtctcatgggccaaagaaactgagtctctacaaacatttggtacgatacattctatctttttttgcttttcttaaccattaatatgtgattaaaatgaaccgaattgagaccttgtagaagtagatatataaatgtgttgtcactaaatataaagcttcttatcatttccctcatacttaacaccacaaatgcttgatcatgaaagtatatatgttaattagtcaactaacaggcacgaactattgataggatcatatgactgatggaacttctttctttattttcattgctttaatttaggaattacagtagtcaaaattaaactctacttatagctagtttcttggtagctcggctggtactttaatctagtggccctatatagaagtgttttcacttcagattgtacttcctatatatatgcctcactaattgcatagtgttagatcacagcttaattaggaagctactaatcatggagaacaagtgaattaaatactgtttaatttgaaatcttgcaatatagatcacagacgacacgaagtaagaatgaattgtgataattatatgcattgagatttaaaatgaaagaaaacattgtgtactgaaatattaaaactaaagaagtccatcacaaaagatgggtttatcgttagagaagtgcaaaaactattggttaacaaacttttgtgttattttatagctatatacactgacatttatataaaacaagccttgagcaaggttaattaacccaaattgatgctataacatgaattaatgccctatataatagcatgtatatatatagatccctactttttctctaagagtctctattgacgttgtatttgattcgaagtttcaaaaagtccctctaatgcatttttgtttctctcttgatctctccagcatggccaagatcctcagtcgttatgaattagaacaggctgatgatcttaaaaccttggtaagtttttattagaaccttgcatatcaggtcgcatgcatatgtaatcaagatgagcatctagaagatatcttatagtccattgagatggttattatgctgatactgtttttagtgccttaacattgtggagagagaccagcatagaatcactctgttctttacagttggtattgcactagaaagtccacgacgtggttctaaacttgtagtattccagtctaaccctatttttagttctcgagtgttagaaacatctcttgtcattcatatatacacccattcctctcaattctcaaagttgtctaaggcatatgcaactgagatgaacatttagaagcttaggtagaatagtccattgagatggttgttatgtggatgctttgtgtagtttcttaacattgtggagagagataggcatagaagcacttcgttcttcactaccggtgatgcactagaaagtctacggcaaggttttaaacttgtcgtgtaccaaacttaagaatcatttgtctcctggaaacaaaagaaatttaaaatctttctttcatggcaggatctagaagaaaaaactcttaattatctttcgcacaaggagttgctagaaacaatccaatggttagcactaagactcctttttcccccttttcctctgattatagaagttgttttccttttctgttgtttatctatgaatatatatgcagcaagattgaagaagcgaaaagcgataatgtaagtatagattgtctaaagtccctggaagagcagctcaagactgctctgtctgtaactagagctaggaaggtatatatgctactactaagatattcagtcacctagtccataaaatatttggtccaagagcagtgtttgggtttcgcacttcagatcatttccccgatttgacctaactcttaatgtcttgtgacagacagaactaatgatggagcttgtgaagacccatcaagagaaggttagtatttctggtttttattcgccatccctagctatgctgattcttgaatcctctgaaactccgagtttggagatcactagaccaagttaagatctctatatatgtcatcgacgcttgccctctgctgaatcaccgaaaataatgctatgaggatgttttagaaaaactgaataaagttgtgatggtgtccaaacaggagaagctgctgagagaggagaaccagagtttgactaaccagcttataaaggtaccatctcttatggatagtaaaacatgctcatatcttcttagtaatatttaatagggaatcatcacctatagaagaaaaaaagaaacgtaaaacaaatttcttacagatggggaagatgaagaagtctgtggaagcagaggatgcaagagcaatgtcaccggaaagtagctctgacaacaagccaccggagactctcctgcttctcaagtaaccaccatcaccaacgactgattcgaaaaataaaaattgtaaaaattatgatttgtagttcataaggaaagctacatactgtatgttaaaaatcctcttcttccccctgctacggaaaagtcatccaaggagatgcatcaaataaagtaattgatttttattgttaccttcggagacaggatgatatagtatttactttcgtgcttttctgtgtgttcttgtctgaatataggaattgtttgagtttataaaagctctgttttcttcagcgtgaagaaccctaagaccaaaatgattaaaaaaaataaaaataaataattgctagttgttactttaccttcgtggcaaagttaagaccatttttcttagctgttgggagaatttatatcagagtgatgtcagataattcgtttttttttttcctcggaactcttttaactgatttttcaaaaaaaggaggaaaaaatgattttaggcggaaagccggtaaaagacttgtcttagctgtcaggttgcacaaaaaaaaactgttactgttaagcccagattcggcccatttaactaaagattataccagttttcctatatatatatatatagataaaatgaaaaatttaatttaatttataaattcagggtacgcgattgacatcaataatcatagtcaacgcaatttccgttgatcttcctaatttttttattttttatttctctctagagttttacactgtcaaattacctatctagttcttttttttctttttcttttacgactactagctagagagacatttgcacatacagtaaaggaatttattttatgtaggggttcaaacacttgggaagaagaggatttacagacttttttaacatgaaattattggatgactcttcttcccctaagctaaatttacagactttttgttgtttggaaaaagttcttcatataaaaaacaatatgaacagtattacagtaacctgagctggaataacttgagcagtagtttgtttgggctttttctttgatcaaaaactttctattaaaatgcatcagaagaaaaatcattacatggctcagcccaatgttttggtttctcatacagcccaatacatgctcattactagtattgctacagcccaatatattctcattagtcattactagtatcggtggaatgaactaaatccaatcaacgtccttgagttgtttgagtttgagttggcagagcaatgacttgagctgggcggctggtgaatgtgccaaggacacattagtacaaatccaaatccccacttcggctaatccttttagagattcggatttacatgatgttgttataggtttaagattacgcaatgagttttttttttctttttctcactgttttgtctttattcagtaacgaagatattttaaaaaagacacagagaagaaaaataaacgcgccctcagggaattcagcatgcgttaatacgtgtctagatttgattaaacgcaccgtttagttttttttttttgcaagtcttaatgtttttttgtttgttttaattaaaatatgttcattgatatttttagtaattggggattaagtcatacaaaataattcatggattgtgctagaaaacaactggaaaaaaaagaagaaataaaaatgcaaaataattcaggatctccgaccagtttatacagacatcagaattgaagaaattaggggattagatgtgtcggaagagtgaagccatgggaagaagaagagtagagatcaaacgaattgagaacaaaagcagtagacaagtcactttctgtaagagacgaaatggtctcatggagaaagctcgtcaactctcaattctctgtggatcctccgtcgctcttttcatcgtctcttccaccggcaaactctacaactcctcctccggcgacaggtctcactctttttaactcctctttgtagattctctttttagttcatcatcttctccgaaacttagaaactagggttttttttgcccccttcgaatcttcttgtgttagccaaatttaagattgtacaatgtggtggcggaagatgtactcttcgtgttcgatttcttaaatttccatttttttattgtttcaatttgttgcagggatttgttgtttttatactctttttttccttgcatgcacttcaagagatttttctacacgtggtggtaatccgtaattcatgtttgtttattaggatttcaagtcatcttaactttgtcttgctactagagttttataagaacaatgtaaattgtttaatttaggctcattttactctcactagttcaatgcaccttgggtggatttgttggggtataaatcaagaatctagtggaaacgagtgccatttgtttttgatatttttggttagttacaactctacatgatttataagtttctctttttattgatttcgatggtcaaaagtagttcttggataattaactataataaagaagactctaattcatagttttcacatatgattcattactcctttgatatgagtatagagttgtcttccttatttgtcatcgataactcacacacttccactcctagatttgaacatgaattataacacagcggtgatcattagtacaaaccacgaggctacaagtccaatatgtcatcaatttcctccctctttaattgtaatttttgtgtgcatataccaacttgcaagatgcatgcatgtctacatattaagtagctttatcttccactcctagaactgtttccttctcttctcttttgcattgcattttaattagtcagtcgttttggagatattgggtctcatgggccaaaaagaggtaccgaccctctctatatcaattttgttcaattcatgttacttgcttttttccctctataatgtagaaatggggatgtccttgtcactaactcaatatatataaacgttcttaccattgccttcatagaaactctactaatacttgatcatgcaagcagaaatgttaatttggcaactaccatgcacaaattatagatattactaatagaacttttttttatttggttcaaggtttaaaatagttaaaatccagttgtagctagtttccttggtagctcctttaatttgatactttaatttagtggcaatatacagaagtgttttcgcttgagattgtggttcttatgtgtctttctaattgcatagtttacaactcatttaggatggagttaacaacatgctgatcaaatgaaccaaacttactctattatctgaaatcttgcaatagatcacggacatcacgaagtaggattgaatttgtgatcaaaatgttggtatccataaaaaaaaaaaaaatcacatatggtaggaggagaccaaactataatgccttttaagacctaaaggcgccatcatacataagctaagttagcttttgtggtgtgtctttctgggcttgattgggctcagtcctatcatttttttcaccttctctgaaatgctaaacccattttcttggcttattgttgaaggagtatttcaaaatgtgaaaatgttaaagtttatagccaaagattttgttttcagttgtccaatttggcttattctgtgagtgcttcaatactttgtgagggtagttatagcttttcatatatgaattgtcaatatgatttcaccaacttctgaagattttcacttgcaaacatgaatttcattgaaatttcatttttaggaatctttttcaactctccatccagttattcttttttcgactgctgatagtttgaaaaaaaaagttagatcattaatttagctttgatagtgataagaaagtagtgaggtaattaattactcatatgaagaaattgctcattttatgcatatatctctcaaacttttctaagttaaaacaaattagaggctgcagagttgattaaagttgttattggaaagttagaaattaaagcattttattttttaatttacccatatacatgcattaacattaaaatgaaagagaaaattgtgtcctggaaaattaaaactaaagtccatcacataatatggatatatggttagaaaaatacaaaaaactactattgcttaacaaaccttgtgttgttatttaagcggaacaactaacaattcaatagagaaaccttgagtaaggttactaaaaccattgactcagtgtagtaacacaaattgaccctatacatatatagaagtaggttactttctcttattgatatttgtttcatagtttcaaaatattttggtatacattatttctaatccctatttgtttatctcttcatctctctccagcatggccaagatcatcagtcgttttaaaatacaacaagctgatgatcctgaaaccttggtaagttcttcttagaaccttgcaatctagtccctggcatggggacacatgcatatgtgattgagatgagcatttagaagctcaggttatagtccattgagatggttgttatgttgatacttcatgtagggccctattattgtggagagagactgtgatagaggtatttgcactagaaagtgtacaacaaggttgtaaccaaatttaggtcttgagggttagaaccttagaaactatatcttgtcatccatatatacactcattggtctcaaaaaccgtccaaggcatatataattgagatgagcatttagaagcttagctcgactagtccgttaagattgtctttatgtggatgctttgtgtagtgtcttaacattgtggtgagggatcggcgtagagttcttcactgccagtaatgcattagaaggtttacgacaaggttctaaacttgtcgtataccaaacaaacttaattctcgagggttagagtcgtttacgtctcttggaaacgcaagaattttacaatctttctttcatggcaggatcttgaagacaaaactcaggattatctttcacacaaggagttactagaaatagttcaaaggttaagatcctttcccctcttcgtctgataaatatatatatatatatatatatatatatatatactctttttattttgttgaatatatatgcagaaagattgaagaagcaaaaggggataatgtaagtatagaatctctaatttccatggaagagcagctcaagagtgctctgtctgtaattagagctaggaaggtatatatgctgctactaagtgattgcttctatctaattcgttttccaagtacagatttcggatcttgcctgactttggaccatgtttccaatttgacacaatcctcaatgtcttgttgcagacagagttattgatggagcttgtgaagaaccttcaggataaggtcagtaccttagtttttatccactatcccggccattgaaggttgattcttaaatcctcttaagctaggagtatgcagaacactagaccaagtttagctctctagatatgtctttttttggtcttgtcttagttcttgatatataatttttggtttaatttaaatgaaactgaaattaaaaaggttttaaagttttgatcaaattcaagtttctccctggtgaattaccgaattgtgacgaggatttttagaacttgttggaaactaatatacctttatgacgtttgtttgtcctcaaataggagaagttgctgaaagaaaagaacaaggttctagctagcgaggtaacagaggcacaatctcttaagcgtaaagaaactaatttaatcattttacacgtcgtatagatagacattagatagagatagatacgtatgcacttgcatatactatacatacgtatgaaagttaaagaaacctgctttttaattaatacatacttcaaaagaacatgtttaaaaagcttacagatgaaagttaagggactctctaatggctactacacactttctggtgaaacccacaattatattttaaatttgcaacaaaaaaagacaatcatgctcttaaactctatgtttcatgttatattttagttaatatatgtagaaaaagaagtgtaagaaagtttctaacacatgaaaagatcattttaagaactgaaaaacaaattaccatgctttaaaagtcta

SEQ ID NO: 964 - DNA, 86064 bp, Arabidopsis thaliana
gatcttgctgttatattaagtattttgttgtttacctataaaaaatgaaaagaaattttcttacaggtggggaagctgaagaaaattttggaaacaggggatgaaagagcagtaatgtcaccggaaaatagctctggccacagcccaccggagactctcccgcttctcaagtaaccaccaatcatcaacggctgatttttcatcatcctgattcaaaaaaggtaaaaaaaattcatgtgtaaaaatcataaagaagctacatgttttaaaatcctcttctccccctgcatacggataaatttatagaccaaaaatataatgttttccctcaaataagatatcgacctttgtgttaccttggaagacaggatcagaagtttcgaatgttttgtgtgttcttatctgaaaaaaagggaaggtgatgagtttataaaagttttgctttcttcagcgtgaagaaccttgaggccaaaattagtaattttgttatttaatcgcgctacttgtgttactttaccttcgtggcaaagttactttgtaccttagtaatgaattttgctgtttaatttgaacataaaaatcggattgagatcacattaactctgtttaaaataaaaacaaaagtaactctaataaatgtctgatccaaaaaaaattgtaggcggaaagcctgcaaataactatattaggtgtcatggtgtaattgcacagagtccagattgagaaatagtttgcggcccatttagagatttccggccccatcgtaacactggttgtctcctcggaactctctaaggctaatatgcataaatttaggatataaaagattatggaaaatgtattacccgaaagaaaaaaaacaaagattctggaattatgttggcaactatcgtataaataaaatattcaaattcttttcctttttttaaaaaagtgcctcagtataaaaaaattcaaattctaccttgataatagatataaattcgagtaaaatggtttcgtattttatgcttactaaatatgtcgattattccaatcttatttatcagtttgttcagtgaaaagaagaaattcattaaaatcttcttggaggagaaagcttttcttacttagtagttagtacaaatgacaaatatgattcattaatttagatctttacatcttttatttaaagggaaaaaaaatcagatcttcataattactgcatataaaaaaataattgtaataatcgtcaataaatcttaacaattagtataaaactaacataattagattaaatcatcaatactaaatcttacttatataatttaatttaaatttaaatggctaacttttgtgtgcttcctctaactttattgattgatggatttgtaacgtaaaaacttaacgatccaacaaaagaacacaaaatttaataatctctaattaatgtttacacaaatcataagatgtttaaaaaaaaaaaaaaagaagaagatgagtagaaacagaggcacgtgaagctctgtttaatagcaagtttttattattttttagctctttactatttttgagtctcttttgtcaatgttttaaacataaactcttgtaaatattgtatagcatgataaatcagttaaacatttcatccaaaataataataattgtatggtgttgttaaaaacttccgaaggagctggcgccaaaaactgatcttttcgaacggactagtatacaagaaatcattaacttcctcttctggtaattaattaagtaatcgtatttaattaatcaataaaatgaaattgtcatttttactcatgtcaataatactcaatagtcgtgaaaaaatcaaaccctagattcaagaattaaattaaacaaatgtccttctccgcacgatttcgaaggtattaacaccctaaattaatgtttccactttgttttttttttttgtttttaattttctgattagtaaattttgatgaatgagttccaataaagatagcgactcagagaacagcctccaaagcgagaagaagatcaagaaggttctctctctcttcctccttcaatttttttaattttgattctcttcgaatatgtcacgacgtgaaacccattaattaaactgaattaatttagattttttcatttggtgttttgtgggacattttctgtttttagtcaattcttcctaatattttcggatcaagacgatgtggtaaagaagaagaagaataagaagaagatgctacaaataatatgaacaatagaggaaataatgatgacctagaccaccactatggagttttcaatggtaatttcttcttaaacgatttacgtacgtcacaagaaaatcaaaacaaaatcattcgatttgattttgaatcatgtttttttgttatagattttgagcgacgaatgacgtctcgaaagaaatcggttcttgacaacacttctccaatgatttggaagactgtttctggtaaattgatcattttgtgatgattttttctatgtggggttgagaataatttgattttttgggtaacctacaaagaaaatttgacattattcacatgattacgaaagcgatataaatcgtactacattgtcaaagatttgtgtatttttttctttattttgatattgacttgtctcttcgttaaggtctttaatcaaatctagggttttcttgatcccaagtttcattgctaagcaatgtaaagtattgattttgattttgtggtaaatttgttagagagaaagtcaagtcctggaattgaaggcttgaatctatcgagttttgataggcctatggcaccaactacagagattcgtgaactcaggtttgaattatgatcaatctctctgtttttgttttcagattcaaatactctgtttttttttcaatctcagggtgtttctagctacgtggaacgtaggaggaagaacaccaaacaatgatcttaacctcgaagacttcttactcgttgaaggcacagcagatttatatatctgtggctttcaagagattgttcctctaagtgcaggaaacgtattagtagttgaggataacgagccagcagctaagtggttagctctaataagtcaagctttaaacaaaccgaaacaggaatctgtttattcgaatgcagcttactctgcttcaagaacaactacttgtagtagtagtagttgtggtagtgaagaatcaagagcaccaagtagtctaagtttctttcaaagaccgaatcttaaggtcttgagcagaaattatagagtcgattcaagtcttttaaagacttgtaattgtccggttatcgatacttcggttggttgggaagcgaggagatcgaaaaggtttagtgatcctagtacagatagtagtaacaatgtggagcctgagaactttagggttcatgagaatttcttgtttgatgatgttcctgcgactaccaagatgccaggacaaatgagttatcgattgattgcgagtaaacaaatggttggtttgtttttgtctgtttgggctagaagagagttgattccacatatatctcatcttagacttgattctgttgggagaggaatcatgggtcgcttagggaacaaggtaaaacatataccctaataaatcaagattctgacacaagcgaaaagagaatctgaacctcttgtgtttttattgacagggatgcattgctataagcatgtcattgcaccaaacgagcttttgctttgtgtgtagccatttggcttctggtgagaaagaaggtgatgagctgagaagaaacgcagacgtagctgagattctgaaacatactcaattccctaaactcaccaagaaccctaattgtcacgcacccgaaagaatcattgatcatgagtatgtttccttgaagtcataatcattttcttattatactagcatatagaaactgctaaaagactctgttttggaatttgcagccgagtgctttggctaggagatttgaattacagagttgcattaacctatgaagagacgagagtattactagaagacaatgattgggacactcttcttgagagagaccaggttttgtaaatttttaaatgtcttttctattttcaattatttcctccgttttactaacttgtctgatctctactgattcagctaaacatggaaagaggagcaggaagagtcttttcaggatttcaagaaggtcaaatcttctttgctccaacctataagtactctcagaactcagatgcttacgccggagaaatgaccaagtccaagaaaaaacgccgtactccggcttggtaataaatctaaaacactaaaccacattttttggtgtgttttgattcttaaaaagctctgtttttttttacgtagtgtgattgtttggatttggaatgtttgcaggtgtgataggattctatggaaaggagaaggaatagaacagctttcatatattcgcggcgaatcgcggttttcagatcatagaccagtttgcgcgatctttgcagtagaagttgatgtgaagagtctaaacaaaggtagattcaggaaaggttattcttgtgcggctgtaagattggttgaagatgtggctattccacaaaggcatagtttttatgactaagattgttacaaattctttttgaaaaaaatttgattaaagaaaatttatttcttgattgtatagctttggatcatcaacaaacaacaacaacaacaacaacaaaattctctgttattctcttaactctgtttttaatacattgtaactagggaatatatattccaaagttgagattttttcaatcttgagacatataaatatctttgtcttcacaacccatgtcccataacgagatgtcatcctcgttcatggtttgattggagtcagaatgatctggtaattggttcaaatccactgtgcttgtttgatcttcaaatccttgatcagaaaaattcaagtcatgtaacctctcgaaccagagataatctagccagtttccatcttgattatgataatctcttgtgtcctctgctttcgagctggcgctgtaatcatcgtcactcgtagtaatcgaccgaacaaacccatccgagccgccaccactactctggtttaccagttctggagtcccgtaaagacactcaatctcgtgaccggttctcaagttcttgtccacgaatcctaaactcacatcactcgaaggacaactcgagttttggcaagtgtatacattagataacatcgcctctttttccacgaactcaccttttctcttgttacctaatggttcttgatcaacaagaaaacaagaatttggagaccattcttgatcagccttttttcctttcctaggttcttgatcttgcgctacaaggaaacaatcgttcgaggaaaattcctgatcaacccttttgtctttcctcattgatcccaacggttcttgatcttgccctacaataaaacaagtgtttagagacggttcttgatcaaaacatgtgaatcttgcttgttcttgatctcgatcctcgtcttcgtcatctgagatcttgaggcgattgagacgagcttcttcttggttcaacacacgagaccaagtatcagtctctttcgccatcatcttatcttgcaaacactttgactgtctcgcgagccgtctcactctctccaaattcggcgacatgtgtttaatcacagccgctaaaacgctcactttccaagcttttcttagatcgtgcggtttgcgatatggaggtggaccgtgttcaaacgccgcagctccttgctctccccaccataactctgtcccgttcggccaccacggcggagccaaacctttttccaacggaaaccgtcgttgtggcggcacgcaatgttgcatcaaagctgataacaatgaccctaacgtcgtgtcttgtagctcgtgaagcatgtggatatacgaattcggatctaaagattcgtttgatgagattaactgagcagccgctaatgtcaagtaatcagaaacagcgtttggagcggtttggtcgaattgaacgttttctttccaccaacgtcttaaactgtctgaagaaccggttaccggtttacctttttccggtacgattccgtaaacgaatccttgagctttgcaaacttccattatcttcatcatgtacttcaacaccgaatcttgagatcgagccattttcttgcgccgtgaagcttcagttcggcgcacgataacggaggatgatgaagaggatgatgctgacgtggaagatgacggcgaagagataacggagttaagattatctcttttttgctgtttaagcttacacatgaggtttcgatctttccacatgcgtttcttgagatcgtcgtagctgatttcttcaccaaaacgttcaaattcgtccacgtcttcttcgaggtcatcttcatcgtagtcctgtattggactaagtggttctaaatcttggacctccaccattttttttttttggagtgtataatagttatgtatatatgttttgtaaaagcaaatgatcccttgcgattgcttgatcagtttatgttatatacgtgaattattgactttattggcggttaagtgtcttttttttttttttttttttttttggcggttaagttacatgtatatatggatcgtgatctttgtgttgtcatatatcgtagtttttttaaaatagttatattatatgaaaagagccaggaggcaggaggaggtgtgcatgttgggagagggtacgtgtcgagttctgctggtcttgtctgaacttaaaattgcatgtcctaagaaagaaagcaaaatgaaataaagtattgttttcggcttaaataatatatgtcatgtggtcaagagtttccttcgggaattaacaattagaacctattattgcgctagtggtaaaactttttacatcattaggaatgtcatccgacaacttgatattttaaaatgatgtcaggttgaaatttttgatgttaaaggatggtttaattggtgacagttctagggttttggatgtatgtcaaggatttgtgggattatatgacctctgcaagttatatactctacgtccagtcgtccaccacgttttacccacgccatttatattaaaaagtcggtgtaaacatctatttctctggtgataatcagtgatgtgcttatataaattcatatcttatttgcaactttcaataattacagagtgattaatttgttaccattatctttgaacgcaaaattgtaaaaattacaagtgatataaaattagtctagatgatttctgtctattagctggttatatcgtcgtgccagttcaaaaccagcatgagacaacttttctttgaaattttgattgttagttttgcccattttaaattatgtaataaactcatgaatatagctttcacctttatgtatatatctactctaattacctcatttctttgtagcaaacttgataaaaaaaagttctcaaatagtttgatcaaaaaatgacatttctgacatttgtctaatataagcacatcggtgccgaattcgcattgttcataagagaattttttaccaataacttataaaaaaaattggtttacgaaaaaaatgacatttttattactctgtttttttttattctcctgtgaaaacaaacaacaactaaaaacacatacaaaggactgcagattcttttgtaccccctgtaaattgtttttcatcttttttttgcttcgaattaaaagatcattgtgatgatatatgttttgttcttgtgtttttagaatccaacaacttgagtatactgggaataagcatcggactgcatagcaattggtgctcgagtaacatgatcagggagctcgaacgcatccactagttccttggccacattccttacttgaaaactcaaatactctgtcagtttatgaatcgcctgcaaacaaaaacccgatttttgttttgttttaaaccaatttaatcgagaagtaagtcactgatataatctgtgggttacgattatacaagaaaacaaaccttagctttgttaggcgccacataatccacgttacggtacgttcctatatctttccagattcggtccaatgcgtaaagatcacatgctagtttcagagcagcttttgcacttgggtccgggcagctgaagaaagtaacggtttgatatcagagattattataaacttgatttggtgaagtttttatggaaagattttggtgtgattcttactttttaacagcttcgatgaacttggcaagaatgactgtttcaatgtgagattctgcaagcgttaaaagatgattcaagcatctgttccatgccccgaaaccaccaagagtctttgaatgcttctgcaatctcgctgccacattttgtagcaatcgcgatgttcgatactgaggagacaaatgtaaagaatacaattgtaatgaatgaaggcaatgagagtctcagagagatattatatacagcaaacactaactcacccggaaagcatctagttggaatttaggatctcttagatgatcttcaccttcccaacgcgctgtaacgggatttggctgagacaaataagtgttcattgattctctcaagtagctccatgtaactgtcaatgtcccgccttggaacttttctttataacgcttcaataaatcagcagccacctgaaagcaaaagaaaaactttgagcatgattattctcaagagaagtgaaagtttcttaaaggagtgaaaggaggacctgttgcagaagtacagtgttgtctccttcaaatgtttggaaaatgtcatgatcatttctcaagcttccaaatcggttaacagctgcgtaaccatgacctccacaggcttctctgcagaccgagagcgccttggcggtgtaagacgtcacataagatttgagcccagcagagagtgcatggacatcagcaaccaattgctcatcgtgagtcttcttcatctctgaatatttctccacaaggtatacagttgcaaaatggtatgcataggtggaggctaacatcggcatgagcttgtgttgttgagactggtaatcgagaatactgacctcaggttgctttggaggcccgaattgttgtcttagaagagaataacgaatggcaatcgttgcagagattttaaggacgccaacagatgcataggcaaggccaactcgaccacctacaagctcaccgagtgttgcaccaaatcttttattgattgttggcaaactacttgtatacgtcccatctcgggacacatctccaaaacgattgagaagattatcacggggtattctcacagaacggaatctcaacgcaccattatccactccattaagtcccactttatgtccacaatcttggatttcaacaccagggagtgtctggtgtgttttcatatcccttatcggaacaatgaaggcgtgaacacccatatccgagactcctttggaatcatgagttggaagtataagcctggcaaaaacagtggcaaacttcccatgaactgcagcatttccaatccaccatttgatagctccatcattaggtgtatcgatcacaaattcgtctttaagtggatcgaatgtcgccgtggtctgaagaccttgcacatttgaccctagaagaaacatagacagacacttaatactgggcatgacactgagacagactactagatgctgaggggacattagacatcactcaccatggtgtaattcagtcatggcaaagcaaccggtgtaatcaagattgtcaatgccatcaaaatacttgtctctatgcttcttagtccctaaattgatcacagagcctccccagagactgcaaatatatacgtatcaacaaatcaaatccagagactagagtatgaatcctaacatcaatactaacaaaacaagatcaaaccttttccatcaagaacaaccacaaaacaaaaatatttcaatttagactactactaacctgtattgaacgcccatcttaatcccaagggacatatcaacacttccaacagcttccatgattgcgaaatacttctcaggatcatcagcaacatacctaaacggccttaccccagcttctctaacaagccctataagctgattcatacacaattcccgatgatcatccttggagatctcgatcggcgtctgcaaatcgggtcgggaattgaaaaagtcgaaaattttctcttgtatatctatatgttttcctctcatatacagcgacaaagcttcgccgttgacatccagcttcttcgacctcgccgaacacgtctccgtctgcaccaacggtaacgacggcgacggcgtcaaggagggagataggtgtaaagacaatcgttggatccgcctcgccgcaattagcccatcagattcctcctccgtcatcggattcttctctcgccgcgattccatttcaatgagttgaaaattttctcttcgctaacgaatttatgaaaattataaaggtgaatgcttttacggcaaggaagatgacgtggacacgtcgttgtcaatgacgtgtagatatataagtggataacaatttggctctatctggtgtgcttttcgaggtgatctctttcctttttttgtcagataagatttttgaccagacataagccagattgatcttttccatcttgttacccaactttcctaattttaggtaatgtgggcttttgggctttatgtaactgtgggtttttaatttgtggcccattaagtaaatctaagagtcctcgcgcgtgactcccgagtccgacgaattcgaaacgcgggtcaaaagaaaatctaagatcggagaaatcaggatttgttcccgcctcaaccacttctaaaataaaccctaattctctgttgagtatatttttgcttccgattaaaccaagatttctcatttcttgcttccgattatatcaagatttctcggccaacgacggatgccattaatccattggtaagtaacccaaactcaatttgattttgtctctttcgttaaatttagggttcttcgtttctaatgtacgaatcgcttcattttctagcttctttgtcagttaattgaagtgggttttgttcaatttcatatcttggatattaaaaattgtacctctaaattcttagggtttgttggtgagttttgatttcttgtttggaaatttaaaacgtttttggtttttgttttgttttggtgatatttgaagatgactggagattggtgcagcctagtagtgtccaaggaaacacgtgtcgcattgtgtgatatgactaaccttccaagcaagagagggctttcagcgattttgggagatttgctacttaaatctggagatgattctggtaagagccttgctgctcgtgaaggctccggtgttaagttttccaagaggttgtgtttagttgttgacgacttggtcaaagagagtactaggactagtgatactaatgaagcttcttcttctgaggataagattagttatgattgtgattctgagaatttagatgtcaaagaatctcagggtgaaaccaatgccggagatattgatgtggaaccttctaaagatgatactgtgaaagagacgtgtgagaaagactcgaacatgaatgtatgtggcagtcaaaccgatgctgttactagtgaagacttagctatgactctgtttagtagcaacaataatgaaagtgagggtttgttagtgcctaatcctcaggctatcaaatcgtttaatatgaatagatgttcgaatgttgacggtatgggaattgttaatcaccatatggaagctgacggcgagcttaaatcttgctcttgttcattttgcctgacaggtttggctgattctttagtgtgttggttttttgttattgctgtctcgttgattctcaataacatgatctgacttagttttgtggatgtaatgaatttcttcagctgcatatatctggtcagatcttcactaccaggatatcaaaggtcgattatctggtaagtgttcttattacactgcaaaacacagagtcgaataacaatggtaaatttcatgtatttgtgttgaatgcagtgttgaagaagagccagaaagaagctagtggcttgatccaaaggaacgatagaggaacgccaacggatatttatggatctgaaaactccaacaactccacaaatacagataatcccatggaacaatggacatctctatttcgtaacatggaaggtatcttggctcgtgaaagcaaccacctcgtaagttcctcagaccttatattcgactgtgttttgttttggtccgtaaaaattgggttctgtgttttgatgtccattgctattgataacctgtgcagcacaatagctttgtagccatgaaagagttgagagaaaattgcaagattgatctggagagagcgacgaaaacatctcaacaaaacaacacttaggttctgattgtcggtttgaatgttgtgagagtttgtaaccttcttccttatatttgaagcaactcatgtatgtattataacatctattgacatcatttgatgttgcatctatgtttagtgttagacttggttcttctagcaaattgtttcagatccttgagactagttattatattgatctctgtgttagcttgtttacatttggtttctacggaaattaaaaggatttaaaaaaaaactacacgcgtgtactaaataaaaacacgcgcaccataagcgcgtttagcgcgtgagacaaaaatgcgtggactatataaccctccgatttggtttttttttgcataaatgaaaaaataggaggaccagcagcgcgtgggtcgagattttcatcagtcttcttttgttagaccaaaagttccgtttatttgtcgcttgcaaacaatttttgggctaagaaagatgattagtatttaattatatatatataatcgttaataatcaacgtttcatttaaactatagttgggaattctaagtaaaataagatgtagcaaaaattagagggtccatggaaatatggaatcatgataaatattgattagctacctaatcatgtatattaggctagcaatgaactagtaattaagaatagggatattgatttgtttctgctttgacatgcaaaagtcaactattttaatagtcctatagtcaacgagttagcggtttcatctcaataattctttttcgttctttggttttaaaaaagaaaatatttatctagaattcacaaatgcaacaacactattacaatctatatatacattttttttgaaataaatcttatagttgggacttatttacaatggttgccactggattaatatttgtttttgataattagaaaaaaaatcttcgaattaaatatttgatatttaacaatcttcctaaaatctctctacattaactacacgattggttactaaaataaaattttcaaaatatttaatatcatttaattactacaaaattatcattattgatattgtttttctgcatgactattacaattcaattataatcatcaaaccgcagagatatttgatagcatttaattattacaaaattacaaaatatttagacaatgattcataaacatatgataaataagatcaacattaataaaataaatgagttttttttacgggacgggttggcgggacgggtttggcaggacgttacttaataacaattttaaactataaaataaaaatattttatagaaagttacatagatagttacaaactgcaaatttttatatatattaactttaaaatataatttgtcaggtgaaaatctagtaactatatatatttaggtcgattttatggtttttaaaaaaaaatctcacaccattaaattgagtgtgtgtatgtactttagtcttcaatttgtgaaaaatccatgtattcttacaatttaaaacgtttgcaataatattatcttaaatctttatccaccagttccaaagggtttttcatacagattgataagtggtgtatatttacatgtccctatatgttccaaaagcttgaagctttttgatttgccgtttggattacacactcgtgatggaaattcaatttcttgaatcaattcctctgggtgagaatctgatctaataataatggttcgtaaaaaagttacaaaaagtatgattgtaatttgttactttatttgttgttgttgtacaatgctactaatacaaaatgaaggttggtataaaaatatctatgaatataagtgaaaaaagtagagaagattcacgagaagcaacctaagtccctgcttttcctgaatcaaacaaaagctgataaaaaaatccaaaaataatgtcttatattatagacattgaccattttttcttatacaatatatggtttgacattgagcatttgagcctcatttcttttatactatgttatctcataattaaaaatccaatgtatctttcatatatataaatgtctaattttcgaactaataaatcatctatgtcggtttctaaataacaaaaaaagaccaaaaatctgaagaaattgttagtgctaaaatgagagtgaaggtgccttgcgtaatttacaagtcaaatccacgtaggacacaacgtgtgaacacgtctatgtgggtcctttgtgttttcacactaaaagctgattggttccgagctttcaatcctttcttttgtttcttttttcatgtatttattctactatacccattctttcgtttaaaagaaaaaaaaaaacaatatcacaatgttgataattcccaaaattcaaatacatatcatttcttgttttttttcttaaacttggatgagtcgtatgtccattaaactttatgctatagggaaatagagttgtactagtttgctactttgcttcattttcactgaatatgcaagaaacttaacgcatagtaaaatttcgaaatttgtcctaggtaatttgatcaaacgaattaagtggacataacaattgtcaacgcgtttatttcatactaataattttattaaatgcaaatgaatttgattttttgaagtataaaaaaataagatttacgatatacacatgacgtcatcagcgtcattgacttcaccacagaaaaacctcatggccgagaaatgaagacatatataagccaaagtttatggcgaaactatcaaacccaagatcgtgactatttcaaatcttaacataagatataaatcttcgtttctacttttttttcttccataatatagtcaattcgttttcttaattagggcttcttctctttgtttctccaatctttattagtttatttatttattttggttattgtatacaaatggcaatggctttaaacatgaatgcttacgtagacgagttcatggaagctcttgaaccattcatgaaggtaacttcatcttcttctacttcgaattcatcaaatccaaaaccattaactcctaatttcatccctaataatgaccaagtcttaccggtatctaaccaaaccggtccgattgggctaaaccagctcactccaacacaaatcctccaaattcagacagagttacatctccggcaaaaccaatctcgtcgtcgcgctggtagtcatcttctcaccgctaaaccaacctcaatgaagaaaatcgacgtagcaactaaaccggttaaactataccgaggcgtaagacagaggcaatggggtaaatgggtagctgagattcggctacctaaaaaccgaacccggttatggctcggtacgttcgaaacggctcaagaagctgcattagcttacgatcaagcagctcataagatcagaggagacaacgctcgtctcaatttcccagacattgttcgtcaaggacactataaacagatattgtctccgtctatcaacgcaaagatcgaatccatctgcaatagttctgatcttccactgcctcagatcgagaaacagaacaaaacagaggaggtgctctctggtttttccaaaccggagaaagaaccggaatttggggagatatacggatgcggatactcgggctcatctcctgagtcggatataacgttgttggatttctcaagcgactgtgtgaaagaagatgagagtttcttgatgggtttgcacaagtatccttctttggagattgattgggacgctatagagaaactcttctgaatccattttatctttttgattcatttgtctctaaattgtagaattttattttcagagctttgtaagggaagttcttgaatgagagttgcagaggactagtggaacctaactctgttttcttttgtaagtattgtttataatgggccgttgaatgggccttattgatttaaacagcccaagtttttatttaagacgaatccaaaaactaatggacttcttttttgtagtggacttaaaactatttaagaaaccatttaccactttcataattactgatttatttgcttggttgttccttgttcttgctttttatgtcaaaaacaggaattagaagtccatattaatttacatgacatataagaatccagatattcagatattctagttatttaaaacggtgagaatgacttaatgaccaacaaaaaaatgattaaaaatcataatttgtcaatttaaagatgaatttctgagccatctaaaggttagttgagaatgtcagagaaagggtaaaaacagtgaaacgtgtccattgaatgtggatccccattgttaaggcattctccttcacatgcatcaccatgtgcacatttattcatatacataggggttcatgatccttttgtaaaacatttattcattatgaatgcttgatttcgaagcgtggaccgacacatttccaacgctgacacgtgttaaggatctacgagaggtccaacatgaatatatgcatggtgagagacaaatgacatggacatgaagtggaacacgtacttaacatgtaggttctcatgcggtgcaagaaatagacgaaaatgtgtcattccttgttactttttgttaagagaaattgtactttaattcaaacaagaaaaaggatttggaagttgaaaaatttgtcatgtctcggtcattgttagcacaagtactctatatctcttcatgtcataaaaaaagttacggacctaccaaggatatgtgtctaagtcccactagttgacaatctacatcatatattaaactcgcattgaattgttctgttatttcttccatctaattttgttttgcaaaatgtattgttcaatattttgggtgcagaattttacagaagaatccaatggtcccattatgaatggaacctatttagagagaaaaatggcacagtatctcatttgaaagattattcttttgtgaaagagagggacaataagatacatagatatttagtttgaaacaaaaagcattagaaattttgaagacaaatacagtaactaaaatattatcatttcataaaatgatacacatttgcattatgattttacaaaaggtatcaactacatatacccctttcccttacaatagcctaacttgaaaagtaagaaattgcctacaagcaataaagatagaaggctataataatatatccccaaatcgataaaagttccccatttttcttgttcatataatctcttttactaaaagaaaagatttgtgatgaacaagatcaatctataagaggatcttgtacaatgttccattataggttagggatgtacatattatatctatatatgcacctatagttatgaatattctcgttttattaaaaagactactaaatgtacttcattgccccttgcacgtttattgctgcatctgtttccactccaccaaccgtcccaagaaattcatcacctgtatatgttaccagaatatcattataattgcgtaactaatacgtacataaacatatacggtttatatatgcgtaaattgatatatctatttgtataagtacttgcctcaggtgggtcttgtaaagaatacgacgcactggtgtctttggggaacttggagacaagaataccaaagccttgtcctctccctcgtagtagctaatttatattaaaacacaattagtaataccaaattcaaaatctatattgggagtaaaattttgttaaacctgatgttttggctatttttacacaaattcaaaatattaaaagcattttaagattcacaattttcatttgtaatgtataccttaaatgcatcttcatcggttttatcatcaccaatgtaaattggaaatacatcgttacagttttcaaatcctgcaagagccatagttctaaatttagaattgttcatatttaacttttaaaaaggcacatttacgagctaatattattgttgatgaaagagtttaaataagcaaaaataaaattcaacaaacgaccaaagagagtctcaccgagtgactctaacaaaaactcaagagccttgcctttgttccatttaattataggtcggatttcaaaaacctgtttataagtacaaaattaattaaattagaaatttaaaagcaaaaaacaacactgaaataagacattcaccaacaagaagatgtcacgtcatacctttcgaccttgagacagtttcaacgtcggatagttctttaccaccgaccgaacttttgaagccagctcgctccatttctgaatattttttaaagattattgttcactctattagttttgctatcaataaacatacattaatcggataagtatttgttttaaatactatattattgttgttattattaacaattaccttctcgtcaacacaacggaagtgcacagaaagacagaacttgttgttctccactttggctcctggtgtagatttggttttctccactaattgtttataaacctgaaaataaaacgaaaaaattctaaaatcagatacatacagagatgataaaaagaataaaataaaaacacaaatttatttacctcatcgatcatgggaagaaagtcgccggctggttggtaaagaacggatggtttatcctaaaaaccaaaagtaacattttgttaagagaaaatacaaaactaaagaaaatcaggattgaaattctctaaccatgtgaattcaagagtctaccttattgtatcttgagaaacctttagttgggcctttaatatccatcccatggcttccagcataatacagttctgctagcttcacaaagctataaacctacaaaaatattcattaacagaagataattatttgaaaatggttcattatcatgttttgttaagagaaatgagaaataaaattgtctaacaaaatgtaccttgtcgatgcatctaccagtaactatggaagttggaaaacacttagccatttttttcactgttcttctcatctgtgaaacataaaacataaattgatatatacaaaaataagagatttgcaaatcaaaacaaaaaacagaaaattatggaaatcgatcttgattgattataagaaccttgctagtcatgaaagctctgtctggatcatccacgatcggagaaagagtaccgtcataatcaagaaacatgacgatttgttttcctcttgcttcttcgatgattcgttcgaacatgttaagtgctgatggatgtcgtttctgatcagaattagaagacagataaagttaagcattactttaagaattagaaacagactttatgtgaggaaaaaagtgtgtaatggagcttacgatccaagaattgtgttcttcttcggaagagaaagaggaaagtgatttgagatgggtaggagaagaagctctcatggagtcaacccaagagttaagtctttgactttgatcagctccattgatttcaaggtttttgaggagttttttcttggaaactgagatgtaaccaggagcagtcggtggtttttgagcggtaggagtaaagacagaggagttagagactgtagagaccgttatgatcccggtcttggcgtctgatacgacgacgttttggctcaccattttatataaaactataaaaacaggggatgagcagaacagaggaggaggtaattaaagagaatgagaccaaacgagaaactaggaaggaggaggaagaagtgaagttgctatgttttttgaagtgttcgaagagacgagatagtttgggagaaatgcgaagaccaagaggtggcttttatagacgcacaatctaaaactaaagtgctaaaccatgagagagggagagagagtcttgttacaagttacaagtgggagccatgggaccgaggttcttatgtgggggacctacaagccgggcccagcttgaggtccggaggaggagccgaggaagtggtgtgactcttctctttgtgtaaatggtccctttctaaggccacgtgtccccgagccaaaggaaaacaccttctctccgtgtcttattcgtctacgtcgtattcgtatatatgtttttaataacctaacgtcgtcgaacatattatataactaagttatttttgttatattcactaccaattaatgtccacttcaacgttatatcaaccgtttttgtttcgtttggggaaattaattgtatagtgatgactactattattatgtacagttgtataatgataaatttgtagtaataccaaaaataaaataaaaagattaaaaccaaaagctttcatgattgtataggaacatggataggaacacgtactctaaattattcaaacttttgatactgtttcgtattaaaaaaagactacttttatttagtttttatgataaattattgatattcgaatacttaatctaaatataaggtgccttgacaataatcacaccatctaggcgacttcaccgttttcatataaacaatcaaagtgatcgtatgaacatgaccccttgcgatgcatgcagccacacgtacaatagaaaaaatgacattacatttaattaaaataaatcatcatattgtaataaaaccatcacgctctcgaactttcttatagacctaacttttgatcatgaattgacataaattattaaaagaaaatttcagaaagagaaaaatgaattcagattaataaatacgcataagttttaccaaaaattataaaacggattattctaattacttaaaattttgaacacaaaaacaaattgaagtatatggaaacaatcgttcaatagttggcactaaaccaaagttcaaaaactaatatatataatatattcgaataacctaaatgtaccattatatttattgatgtgattagatacaaatcagtgatatacgttctttctttaaaagcttgaattaggaagactcgtatccatacaaatatgcgagagatgatcacccacgttcctaaaataggttgacccttcgagaaagttttagtcgattccggtttcatcgttggtatcagaacaattgtaagttgtaacgcttcttttcttttgcacgtggattttggtttttggaccgatttatgttcattgaatttatctcgcgtccccttttgggtttggtgcttatcaaattatgttgtcttttagtgataagttttgcgtgtttttatagggtatcacattgtaacaaaatggtgtcgttctagtgtaatatacatgtgtcattgcatgcatgtgtgtaaatatatatatgggttgcattcacatgtacaatggtcgaggtattagatgttataaagaagctttatataatttagtaattatttttacatataattaatacaagtgtaactcgaagacgccccttgtctttcaaaaccaaagcaccctttttgtgctaacctcaaaaccagcagcggctgcaaatgcatattaatcatttaattaatactgatatatgtttgcaaagttttatattatctccattcatattcaaattaatttgacagtgtgacttttatgtcatcccatcttaatgatgacaaacaaaaaaggaccatatattcatatttttgttttttctgtcaacacggactatatatagatatgattttctgcaaacgaaaatagtaagcttgtactagtgctacttttgttaatttgtatgtgtattaatttgaaagcgaaaaaataatagcattcttctgaaaaaaatctataatatatctgttgtttgttaaacttgtggactctgtattactaatatgcatatgtaaacaaatcgaacctgtggatcgcgtggcgtgggaatatgctttttcttactacatccctattattgggtataaaatgaaattgtttcagtcaaatgatattgattctatatatatacattttttgatctatatacatatatatactgttttccatttcaagttttcaaccaaatttaccgtcttcgtattatggatgagtcgtcgtctgacattgaaatgaacaaattcgaatgtttttctattagctctagaaacgctcggagatatatgtatatatatatatatatatataaaactatagtaaaatttacttaggggaggaccggaggagaggtgtaggtcgagaattcaatttcctaccaagaatctgtgttattcaaggaaaattcagtcttctgtttgatcacgtttatggttaaaaatacctagtcaatggcacgaagccaatagactacattatttgtttgactacaatgccgaataagattcttggaggtgggaacggaacgtttgactttctgaccaactaagaacatttaagatactagcttctaaaattcatcaaaaccaattttttcagttgagtgatggtctttataacctttttatcttccggattaagaaaaaaaacgaatttttagtttacttgttaggtagccttatttatcaaatttgctttgagggtatttctaatactcttttgtaaatgcttaccaaactcggattcgaaattcaacatagccaacaaacttaaacataaaagctcattgttcaatcaaattaataagctaatcatatcagaactcttttttcaacaagctatattaatattagattaccaaaatcagaataaaccaactctttttatatgaaataaagattccgcaatatttgcttatacgatgttgaccaaaagaatgtacatatgaacaagaacaatcaaaccatcgggaaaagaaaaaaatatataaataaatattcttgatttcttaggatcttattcgttttgccatgtgcttccaaattttcgattcgatgtatgttggaaaaattactcgaacctcatgtgaacgcgatcaatttaggaagtatttattaaaacatcaattagactgatggagtgatggtttttccttccagtttctgttaatagttttaacatcacataaaaaaaaattattttctctttacattcatagaagaagctttctttattttcttacaaggtttgaaatagttcaaaatctaatgtgaaaaagagggacattagtcattattcgaattacttgccatataagattttttaaaaataaaatcgaaaggatatgagatagtcggacatccaattgacgatgacgtgagcagatatgtagattcagattctttcaatcttttgtttcagattaattatggaagtacactttacaaatatataataagaaaattttgaataaagctgcaaataaaactaatttttaacataaggatctgactggtgcccaatttttttaagtcataaactggaaagcaaacccgtgtttttcggctgaatcaacgcctttgaacatcttctcatattgttgttagtttcaataagctttaattgtttttcattcagtatctgatttattttggagaggcgatgattcaacatataactaatgtctcaaaaagttagattttgaattagttagctacatgtgcatgcacatccacgaagtttacgaaacttctcttgatgatccttcacttaacagttcacctccttataaatgggtttagtacgtagactagtcttcaaagttttttttttttcaattttttcttttttcaaaagtttatattcgcttatttcaattattattactatgcgtacgttgttgtggaagtggaagtcaatagaagtgccaggctaaatagtcggccacggaccggaccgagtccaaaaagactcaaaaaggttcataacgtgtcaggagcttgtcgctcgctgcccaaaccatatgactcgtctgaatctgtccttctttttcaaccgacaccacacgtgtggtctacttcgttacgtgtctctattgaaacacaaagccctcctaatggtcggcagattcttcacgcagaagataaaattacatactccaattaagtaaaaaataagacatgcattcatcgtacgtgcacgcaccaaatccacatgtaggtctccccgatttatcccatcaataggctaggtctttcttgataggttttctgagttaaaataaaaacaaaaaaaaaacaaattttcgatttatcaaaagcaattttcttactggtgttcttttattgtagagtcaagcttcaattgctgtcatcagttcattaccaaaagagcgtaaatgattatggtacatgttgatgcgataagtggccaaaaaatatattttgtaatgtatagtaaaagaggatatgttgtgacgaaactcatggtcgtccaatggttcaaaatttcgttttaaaattgaaatatcaaaatttggtaatttcttatatattgtaaattaaatcaagattgcaaccgtcaatcttaaaaaaaaaacattttacaacagaaaaatagctggaactaatattacatttcatgatttttcgagtaccaaacatatatacatgttgaatgaaaagcttaaaattagtggcaataatagaaggtcaatatcagttggagacattcaacgtgtataaattgacatgagggttttggaatattagccaacttattgctatttcattttctatataaataaaagagagaggaaaatattaaaagttgatgtgatttttgggggagtgaaaagaaagtagaagaaatgcgctggaaagagttgtgatgaagtgagaaatgagagtgtgattacatgtaaagaagcttattctacgtcgttggtctaagtgtgtttctcatcactttcctatcttcctttttctgtcgaagcattatggagctaacacctttcaatcttttatttccattgtaaaccataaacttggtttttgggaaactatgaaactttatataattaaaaaaatatagtgattgtgattttcttcagtttcataaaaggactaatataactagcgctatcaccttagtttgattcgaaatttgcaaattttccaaaaataatttattatgattgacaaacaagaacgcaaaacagatgacaatacacagaatatcgaatcttagcatacgtatgagtgtaaaaaaccatacatcgcaaaaaaataaaaataaacttgtcaacaaattttatttttttgtgaaacgtcaacaaatttaagaataaattaaaaaatattcttggaccagaacagttccatttcacgtagaataagacgaggaaaaaaatacgatgggatataaggaattgtattcttcatttatttatactttatatctctttgagctttatttttactttcgatgcgtatttattatatatatccaaatttattctgaatactatgataattgaactgtgtgaagttgaaaaaaaaaaaaaaaaaaagagtaaattgacaggtaaacggaaacaactgccaaagcctaacggtatcgctgccttaaaacgtactttcggtcgtggaaaatgggcccacctcatcatccccacggctttcctacgctttctgactcagttccttcttggcccacaggcccataaccatattaaattaattactttattttttatgacaaatcctaattactttaaatcaaaacagtgatggacttttataaaattagtgggatattgaacaagaagacaaattaactttaaatacctagtttaactatgattttttttcctgtgcaaatgttatttttcccttttgttaaatcatgagttatacttaacaaaaaaaattgcaagaaaatgaattgccacttattgtcggtactgataaaagagagggtaaaaaaagtatattgaaaaaggcatgattcttttgtcattatatgagttgctttttcttgcttcatatcattgctttataagttataaaccttgtgttcgagaaaaaatatttataatatcattcggtgggatttaagcaattggctatcgtattacctttagaatatgaacataatatatgaacttctacacatcaatctttaattaaccacaaccaaaaagaaaagaaaaaaatttaatccaaagagacataaaaaaccttggtaaaattttataatcattaatgtagtattagttaccacttatccctttatcgattttagatataataagtgatgataaaaaattgacaatccaacgcaatatgatcaagtcgattcatcccctcattaacaatcaaattatttatataaggcttatcctgtaaattttaagtactggcaaatgtttccacaatgttatttactatttctgttgttattgtaatttatctttttcatatccctatatcccgaaaaggaaaattgtagtatatgctttttgttatcgacttatcttgatgagtcatctctaagctccatatctttctttctttcttttttttatcaacgagctcccatatcttcaaagaaccttattacattattaatatctcagaaggaagatttaaccatagtagtttgaaaaattggggttggatataattaaggagcctagtatctttaactagtaaaagaaaataaagaatatcggtgctgttttaataattttaaaacgaatctgaagacggcgagatatcacaaataagtggaaattttgaaataagagacaatctagcattaacacgcccaaatccgcatggtttgcaaaaattctttaaaaagctagcatctaattttctctacgaaatcagaatattccaaggaaatcatgaaagtaaattaacccactaaaaatatatatgtgggatctcacacgtgcaagttatttttttggattaagggaagaacattataaaaattcaaaggtcattgcatattaagtatgcattacaagtgggtgtctttaaaacaatatcagattctgatttgatggaatcctcaacggttcacaaatcacctcttcggagattttttttttcttttttttttaaaaaacaaagaaaaggattaaagaaacgaaagcattcgaatacatttaatcaaatgtgatgtgctttgggactcttgggatctggccgtccaatttggtggatgcacagttgcacatccaacttggtttcaattggaatatgaatataaatgataatgatgccacaaacaaaattttatgctccgagtttcgaaatgaggaactcgtttggaaaaaaaaactaatggttcaagtttgacaaagaattaatatcttaagagcatattggaatttcaaatttattgcatatgctttgacacacaaaaaaaagaaaaaagaaaaaaaagagaggcatatgctacgtttataactattttcttttaaaagattaattaataatctcgtaagttcaaaacaaaactcaacttctgatctgggttatataagcccaaacccaagcccaattgaaaaattctaatcccgataacgaacatgggatgatgcagcagttgacaaaaaaaaaacatatctgttggaaaaaatcaaacaagtcattagttccaacggatataggctacagcaccggaatatccacaattccacataaactattgactattaatagctgcattattattgtaatctctcaagacaaaaaattagtatatcttaaaatcttattttattaatcttcgcctaagcgaacaagcataggactacaataaatttcaaagttttcaacattcttcgatttcataaaatttggctctactaactaaaaagagtcatttcagacaaagaggtcacgcggtagctccgcgatcctcctccgtctcctcctcctcaacaccgtcgcaatcgctctaccagtaagtcacttccttgcaaaatgcaaatacacctacaaaccgtatactacaaataaattgcgacatctttaatgataagaatgttatttaattagttggacaatgatgaagacaagtgcgtgttcacggtttacatacgaaccggtacggcatggaaagccggtacagactccgtcatgagcctccgtctttacgacagttacggtcaagacgcggttatctccgatttggtgtcatggggaggtttaatgggtccatttcatgactatttcgagaggggcaatctcgacattttcagtggtttaggttcttgcctctcaggtccggtttgtgcaatgaatttgacatccgatggctctggtgatcatcacggttggtattgtaattacgtggaagtgaccatgagtgagagccgtcggagaagttgttcacaggagaagtttgaagtggagcaatggctggctcgtgatgcttcaccgtatgagctgtaggcgattagaaatcattgctcggacttggtcaagaatcggcgagtcgttattcccatgatgtagtgggagattatttatgtgtcaaatgtcatgtttacgtgtgtgattgagaatttgtggtttttttttctcgaataatgaaaatgaaaacaactgtgttatcattgtattacactgcttcatattcgagtgatcaatgtataatattataaaagaacatggagagagttaagatcaaaacatctatggagtgttttgagaatgaaatagtgaaacatctatgaaatgttattattcttaacaaatgatatgggccttaacgggcccaactaattattttttgtaggggtatattggtcgaggtccagtgtattttaaaacccactaagccaagattttggagtagcaagctccgaatgcaaagaccggcataggtggccgtagccacttgcccaaaggtactctactactccgacgtatatatttctcgacatcggaaaattttgatattttttttcatggacaaattttggtttttgaaaatgctaaaatacagtattcccacaatctcattcctatacaaacaatttaatcattcaaaacccaaaaataaaaattaaagaattcacacgatttgtcatttttgccagcccaaaaaagaaaatcaaacaaggaatattccggctgttttcttttctcaatccatatatccctcacggttgtttactggtttttattcaccggaaaaattctcaagagtcttgtccactacgtttcatgagttgttgttgagcctctgataatcctctgataacttgctcatcctccggcgactcctttttcaatatctcgtagtcacccaccgctaattcccacttttcgatctgcatccgcaattaattaataattacaaacaagtcccaaattttctcaaaattttatatcgaccccactagtttttattgttaccttggcgttacaatcggctcttctgaggcgagccttaccatatcccggccggacggagagagccgccgtgcaatcctctatagatttatcaaattgacccaattttgaccgacaagccgcgcggttacagagcaaaacagagtttcgtggatcgtgatctaatccctcaccataagcggcgcacgcctcttggaaccgtccagatttaaacagctcgtttcctttaaaccgagcttcagtcaccgcttgtgcccgtcgtgaaatcataatcacctctcggttattcccgtccagcttcccggcgcgttggatcgcctccaccgcctcgtcgaatctgataaaatcaaattaaaccggaattttcaaattaaaaaccagttcataactctataccgagtttcaaacaataaaaccaatacagaccgaaatttcagtataactctagtttttaccatgttatataaacaagaaaaccaaaaaatgtaacatgaacccggtaaatcaaatttgagataccaggttttgggatgtgaaaccggaattatcaaattgaataccggttactgtaataaaccaagaattgtaaagaagaacagaacaaaacaaacctgccagacgctaagtgaacctgagcacggacgaccaagaaaccagcataaccgaccggtccgtagtacctagtactagcatcaatatcgaaaaccggacatctagacaaagcatcatcagcttcttgatgtctatgtgtcttcaacaaagcttctgcttgcaatgcatagacctgaggggctgcatcagctcctgaagagattgtgtttgttgtctccgtaatcaaaccattccaatctcgtaatctcttagcttctgtgcatttgttgagatgtgtctgtaccgttttcgcctttgcaatgtcttcacgatcagcttcgggacccgaatgtttgaaatgatatatcgatttctccacttctcctaacctatcgaaatttgtgagattcttaataacgttttttaagaaaaagtaataattgtgaggttttgagattacctgaggtacaagttacccaacctatgatgtgctctgtggtaatgaggctcaattctgattgcttctctgcattcaaaaaccgcgtcaaggattctccctagggcggtcaaagccgcgctcttgttgctacggtaagcagctttgtttggatcaattgcaatggctgcatcatacaatgctaaagcctctgcgaaattcccattcttgtaatcttcattccccatgatcttcaaagtttccggatccattcttgttgagattgctctacacaaagatcctgattgatcttgactctttgttgtcgtcgccgttgcagcccccattgtcgtcctcttcacgccatatccattgttattaccgtaatttacacccgcagttacaggtccagtctgattcaaattgccaagattaccatataacattatattgctagaagatgcacgaaccaatccattggttccttttgctttctgatgatccgtgatcatgctttcaagctcacccgataaaccaatggcttctcttggcactttcctctgtcctcctcctcctcgatatggatcaacactattactattgttgttataactacttcgttggtgattctcgtaagtccctaattgatggttattagggtactgatttgacgagggttttgatggaactacggatctctggttgtgattttggttgttctggatcttgttattctggattggctcagcggaaactttctgatcatcacgcggcttctttaactcggtgcccggagatttagtgaattgaatgttgcttgttgcggtcgcagccgtagatgtgcttttctggctaccgttatcgacagcggtagatttcttggaccacaagccacgtctaccaaacattacactcaataaaccacaacctgatcttctctccgccgcagccaccgccgtgttctcctccatctcaagaaccggcctgagaattgtaaaaccctatctcccccgaagaacaaatcaaaattcagagatagaataagaatcaaagaatagattatgaaaaccagagatcaatggtgatgagaagagagagagatctcatgttttaaaaagaagaatagaggagaaagatgtgattaggcttttctcggccggacggtaaagaggaacgaagattcttccgtttcgtgttttgtattggtgtcattaattttatatattgtgtcattatgatttttggtttttactacggaaatgaaaaataagcgactaatagtttaggtgaaaaaaaggaaagacgaaaaacgattggaaattatatgtttatgtaattttgttattgttattcgatgtcaaaatgagttggtggtgagtttgaaagttggtgccaatgcattactggttagttaatcacctctatttctctgttctctttgtcagctcttactttttcttgtttttggttatttgattttaatttttctaaaaattattatagttgttgcgtgctgactcggtcgtgtaagagagaagaatgaatatttagaaagaaagtgggcgatttgtccttaaattaatccgtgtttttctccaattgactctatatttagatgattttatggagagcacgtagttccctttttatgtaacaaaacgtgtttgatgatcttttctagaaagttatatcaataaaaggagtagagagagacacgtattaaaagttttaaacattgattcttattgcaatgagtatccagagagagagagagagcttttacataatatatatgaccggtccaagtcatgttgaagctagacactctctgttctcactaacggatcggagagcaaatgcttagacttcattttcaaaatggcactagctgggttaagtcctttaggacaagtggccgtacagttcttgattgctctgcatctatatactttggtttcactctcagttattgcctgtagcctctcttctctgtattcatcgcggctgcgtcaaaccaaaataaaaatgaacagtgaaaaccaagtttttgagagactggcttttaatcttcaccttttttttacctatcgctgatccaacggtacgcttgtagtaaagccgcaggtcctggaaactcctcggggttccaccaataagaaggacatgatgtggtacaacacgcgcacaatatgcattcgtatagcccgtctagtttcttcctgtcttttggtgattgccggtgttcgcgtccgtcttttggaggcttcctcgtctttaaccatggctccattgatcttttattccaaatacagcacatcacaatagttagttccacatgaatatgattcaaacactttgtgatttcacaaagttaagctatgctgcaagtattcacttaaatcaagttttatgtttcttttcctcaattttgcatgaaaccatcatatatacttgttcgacatccataatgttgaaagtgtgagaaactttatatgggattaaagaaggtagctagcttcacttacttgtattgttggtaaaaattagtgaggtcgacgactaggtctttgatgacgtacatgtgaggcaatggagtaattatggtgggctttgacgtgtttgggtttatgggtttaagacatgcgacagtgttagtaccgtcaatgttcattgaacaagatccacatatcccttctctacatgatcttctgtaactcaaactggcatcatcctctgcttttatcttctgcagcacgtccaaaacctaacggaacacatgaacatgttagtcaaccagattaagaccaatcctatggaatataatcaacaatttttagttagttaccatgggaccacaagaggaaagatcaacgaagaaagattgaagaaatggtttagagttaggcttgtcaggattccatctataaatcttgaactccttcttaacttctttgtgttggcctgttgaaaatcagcggatataatttgaaaaaactgcttctttaaagaagtagttaattcaaattttattttagctttattcataccttctttctctttcgttatgtcttgggattttagagtatctttggataagtcttgagccgctttatgtccatttaagattggaaaatctccaccaccgcttaggctactgctcaaacgcactttctccgccgctggattacagattctccgccccaacaaccgcaagacagacgacattctctgttcgcttgatcaaaagctggtgaagtgtttggaattcgtttccgtcaaaatccttggtgagaaagtatctgcaggagagagacatgtgcatggaaatgacacgtggacagcctagagcctgtagtcaatggcacgtgtgcgactacgtgttacaatgcaaatctagagttcattcattaaggcccatattaagcccatttaataaaactcccactagttttcttaatttaggctttgaggaccgggtcctgtatcgggtcgggtccaaacgtggtccctctttaactcttaaaacctgtttcttgaggaatttgacaaataggtcgttttgttgtgaatttgtttgaaaaacagaagcattatcaaatgcattggatcgtgagcttcttataaacaaacccagacaaatcttgcaacagaaaagtcaacgatccaataatctgaaagagaggtgacacgtggcatgtctctttgtctggagcaggaccacctttgaccaataacacacatccttcttcgttgaaaaatactctttttgttgaatgctctgcttgtttgaatttcatcgtacaatgtcatgaaaacttccaatgttttattgatattggtgttattccacgcttgtaattattttagttacactattcatgttatatagcagaatattttttactactttcggaatcaaatctaaagagatcggtttgcattatttttggggaatttcatcaaaatatctctttagtttttgtaaaaaaacattaattggattcagtttttctctactaccaatttggattttggtctgttttctatgtatcataaaataacttgtgcaagacaatttcagaaaacgtaagttaaaaataaattaaataatgagtcaagtctcacctgattgatttgagctatttatcataaacagtaacatactaatattaatttaatcatatgaaaaaattaattaaattttcccgaaactctttgccatttctttttatcaatactcaaaacacctttctcagctagctagctagtatacgcaactcgcataaactaaatcatatcaagaataaaaaagattattaaaatagatattgtatgatcttaatgtacttaatattctgtaaaattagatattatgatatcaagtgtgggttctcagcgagtgattggatgtcaaagaataaaaccagtgaggaaaccaacaaaacctaacggacaaaacaaatatattcttataagtggaaggaacattttttttttgattttttttttttttaattattgcttaactttgggtaacagcttaggcattctattgtaaagggaaataaaaacagttactcaaatacgtaattagaaatttattagatgaaattacatagccacaatgatattttcagttatattttttttattacaacgtctcgatttttattttttaaacatattaaccatcttaataatcaattcgcttttcagattgattatcaatttcttgtactgattcagtttgacttattacattgagcactttatccataataattatatcatgaaaaaacttattatatttcaataatacagttatgattaaccctgttagaaacttgagataaataaaaatttagatatgtttagagcaccctcaacgcttaactctatgaaagttccttaaaaacatacaaataataatattttaatcttattagggcctttgtataatttgaccaataataaaagcacacgtgtataattttttttgagactgtcccttaaataagagattttagggcttctctctcttcttacatttaccttttaattatttttcatttttttatcattaaaaattttgttaaggaaccaccattggtggtgctcttagtaccggcggtcaatatcaactgtctttatattaattaaaaaaaaatcaggggacccagaaaaaagtaacatgtaacagtgtcaagggttatgttaagtgtatttaaattatgatattaatggagggaaggtctaatcaaatctaagaggcttttatcatgtcacgatatcttttacgaaaactgtcctacatccaccgatttttgtatgtacatgtatctattgctttcgtatatcggtatcgttttcattctcgtcataagtagttatcatcattctagcttccaaatgttgttgttgtttactgttattttttttataagatagagatactcaataatatgaattttttttaatacttagtatataagtagggtaattagtttacgcaatctaataaacgagatataattaggtgagtgatttgatggctctatcgctagaaatttatggtcgattcagatgtaacctaacattatatgttaaaattatatatactgatatacataaactgtagtgtttgtgatgtttcctctaatctcacattatctttatcatgaataattcaatatcaaaaactcattctataacgtaaatgtacattcacgtgatcgtgttcaaatagcagtaataaacttgaactaatttttcctcaatctttatggctaacaacggactgctataaattgattttataaaaaaaaaaaaaaaagaagaaaagaaattacattgcattagacatcttattatatatgtacagcttcttaggtgggatgttagaaacttagactatatcatctatattgtttttttttcctaccatctatattgttttattatgttcacaacaatcgacaaaattccaaaggaaacgttgatagttatatacttatatgcgtataaactcttatttagaaaagcatttataaataaagttttttatatatatatatcaaatatgctaaaggtacgtgaagatgttagatctcgggatttcacttcaagatatggtctttaaaaagacaaatataggtaagtagacaacagctatgaaatagtacgacaatgacctcaacaagtacacagtcacctctaatttatccataaatgaaaattcttaaaattaaatccgtcataaaacttcgatttggaaccatggacagcaatactctatgaattcaaggtttaattataaagcattgatcgaatggatacaatatacaaaactggttaatatattcagaaactaagaagtacacacaaaaggcttctttggaatttctttgtttttaagaggaaaagtttgatggatttgcacctctgaggctctgactattgttcgtaggtgcatggtggaataatccgtccagattattcatcaatcttgtttaaaatatgtcacaatacaataataatatacaggacctaccatacaaacaacaattaaattatgatttaaatgacttgataattatcaattgattttgaaaattatatgtaaacgacctctttctcgaaaaataaaaccgcctaattttcaatggaatttttatctggccaaaataagataaaataatattaattgaatattttaaaaattattaaagtcatatcatcgttaaaaaatcacaggtcccaaatatttgtgtggcatgttgtcctccggatgtccaagctattttttttttcttttcaaaatgtttattttgcaaataggaaaagtaattataaatgacaacaatatgcatctgctgtaattatttagaggtatgtaaaaatgtcacattcttattccaatttatattttcctgatcatcagaataagaatagacctcgaaactttttgcccttgttgaaaaaaaaactatacattacagcaaatgcattatagaaaatagtttatatattatagatagaagaaaacaacaacaatacgttttttttacatggcaaaaaaaaacaaatcagtagaaaataggtatacgttacacacattattccatgtaattgggtctcaccgatcactgattgactcggtcaaaggctatggacaacttctgttacatgtctctgttaaacataccaaaatgttgctatttcacatgtaattacgcatcttcgtatatatagtaacacatataggtgtcgaccgttgaatattagcctctcattaaaattctactttaggaacacacagctacaaatactcttacatctaactattcaaaataaataaataaaatccgaaaaaatggtttatatgattttaaaaagtaaactataaggtgtgaggagcaaataaggagtgatggttaccctttaactgcgtatagaagaaagttataaaaaaaaaacatttgtacgttagatttgtaaaaccagattaaaatgaataaattactcagaccctccaatagtcaaatatttttcctaatagtcaatatttgataatcccgtctacaatttctcttattccattcacatatggaaacaacacttcgaagcactcattaaaagatagcaatgataatgaaactgattatgttttaaataggataaaaaatttcgttgctttttaaatttgtatatactacaaagtattaatcttttggaaaattggttgtgtagcctaacggcgaatcaattatttctaaagaacatttttttatatttatctttaaaaacattaacacgattgccatttgaacaacccatctatgaaaataattagttattcacaactaagtttaaattaaatttataaagaaaaacagatttgtaaaatcttaatataaattactataaatgttaaactttttcccccaattctaagcgcaataataagaaagtgtaaatttaaaatgcaaagatttttttttaactattgcaattgtaattatgtgctgcctataataaactacatagttttgttgttgtatatacataaaatttaccctaattaaaatgggttaatatgtgtatctactacgaacagctactcttctgaacgatcaaaatcttaattctatcaccctctctccctcgctcgaattttttataccaaaatgtaatcaaccctagtttcacgtttcaaagtttcaagtttcaagtaaagaaaaagggggaacaaaaggtaaatagtgaaaaagttttttttttttttttgtgcacaggtgaaaaagttattatataaaagattaaaacatatttttctttatataaaaaagctgttcactttttattggatttcctctcccacacaaccatcaattcctttcacactctcttcctcttttgagtttctctacaaccaaaaaaaaaaaactcatcataacctcctccatctccattcttctctctctctctgaacttctacctcttcctctctgtgtctctgccatggaatccggcaatagtagtagcatgcaatcctcaagcggcggtggtggtggaggagatcaagaagagtacgactcacgcgccgatcaatcaatttctgctttatttaaccacaacaacaacaacaacaacccaaccaccgtctcccccaacatcgctgttccaacacagcttgacgctctcatagctaactacttcaacacttcttggtcagcggataatcctctatggtctacaacggctacgcagcccaccgatggctctagaccagtaccaccgccgatttcgtcagaacaagtcttcttcacaaacccacttcaacaaaatctgagaacagttcctaacacaaacacaactagtcccatttgttccgtcccaaccgacaagaaaaacggtcttgcgacaacacggaatccaaagaagagatctcgagtctcgagacgagcgcctacgactgttttgaccaccgacacatccaacttcagagccatggttcaagaattcacgggtaatccttcaactcctttcaccggattatcttcatcttttccaagatcacgatttgatctcttcggttcttcttcttcttcatcctcacgacccatgaaaccctttcctcacaaactcatctctccatcgacgttgaatcatcattaccttcctccttcttcagagtaccatcatcatcatcagcatcagaatcttctccttaatatgaacacgccaaatatctcaaacccttttctcaacaactctttaacggatcaaccgaaaccctcgagcttgagaacgagtaatggttttggacacgtggacgttggaacaaactttgaggggcttcacaacattatcgtctcttcttcatcgtcgatgacacagccaaccctaaatactatccatggaccagaaaagagtactgaagccgaaaatgataataatatgctaagatccatcaatggtaatgatcaacccatggtccaaagatccgatggttacacacaacctggtgcttctggatccgagaataatctatcggccgtgagaagtgaaggtatggtggaattatcttggatctcttcttctgattagatgcatctaacatttttacattatggtcgtatttattatattacttaccataaaaaacggattagaaattctaagcgaaaatatatgatgaatggaaacattaattagtgtatggaaagattttggaatcatttgtgttataaaggttctatggtctaattaacgatgactttcttctacatattcgaacaatgttttttttttttttccttttcttttaatgttatatcggttttattccttgttggactggatgtgtatatatgtgattttgaacatcggctcacaggggcacatgagatttggaacttcgagatataatttgaaatttcactaaggtaagaatacgattttcaaaaatctcaagaagcatgtgcctatagagcagaagtagtgtcacaagggacccaaaaaagataacatgcttctacttttggcaaagaaaaatgttgaaagtctattgttactagggttacgttacttacgtatgaaccctaaaaaagaacctttgcactattgctaaaacatgaacctgtgcaaagtgtaaattatatatgtaataagtttaatttgcctaggatatattgaaaacacgtagagagggagtgattggtggcgagatctagggaatcgttagccgccgcttatcctaaattcatcttattttatttgaaactcacatgacacttccccatatattcatctttttttctttcttttttttatctttaaaattttgtaatataggcttatttttgtttaattatgtcattataatttgatagcgtcatttctccagagacatccgattgaaaaaaacatgcgtcactcaatacgtcacaacgtcatgtctcgtaatttctttaatcataatccatcaaaccgaaacttcgatggttacatctctaggacgatttcacgttagttagcaaaattgcttcaatcacacagaaacaaatccaaatttgatcatgatatcagcttctctctattttgtttgttttttaaaaatgttattcaaataataattgtgttaatatgatctctatatttcgtattgccgtagaccatcatcatgtatgaaatcaatacccattttcccgccattttgttttgccagttcttttgatcagtgaaaggaatatgtcagttagatttgccctttctccactaagacgtgaaacgttagcgtttcggggaaagtagacagctatatttcaaatctttgtgacaaaaaatatttcatcttttcttgtttttctttttacaaaatccttttgattgatataagtatgtagcttctattctttttgtagcttgaggtagtaaattaatgattttgttttcgcttcattgtttcataatatctctgccactttccatttatttatttacccaaatgcttttaaaaagaataataaagtaagcaactcagaaaaaggaaaaaccctttttgatgtatctatcaatttatgaattattaacacaaatttgatgattgatgaaaacatgaatttttgtgaaaataaaactatcattcttcatatctccttgtggagattggaaatccaaatgattaggcaaaggatttttagaagatttagggggcaaacaattatattccagctacagagatagagagagagagagcaaaacaaaagctgttttgttgttttgcaatgatgtttccacgttgatatgcatatatacacatgtatgtcgtatgagtttgaatcatatcaaaaatctgtctttattcaagaaatttactatgaacattccacttttacgtcatataaatgaaaacgaattctctatatatttgtagggatttacatattcttattttgaatcggacttcagattatttttcaaagactagtatatctattatttatacaagatcgcactagtcgagacaaaaggagtggtagtagagtatataatgcgtttgccataggcaagacaggacaggcctttttagcagtagctatgcccccactgtttttactttcctaattttgtaaatttgaaaaggtaaaaacctttttattcattaccatcgatcacactattatagatatcccctactaataatcgactttacgtaaaatttggaccctaacaacgttttaaataaagagattaggtttgtaaatttcgagttttgggatttaagggggccattattgtcgaattcaagtaatattggacaatcatgtccataaaaagtaggggaaatgtcaactccgatgctatatcggatgattagacaacgacaaatattttaaagcagagttattcataatattagtcattggttaagaaaataataacaataatttttttttgattttaatgctttcaataaaataaacatgtataaatctttgtatatcggcaacttggattttgcgaagatgaagtaatagaagagtgagaaataatttgtgaagtaggattacgggcacaagtcacttatataggcaacttggatttggttctttctacggctacttttctttaacgtctatatttttttaccgttgtaaaatttgagtctaaaataagttatcgttcgtcaatgagttgacatctacgctaataaaacaataggccaaatgggcctagagacccaaacagctatttttctaacgtctatatttgttttaccgttgtagagttcgagtctcacagataaattaccgtttgtgaatgagttgacaccaacgtttgaaaaattaactacacaacagcaaaaagcgtttataatagataaaaaaaggctgtttgttgattaggaacatcacagcccaatatagaagaaatacagaataagcccattgaatcaaattaaggcctaaaatcaatattcttcttggtcaaaagtcaaaacgttataatgaaagataaaatttaaaatcgaattagcgtcaaaagaaagttaatctttctcttacaatatttaatcacgaacagaaatgtaaaaaaatcgagtgggaaaatgaaaattgagatcgataaaaaaagaaattggaaaaataaaaaaatgaagtaagaaaaaggagaaattaatggcagacggcgttaggacaaagaaaaagagaacgcctttctagggtttggtttatgaacgctccgccgtaagaattgtcctccgccgccgcgttttcccgtcgattcagaacagaaggattattgcttttgccaatctgtatcaatatccgtttgattatccttgtaatttcgtgtaaaaaccattcaaggtttcagcttcttccctcgttctttagggtttagatttgatttggggttgggatgagtagtccgttcagtgaagagatactgattgataacctcgctaagctcaacagcactcaacaatccatccaaagtatcctttttattattattcgaattcattgcctcaattgaatacatctctgtgttttggattagctcattcacattggtgtgtcttcatttgattgaacctcttactgtatgcttaaatgtgtttgcttttgtatattgcaatcctgattgtttggtccttgaccatttgttttgttgggataagctttgtcacagtggtgtatagtccatcgtagtgaagctgagctggttgttacgacatgggagaaacagtttcacagtacacagataggtcagaaagtgcctctcttgtaccttgctaatgacattcttcagaacagcaagcgtcagggtaatgagtttgtgcaagagttctggaaagttctccctggtgctctcaaagatattgtttccttgggagatgactatggaaaaggcgtggtttcgcgattggtaatcattacagcagaatttgccttttttggcgcaagtacttttcgtgtttgtgtttatggttttcattcttttaatgaaatggatcttatgtttcattttggtatagtctttggatgcttatgatgactcacttgatctcatattcaatagccgttttgtaatattcttggatgtgtgattctcttatttgttgaaagtgtttagtttttgagtctttttagttgattaagaataaattgcttccgcttgttcattgcttttctgttttcttgattactaggttaatatatgggaagagagaagagtctttggatcccgttcaaagagtcttaaagatgtaatgctctcagaagaagctccaccaccacttgatgtcagtaaaaagcgatttcggggatctaaatctgcaaaacgagattcaaaatctaccaaaacggtaacaatttttccctgtttctctaattaaaccgtagttatttgttcaggggttttgcctgagtctgaattttttggttcattatctcctcacttgttttttttaataccagaaattatcaagtggaggtgtgtccgagaagatagtatctgcattcaatttggttcgtgcagagaactcaaatgaagagacagagatgaacaaatgcaagtctgccgttagacgtatcagaaagatggagaaagatgttgaagatgcttgctccactggtataaatttagctaatatctttctctcttagttggggattatcaaacacattctggctctcaatctttgattgtcttcagcaaaagacccgaggaaagaatcattggcaaaagaattggaagaggaagaaaacattctgagacaatctgttgagaaacttaaatctgttgaagaaagtaggacatctctcgtaaatcatcttagggaagcgctacgggaacaggtaaaggtcttgcaatcttgcaagttcaataatttgctcagacatttcaattacttactgagttttgtgtatcaggaatctgaattggagaatcttcaatctcagatacaggtaaaaatctgaattggtttaataatccctttacgcctgggaactattttgcaatcttgagtacaagaaaactgtatttctgcatcaaaattgattgtgtgtctgtctttgttcttattcatcaggtagcacaagaacaaaccgaagaagcccaaaacatgcagaaacggctcaataacgaaacaccggttaacaataacaacggaacatctggtcaatcagcgaaaatcactcctgcctcaatcgctgcaatggcggaaatgctaacctcatcaacaaactcatcaatgattatgcattctgtcctctcttcatttgcagccgaagctacacaaacttctggtctaaccaaatcaaacacctcagacacaaatgcatttgttgttcctccaaatcctcagcagtatcacataataccaaatccagccgcatcacaacagtttccttatggatttggtaacattccattaatgccacctggagcactgccgccaccgccgcctggaacgttgccgccgcatatgatgaataataacaaccaaccaaatgcagctcagcaacaagcgcaacaaggtcagagttttcatccaccgggtatgatgtattttggacctccacaccattcttaaggttagtaaaaacaaaccaaaaaatccaattagttctagtattagatagtttctgacccactttattttatttcatgtaacgcatattgtagaaagtagaaacgagatcttttgtcttacaaatcttgtaccttgagctgtttagtcaatttttcttctttgtaacatagttagacttctattgtgtatctgcgttacatttatatctagtatgcgtttgtttcaaatggatcttttatatattgtacaaaatatatatacatcagtcatgctttttttctcacatatttcaagtcaagtttacaaaaaatttcaatcacaaaacattttgaatgtctactatacaacaacaaatggaatggaactttagaagccagaggagttttgagtgaccactctgtttctaccaccaactcggaatctagacctaattgagccgttggagtcgataactcggtcccaatcaattgatccttcgccatcttcttcatcatcctccggcactctttctctcatcagctgaagaatcttctttgctttctctctagctctctctgttcctctctcttccacttccttcaacacttccactgctctcgcctccttcgctagtcctttgaatcgaagactctcgtggctcaatgcgaacaacgccgctacgcaattctcacgagccgatgacgatgaccgggcctctgtcggctcctccgtccactcctcccttaacttccctacaagaatcgcaaccgcattcgcatcaagcatcgccgatcttccttcactacaacacgctaaattacagatcaccaacaatgccctgctcgccgattcaccggacctaaccatcgagaaaagcgctggtaccgctccaagcctaacgagctttgatcgattcgtctgattcaacgtcaaatggtaaagcgcgagagccgaatcatgccgcgtccgatcactctcagctgcacgtaacgcgtgaagcaatggctgaagcgctcctaaaactccaataggcattttattatcatcttcaagagaaagactaaagattgttccagctgcgtgttcttgagcttctctagaccccgacttcagaacatcgatcaaaatcggaacaaatcctaaccgaacaatcgtcaatttgttcttcttatccaaagacagattcacaagcgacgctaacgcgttcgtctgcactaaactgtatctcgaaacaatcatattcttcaacaaagaaagaatccgaggagaacaaagcgaaaccctagcttcatcattagtacgagtcatcttcctcatcataatcaaaccttgctcttgatcaaaaatctcactgctcttaagcttgttgtaaatcacttcgtcctcttctgtggcggtggaagtagaattagagaagaaagtgtggtgcgttagggtttcgatttcggaggaagaagatgatggagatggagagaagcaagcgggtctagttgttaaaggaagaggagtgaatggactgtgagcaacgattacagattcatcagaagaggtcgtggagttgttgaaatctctccttcccatgagttcagaatcagcgtggtgaattatcatcggagctcggtgagctacagctctgagaagctcttgctcggagacacgaatctcgacgtccggtggaggcatctgttgccgtaaaattctctcgacggtggagtaatcaggtggctgaggacgtgagacgccgacggtgtcgcaccaagtatcgattgttgatttcatgtttaggttagggatgatgttggagaaatcgggtagagattcttcgtcgtcgttgagtttggggataaagttgaggtcgcgacagacttgaacacagacacgttcgaaggtttgaccggaagagacaacaacagggtcagacattactgattttgaaatcggacagagaaattcgaccggaggttgttgttcttgttgctgttgtcgtgaagatgaagaggttgaagaagacgatctgtggctgaaaggattccatctgagccgtccgtttttacccatctgcgacaaatcaacggtcaggaattggtggtgagtttgatttctgaaaagggttttgggttttatggagaggaattagggatttgaattcatctttcgtgattttctgagaagaagaagaaagatgagaagagaggagagtcgtcttcttcctcctgaactgaaggactttgtggcctactgactttttttttttggcttttgtttattttcgaagtgactattaattttttttttaaaaacttgaacatattagtagtaatcgaaaatgttgactgtgaaattaatataggtggacccagatgtgaattggctttcatagttcatgcattctgaaaagttttattgctttctttttcaggtcaattttgttcatatacttttcttaaaaacatatcttttaacttacgtacttataaacttggaatgtaatttatcattttggaatgtaatctaatttgttttaaaaggatgacaatacagtgatacactgaaatatgtggcatcaataagtttaatttttgctgaataataaaatgattagatttttcactaaacatgatggacatccatgccattcttagctttaggggaaaaaaacttttctcagttttagctgtaagctttacattgaacctctgaccactttttatcttgtcctctgatgatgcattgttgggttgcaagttgcatcacagatgatatgacatttcccctacaaatctttgtaccaaaaaccaaagtataagggtagtctagtagacaatctggctttacggttttatcttgtttcgaattaagttttacctgttttatacaaaccaaaatcgaataaaaactcatttttagttcgatttggttttggttcggccttttggatcttttactataaatgtaacatggttaggcactgttttttttgtttataaccaagtttctgcttagccactgttttgtttttgtttttgcacaccctaccaaagtagtaccttgattaatccttttactaaagatgtaacatggttaggcaacacatttactttgttggatacatttaaaacagtttctaaccaagaacacaactattcaggttttactccctttttcataaaactcttagtcaacagaaaatctttcatgaaaatcggtatatggtgcatgatcgccatgactgtagataacctacctgtagagtaccaagccggtgggtttttcttcagcaccacggaaacagtctctttcgcaaaagtctctgtgggtatcggctttatgttttgcgacagaaacgctctctcacggatagcgtcctcgaacggtttgtatagtttcaattcaggtaaattgttgaaactcgatatccctgagttagctatgtttgattgaatacctcctggtacaatgttgattacatcaatcccaaatggcttaagctccaacctagacaaacacaaaacaagatagtgtttactgtttagatgatattaatcaagctgatgaaaagagactgctgaaatcgaaaaaccttaaagtgtcggtaagagcatgaagagcagcttttgatgcagtataaaccccagcccatggtcctggtgccattatgctaatacttcctatgttcacaatctttccctttttcttagacgccatgtgaggtacaacagcttgagtcatcctcatggaacctgcaaagtttctttacaaagttcagttcttgaagagacttctcacaacccaaatcaacagagcaaaataaaacatgaaagagttgagtcaagaattttaacaaacacatggtgtgcatataagaagtaactcgaaaattttcattcaccgagcacattggtgttgaaggtgtaatccatggctgaaattggaatctccgccaaaggtccgatacactgaactccggcgttattaaccaaaacatcaatctgaccaaatttgtcgataactttcgacacaactttactcacgctctgctcagactgaacatcgagctcttgcacaaagaacttggaatctttctccaattcagtcatcgtcttctgcgatcgactcgtcgccaccacacgacaaccattagccgagaactcacgcgccaacgcgtgaccgattcctccctgagaacatcctgtgatgagaaccactggcgtctcgtcgctgctgcttcccattttatataattttgaatgaaaagatttaaaagagaaatccagaatataagggtcgaattgcaaaaattacgccgaagtttctcaacacagtattaagatgatgaagttttaaaattttagaattcttccccagaagtttgtccacgtatgcaacaaagtccctgagatttgttttttttttttatctttttttactcaacagtgattcgccggagaagaccaagtcattgattcaacggttgataaaataaacagattaatttacatatatttacataaaacttcccaaaaagcaaaaaaaaaaaacagaaattaagaaacgaaattagctatgaacaaaatggaatcaagcagagaagaagccatgagagatggctaaagcaaactcagatttagcttcaaaattcttcttcaaactctcaatcttcatcttgtcaaaagctatagtcatcttcgccggaattatcttccaccaatcaaattccaccggcgatgatctcgaacccaccgtcgtatgcttcatcctcctctcgtactcctccgccaccaaaatcgctatgtccgccatttaatcggttatctccggtttatctacctctgatgttcggttatctttggttctatgttagatgttattcaacgcaactggtatatatagtgtggctttgacgtgtggtattggtttttggataaggttgggtcaatagttttctataaattaaatatcttctttaataatataaaatttggttaatggttttttaaaatcgtgcctaatctgttggtacaggtggttttcgtgagaaggtgggctgggtcggtttgttaaaaaatatggattttgtgtggaaagtggtctccaaggtccgtgtcattgacgtataaatctgatcactattcattattttaaaattacttacaggtttgtcaaatgaaatttcctagtatttaaacagattggtatatttacaattattaatcaattagacaaatccatgggttcagtattttctaattctaaatattataatatttcagatattatcaaacaatttatattttcaagattttttaacttctaaatgtattataatatttcagatattatcaaacatttttttcttcagatttgtcaaaaaatgttgtgtaagtttgtggtccgagcctaagttgcttcaagcccaaaaatgaaggccaaggccaattacatactattgtatccagtttcatgatatgggccttgatatgaggaagagaaaaaacgaaaattctatacccatagttacttttccatttttctcatgatatgggcctggtacgtcgcgttcatgaacataacgagtttattgtaaatttcatgataataattaatctttacattcattcgacgattgatcattgatcatatacatatcatcattatttcaaatttaagcattctggaaaaactgtatttgatcgatggttttgatcacatctttttattttgtttatttgaaatcttattttcgaaaatataactttgttttctaatactgaaataaccaagtagtctgtgatattattttctaaatcggggttaaacatagtagtgcgacattgacaatgtctgacagaaatagaaataattccaatgtaaatacaaaaaaacaagaaaagataaagataaatcgaaaaggaaactaaacgtagagaagaaaatgaagtaatcttaaatcgtgatagtttccaattcctttggtgtactttcacttctttctctttttggttcctgcaaaacttttctctttgttgtctttggtgtacacttatctcatacatgaaaatttaatagctgacagaaacaagaaaacatttcgaaattaatattctaaaaagtagaagtgtactataaatttatttattctctttttccagcccaccttttctagtcaattttctcatattttctgctttctttagaaaaagagaaaacgatctttcagaattatccgaacatatactcttgtgtaatgatcgtgtattagtaaatgttttaagtacgatatgtctaaaaacgatccaaaatgcttagtcgatttcttcttttatttggacaggtcaaaggctgaggcgattaaggagtcttttatttgttttgtcgactattaggagtcgaattttcgattggaaaacaagtatatatatagtacttgatatcatttcgtttttaaaaaacaaatatttatctgaattattcactgttaaatccaacttattaaagcatgacacctttacacctaagtggatatgtgggatctacttcctatcaagtcctttccgagagccgtaggggcatggatcccttgacttatttaataattaatctgtttttgatatactaattactattctaatttggtgggatgatctttcttttctttatggagaatctcttctcgaataattcttaaagcactcgaattctttaacaaagaatcagatctgaaaatatgttaatatgatttggtggtattttttgccatacaaatatcacaatatatattttgacgtgatatattaataagctttaagaaacaaatatttctaagaatattaaaatgcctgattaagtaacatagtcgtatgacgcaaacaatgacccaaaacgtctctcaatcaccaatcacatatgtccatatatatatgatatatgtatgatgtatcatagtcataatattatactatcgtataatcagatatggtctactgatgggggccaaaggttgctttgcttctaagttctaataacgtccctaaacaattttttaatggaaatttgctttgattttcatattataatattttgttaattatcctatcagtaaagtttgcatctcctttaatcacatgcacgtggcattgcatgagtccagttctatcaacatgtactcacttgatcgttgatttgtgtgatacaaactcatatcttctggcagaaaaggaaaaaaaaaattacacattcaaatgaaggtatttaatatcagtgctaaaaagttaaatgtatatcgaccaattaatataggtaagtgataagccattaatttcttatattttgaaaaagtagaaactattagtttcaaaactctacgcaagaaagactagcttagcgaatatatagtcacagtggaacttatgtggttttgcaagttttttaaatccattaatcgttacagtgtaataagattacatattatatttaaccacttaaaaatatatatgtacgattggttaatactaatctaaatttgtttttaaatcaatattctctgcttatttcgcatcatacgaccaatccgtgtatagtatttccattctgcttggttacaaataatactacaaaattggtttgcgtataaatatttatttgtaagaggatagaaatcatcgtttatgccaatgatatcaacaacaaaggagtgaaaatccaaacacgaggtaaccactcgtggtggcaaaccactttataagatagcactcgagaataattctacaaataggcaaaagctaactgtttattttcaaaaaactaaaatgctaaatgtttatgcgtgacgtctctttttctgcctgctcgtttttacaaatctatatgatgatccaattcgaattaatattgcaatattttaatatgtggatagagtgtgaaatggaatttcaccaatgtctatcattcgtaatggatcatacggaaaagccatcaccatatggaaaactttatacacacatcattaacacgatccaagtttcaaaagaaaagaaggattaataatattattcacttattaaacttatcctgttgtagttagtttcctcctagtagacaatccaatattagatcatgcatctctataaaaatatttttgtttaaatacttttcatctttattgtacctaatttgtggaacttatctcctctcactctgtatatgcatgtccacgaaacatctcacgtcatctgctgatgaccgtaactcttgagctatatacattcttgtgataatttaatgctgtatgaaagaaatatacatgtttatacaatttaataagtgaaacaaaacttataaacaaataaaaattaaatattatagcttcgttcaagcaaacacacacgcacacacattttatatacacgtctgaattgattagttctaagctaggtagatccaatttatgtgtaatgatgggtttagggtttaaatcgatatgtaggaatcaacgaagacatgtactacttttcattatgtcgaatgtcaataaccagacaattcttatttaatggtaaatcataatcaaatatgtatatgtctcctatggagcctgaagagccaagctgttttgatacattaactggctgcacacatattaaataggtgattccttcacctaataaactctactaacattagcctgtttagactaattccaaagactaatcagtttgtttaaaattatgctcgtattatatagctacgatttatattataaacaagaagaatatatgcaactttcttgcaatataaattaatgttatcatctttacactaaaatactaactatattccactaattaatacaaatccggttagctatgaacaaaatgatcaatatcttattgaattttagaataaataaacgttgcttgtttgaactgttcattcaggtcggtcgctactcgctaatttgcttaaccaatattattatatcagcatgtaataatatattatagctagttgttaaaaaaaagaattatatatagttttgttttcttatactaaattctacacttttttttgtcaactagtctgattttttttaatgagacagctatgatatttggataaacatcagtatttttttttaggttctctgcatttatatgttttaaaaacaggttgatgagatagaaaaaaatgaaatattgattacagattagattagtaagattacttaattatttatttagaaatagccgttactacgtcaccagaatcgaagcagactccggagttctctaatactccatttggctacgccgcgagtagtaaacacgcgcaatatttatcctctttagacgctaaattccttcgcttggaagtatgccggcgtttagtgtttacattaggcgcgtgtatttacgcttgccgtcgaaacgaattttatgttatcgccgacgaatgcgcaggttagaagcagacatgcgcaagatagaaaatataaaattataaggaaaagaaattataaattggagagaatttagaagagaataaaaaaatggatctacctggttcgcacatcagcgtgctaggtagtggagacatgacaattgaattttttaaaaacgaataactaaatattcataatcaaattattatcttaaaaaaaatattaagattcgattggtatcagtggatcatacatattaagtcgctgctaatcaaatttccttttcactaatttatttcctgcttttttccttagcaccatcaaacaaaaagtttatgtgaaaaaacgtattttttcccacaaacagataattagtccggtgtgttttgtatatagaaagtggaagaaaaaaatagtatagaaaaatgtaataattggttttgactcactgtagctgagttatgcgtgaagacaaaaatcaccgagaaaccacagaaacaaatagaaaaaatagttaaatatataaaacaaatataaaataactgcgtcaaaggtctcatttaagttgtcgtgattcttcttccttcgtctacttgaagatgatgaaacctgagtttctgagacagaaggaagagcttttaacatcccttctgtttatggtcggattccaactccggacttcttggctttaaccctttacgtccgatcttgtcgctgaaatctttctttctccttttacatggttttcacgacgacaaaagtttgcctttttctagttgctgccttgacttcagatagcatcacaaggttcggcttcagataacatcacaaggtttgattgactttgctctgttctaatctaatcttgttaatatcttaaaagcctaaaacttttctcttattgattgttttggttaattttgtttccccttttttttgttgtatttactcgattgattacttcaatatgattttctggtttgcttggaatttaagctggaaggaactgattcgaatatttcttgcataagaagatgtttcaatctacctatctattgacttcatgattggcttttgcttttattgttgatatctcttactatcttgatttcacctttcgttaccatttgcgtacaaaaatttaacaaagcaatgaatgggaatttcttattttttgtatagtcgttttaactgctaaactatgttaagttggtccacacaattaggtgctgaaaataaagtgacatcctaataagtggaaacttgacttatggagcttttcgtctgcttaacattaatttttatcatcttatctatttgacaccttccaaacactattggggaaatggcttcttctcttttttccggtgtaggtttaaggttttagatttgaaggcggatggtgaggagtttgtgttgatgaaatgggtgatttgaagttaaatcctttaagttcttttagccttaagttcttttagcctgtcattacaatatatgtttcagttgtgatcttttggtgctctccaaggtcttagggaatctccgtgtcccctctggtttctttctttgtataaagtctctggaatttaaagatgattttgtcctgttttcttcgaagaatttggcgaagaaacatcaaaagttcactatttgctttacgtgttatgcttgtttgactttgtgtgatctaacttttggttgaaaactaatgctcatcttttgttctttggaatgtcttgatctgcttgattttgaatgctttgtcacattgtttaaacaatttgttctttgttttcagttgaggaaaacatgaattcgacatcgacacattttgtgccaccgagaagagttggtatatacgaacctgtccatcaattcggtatgtggggggagagtttcaaaagcaatattagcaatgggactatgaacacaccaaaccacataataataccgaataatcagaaactagacaacaacgtggtacttttttacttcattgctcttcaacctcctgatgataaatttgtttggtctgttttcagaaatttaaactagctttcatttcttgacaatcttttttttttttttatagtcagaggatacttcccatggaacagcaggaactcctcacatgttcgatcaagaagcttcaacgtctagacatcccgataaggttagctattcaaatacttctctatcagtttcttaatcataaatttctacgcatcatatagactaaatcgttatatcgttacagatacaaagacggcttgctcaaaaccgcgaggctgctaggaaaagtcgcttgcgcaagaaggtatgacttcattttcttccccttggtaaactgtttctgtttgcctaatgagttgagagatttgattgttttttttttttgcaggcttatgttcagcaactggaaacaagcaggttgaagctaattcaattagagcaagaactcgatcgtgctagacaacaggttaatgaaatgaaatctaaatatatattcgctttctttcgagttccaaaatataatgcaatttctgattgaatatgaatgttttcagggattctatgtaggaaacggaatagatactaattctctcggtttttcggaaaccatgaatccaggttttgaatcaagaacaatgagtcttttggaaaaaatatagaattcaagattttgattggtggaagcttatttgatttgcagggattgctgcatttgaaatggaatatggacattgggttgaagaacagaacagacagatatgtgaactaagaacagttttacacggacacattaacgatatcgagcttcgttcgctagtcgaaaacgccatgaaacattactttgagcttttccggatgaaatcgtctgctgccaaagccgatgtcttcttcgtcatgtcagggatgtggagaacttcagcagaacgattcttcttatggattggcggatttcgaccctccgatcttctcaaggtataaaacaaataacaatctagcgtaatgtttaatgaatagaaggaaacaagcaagattacaatgtttcaaatgtttttttttgtaggttcttttgccacattttgatgtcttgacggatcaacaacttctagatgtatgcaatctaaaacaatcgtgtcagcaagcagaagacgcgttgactcaaggtatggagaagctgcaacacacccttgcggactgcgttgcagcgggacaactcggtgaaggaagttacattcctcaggtgaattctgctatggatagattagaagctttggtcagtttcgtaaatcaggtaaaatatatatattcaaactcatttgaaaatactatagtatcagtttcttgattttgtttgttcattcttaggctgatcacttgagacatgaaacattgcaacaaatgtatcggatattgacaacgcgacaagcggctcgaggattattagctcttggtgagtattttcaacggcttagagccttgagctcaagttgggcaactcgacatcgtgaaccaacgtaggtttgagttattttgtaacaaccaaatgaagaaaatggaaagacctcaaaaaatgaagaatgagtgcatctgaaaacagaggactactctgaataaatagaggggttgctgctgatatttatttttactctgcggcggaattagaaaatttgaaaaacatcatgtattgataagttgtaaatatcagaaaaaggtgggggtgcaaaaatttgtactttttagcttttgaaagaggcaagtttttcgaatgtttgtttgatttgtaaacaatttcagaattatataaacttggttccaaatcccctgtaataatgtcgagctatctgcaatttgaaaactataggggctttacttaattttacgttttgtgtgacacctatttgattttttttgatacgtttggaccagtttcgtaattagaggtaaataaaggggcaaatagtaagatataagaaaagccttatctcatagagtttcttctcttcattatcctcaaaatcgctcgagagtgagaactctgctcttcttcttcttcctccgccatagctacaatgcttagtctctcaatcgctacgccggggacggcggcgatttttcgtagaggaactgcttcggcgacttcaacttcgtcttcattccatggtgtcagaatccagcaccaggtttctgctcgcgtccccgcggcggcgacgatatcgtcgtcgtctcctaaaccgtcggtggtgatgatgtcgaaaagagaggcggaattgaaagagataagatcgaagacgacggagcagttacaagaggaggttgttgaccttaaaggtgagctctttatgcttcgtctccagaaatcggcaaggaatgagttcaaatctagcgactttcgtcgtatgaagaaacaagtaagcttttttcttactctttaatgcagaattattccaaattgtgaaatctactttgtgttatctggtcgattttggcagtctttgaaagggtttaacaaaattgggatatgtggtttattgatggaaacattgaaatcatcaccatggaaaataggattatttaatatgaagttgtagaagatgttagcgaactctataagcaatgttttgtgttgtttgttctacacattatagttgattctaaactctaacaatggcaacattgtaagttactgttttgtgatatctaatactgtttttggtaggtggtggaatggaattagagatttaatattgagttcaatccatccccttttatagattcttgcacacaagcttcgaatatgttcttaggatactacggtttcagttagacatgaatgttgagctttgcgatatcgtttgtttagtcttttaagtgtgccaatgcaccaaactagctttagatgagaatttacttgctttggttttactgattgctgggatttcaatcagacatgaatcttgagctctaagtgactaatccacccaacttagctggagatgacactaaattcaagtagagatttcttggtttttttggcttacgtccgtctcttttctggtactgaagatgtgatcttttggttgtgggtgatttaggttgctcggatgttgacggttaaaagagagagggagatcaaagaagggataaagaaaaggttgtcgaggaaacttgacagacaatggaagaaaagcatagtaccaagaccacctccgtctctgaagaaacttcaagaagaagaagctgcagaagaagcagctgaagctgctaaatctgcttgaaaaaacccgctattgatttatggtctcttccttgttgtttcctcgagatgttgttaatctctgttatttgttgctgaaccatcttgtatttgtttttcttttggtgtaaacactttccttatcaagtagtttacatgaatcccttaaagattgaaatcgttccttcatgtttcatcagaattatcatccaatctgacaaagaaactagtaatcattcgaagttcgaaaaacatcaaataagaataaagataaataaataaaaggaaaaatccaaaacattggcgggaaaattaggaatttattgaggaatcaatggtgggcttagaaatagaatggtgcgttaaagtttctgtctttgtgtgcgtagatgaggtattcggtggtagattccggctgggtttggattttttttccggcgagtctatgaggtaaagtgatatttcttacagattttaaggattcaactaatacgattatgtttccgatgatgtttcttgtttgggcatgaaaccctagatttcagcgattcactttcaaaataaaatccgtttatgcaatcgaatgtagtagaaaaatctcatcttggtaaatctcattgagacttcattgttagttttttttgttagtcaaccaacaatgggtttggtttttgttttactatttttgtccttttcttattagtatattgaagatctggccaataatttttctgactcagtggtgttgaaatcttctttcagaagtggggactagtgataaaataatctcaaattagtagtttcttctctttgttttttcttttcttaaaagtttgaatacgactgatataaacatagttcaataagaagtcatgtttcgtttactagtagtttgctatcgaggctgctatatatgagttcttgacaggtatgtagtcatttctggaagccaacaaacctgtgagatactgagatggttgttaatttaatgtttttgatttgagatcgatgctcttgttaactagcagtagtagattttcacatgttgatttctcattaccattgtagttggataacaaaactgttgatatagcaatgatcggaccacgatgattcacctaataccttatattacaattaagtcaaaagatctatctgcccacaactattttaaatgactaatggtcaaaactgtgttttttttttagtgcaaagtttatctgaagttgagtttgacagctgcattgtgctgttcacatacatcagtttacacttatcctgcattttaaactgaccaaaagtcgtcaacttttcagcgtagatttgtgagctatgcggtgttatgttaagtacaagagacttgagacaaaaattgcatatctaaaggtgatttatgagatttgcatatgaatagctttgtatgttttatttgtaactatttttctgaagacctgtcttaccaactccagtcatgtgctttgcacagctttctatgatgcttttgacacgattattttattatgtaagtgtcttacgtatagtgttcatgcaaagatctttggtacttctggatcacaacatgtgacttgcttttcatgcaaaaagcttcctccatgtttgtcttggtcttctgctttcgtgaaaagtccatactctttagcctgttttacttcaactactatttccttaaaagcaacaaatgttatttatgcaggtattttggattttctttttgtcttcttcttgatgcctgtgaaggtaaagatgaacaagaccgactctcttaacttccagaggtttgttgatgcttctgcccaatcttttttgttcatttactatccactagtttcaggctttgattcatttcatgaagcaattgtgattctaacatgatttcaagcttttaaaattctcctcttgattaaggaaagcagaacttttagactttttgtatcttgtcaccttaaatggtccttttcttttaactttgttttctagcttacactaactgtcccctttttctagatggtgatgcatatacatatgtacaatctcttaagcttgataaaacatatagatagttattctctatgagcatttcgactgactagtgctatcattataaaaatgcagtttgcttggcttagaccaatatgtttaaggtggattgtccaagtcctttagaaagccttcagtaagaacggtaataggcctttttttgcttgtgttcacttcttatatcaaagtcagaccaatgtgttgatataagcactacttgcatgattgcatcattctcatttggattgaatctgaagattattttggttggttcttacctccttgtgccttttcagcttcttggatcttctatggagatgtccttgttcggctttatggattggttttaagaaatctcaggttagataatgcaaaggtacaacaattcaatacatgtttttcagtagcatcattctttcctagttcctaccattggagtgaagtcaatacagattgtttgattattaagttaaaaagtgccttcaaacaccttaatcttgtaaatacaattgtctttacttgcatgtggaatatatcaatctcatcaattctggcttgcctatatcaataggtgctatgtgacacagtccaattggctaattttagttgtgaccaccaagcgtagagccattaatgattaccactggttcgatagatacaatgttatacattgttcaggtgttgctgcttctaaattttgttctaataatcttcattattgtctgtcttaggacttgttgcaggactcatacatttttcatatgatagtagcagaacaaatttgatcaaaggcactttctgaattctgatttagtacaggatcgccctctggtcttcgagcaactcaggtaattgtatgtgattgattattcacatctttcttgaatttagtgaaaacattagtctgatgcatttctcttcattcggattttgcatcataggtaactatatattttacgaaatggtagatactactgatgcatctaaattgattctgtgtggagctctaattaagatagcaatgtcattgtctccctctctatctttcactgtcttgcagctgtaaattggtgtcatcaatgaacgaatttagccacctaaacttagatgtagtggttgatgcctaagaaaacaacgattaaggcccacacaatatggttcatataatactagagaatgactttactttataaaattgcaataggttcttattcttcctgttttctctgtcccatgttcgtcaagttccttgtatatatgtgtttttattgcatgtagtttgacttaagtgtgttgctaaaagattttgaactttcagctcttgtctgtatttattgatattgataacaaagaaagtcagtctccaatagttaaatgttgaaataatcaaccattattagagtactgtatgaacgaaacttccaaacagaatctcctgctttccaataaggttgcttccatgtgaacagttgaaaaagacggttaacttgttgactgaagctactcatgaacttgtttaagattatatgtgtgcatgtgtctcattttgtgttttttcactggttgcaatatctttcaggatccttactgatgctgatgaaattttcaacacaagcatcttggaattctcttaaattttgtaagtaccaacagtttagtatgtatcgctgtcatccacaaagtttgatagtgacctcctggatttcaagaatttagcaattaggtagaagtatctgagtaatatagtcctgagctcgatgcatgctcttcacatctacagagaatagggaagaggtaaaagtttgtttttcaaacgtggctttgaaagtcagggtttagatgtgttggttaggaacttaggagaagaagcaaaacaatttgtttagctgacattcacaaccatttttttatattagaggaaaagtacggtttaagtgacatagcgtatcttgaaaataattagtttagaatgaacctagtgccttccttatttctttaatatatatactgtacctgcttcctccagtgagattgtggtccactctgagaaaccctagatgaacaagcaactcaaatctcactatcttcccggaaaatcatcgtagtcaactacatgataatactattgtttttcgccaatcgttcaatgaaaaatagcatttgttatatacaggacaagttacagttgatacactttggaaacctgtacttacgaatgctattatctaaacattgagcatttgaaaagcctctagggcacttatctagttcgttgatataggctattacagatttgatatttctttttccaagttctatgtatcttagaatttgtttcttgaggaccaattgtctttcatttggaaaaaatgcaggaaaccttatgatctactttatggaaaagacacagaagaaaaggacaagaaatgccatctggtccaatgcagaggcagtggggagaaagtcttgtaggtttcaaagatggtggatatttagatcattttctgcaccaacctctcccctaacaagctcctttcaattttcaacaaaatgtcaacatcaagcctgtcaccagtatatatatagtaacttctcttctcataatacaaatactctacattgttactttgtccttcatatttgtctgtcacctgttgctatctatgcattctctataatttcttatagattaaatcgtataattatgaatgaatgattgatctgtattaggataggattatatataggtcatatatttgatcagaaaatggatacaaaacgcaactagattagttctcacgtatcctgataataatgctctctgttgcaggtttcttaatatatcatctttttctcaccagaaaaagcatttttgagtaggaaatgggaatttctgtaagtattacctaaatttgctatatcaggacatgctcaagatcaaaagaaatgtgttgcacaatacttgagacttatagtttccatatcagaccaattagtctgcttctttctggtgctttctagtatctcaaaactcttagggctcatggctagatacaatttaaatacaaatataatattcttttatatagagaataccaaatacatatagagtcaagaaatgaatgacacaaggagatgatctctctggccatccttgtggtgacatctgttgtttggtgcgattaaaaatcatttctctgctatgttttgtcagcgaatgattaaaaaatgatttgaatagtttatagctttcttgtcaaagtcctatgctggccttcttctcccccacctaaacctttctgtagaaactttggaatcttttctctagcaggcaatgcgactgtactgatcatattattatgtttgcaggtctctagcgacatgaatccgtgaaccacaggatttagtactatcttgaattgtgtccgagaagaagattgtataggactgtaagtggttataccgtacgtatatgagagaataaagaagagaaaagcatagaaaaatggaatttgaagggtgaaagcgacatgggttgttttggtatgcgaataagaaagaggcacgtggtgaatggacattgaagagagagagggaagctcgacttaatataaatatagaaataagaagcagttagtggttgtgaagaaaggaggcaagcgaccaaatatttgaagaagtaatagtaaagagaagaggtaaaaaacaagaagagagaccgttgttagatacagaagttgatcaaacatgggaagatctcctagctcagatgaaactggtctgaagaaaggtccatggttgcctgaagaagatgataaactgatcaattatattcacaaacatggccatagcagctggagtgcccttcccaagctcgctggtactatcttgaagacgttgatgaaacctagttttgtttgtgatatgagtctaaagtcttagtcttatgaatatatctctgtttctctatatatgcaggtcttaacaggtgtgggaagagttgcaggctacgatggacaaactatttgagaccagacattaagcgaggaaaattctctgcggaggaagaagagaccatcctgaaccttcatgcggttctaggcaacaagtaagaacccttctgattcttgatattatctgggattttttttgctttgtaacttatcctaaatgttactggtgatgatttatataaggtggtcaatgattgcaagccacttacctggacgaactgacaatgagatcaagaatttctggaatactcatttgaagaaaaagctgattcagatgggttttgaccccatgacccatcagccaagaaccgatgatatcttctcaagtttatctcagctcatgtctctgtctaacctaagaggacttgttgatctgcagcaacagtttccaatggaagaccaagcgctacttaatctccaaactgagatggctaagctccaattgttccaataccttcttcaaccttctcctgctcccatgagtatcaacaacattaaccctaacattctcaatctcctcatcaaagaaaactccgttaccagtaatatcgacctcggtttcctctcctctcatcttcaagacttcaacaacaacaacctcccttccctcaaaaccctagacgataatcacttcagtcaaaacacttctccaatatggctccatgaaccaccgagcttgaaccaaactatgttgcctacgcatgatccttgtgctcagagtgtagatggtttcggcagcaaccaagcctcctcaagccatgatcaagaagtagcagtcacagactctgtagattggcctgatcatcatctatttgatgattccatgtttccagacatttcttatcaatcttaaggtatgtatgtatgtatatgtttcacaagaagttgactggatttgtttggtgtcgctctgcatgtggttctatatctatatacgatgattcatgatgtgtgataatgtcttagaatgtagtacatgtgttcttatgtatttctcatacatgttatttgtgttcttatagaacattttatatgtttgaatgtatcttcattaccttagtatgtagagagaccaatcaacgattgttcagataatcatttctagattgtgtgtgatcgattgttatgtcacgtgtctcttctagaaaatcgtaattattttggttatatttttttttttatacacgtgaatgatcttttgataagttttagagagtttttagtattcatctcgacaatatttacaaaggttggatcgtagggttggctgattttatagctataaactaattggattctcagttttttcttcacactttttgcctcttaaatttccaccataaactttgataattttttaaattacaacatgtactttcggattcatccttaaacatacatttccaattgaaccggtcattaaaccgggattaaccacaaatccgcgtttactgtaccacgattgcgatttacccgattaatcacctatatccgttaagaaaagggttggttgattttatagccataaactaattgcattctctgcttttccccctatactttttgctcctgaaatttccaccataaacttcgataattcttaaaattgcaacatgtactttcagattcatccttaaaaatatgtttccaattgaaccggtcattaaacggatattaaccacaaatccgcgtttactgtaccgcgattgtgatttacccaactaatcacccacaccgttaagaaaacaatgttgttttgtaagcctacaatggagcttcaagaaacaccacatggagccgatacaatcacactcacacaaagaagcaatctatgtgatcaatgagagtagttctagttctttattaatttagattgtcattgaaacaatcttcaacctcttttgtctattttggatgacgtattttcggaagttgattctctttaagatgatattatttaggttgactgattgatttgaagtttaatctatccttatgattaggagttttatctagttcgatttgtcattttccttaccaattaacacaacacataaggatacataacataacaaaacgatgcgttttcttaacgggtgtgggattagtcgggtaaatcacaatagcggtataataaacgcggatttgtggttaatctcggtttaatgaccggttcaattggaaacatatttttaaggatgaacttacaatattaagaattatcaaagtttatggtagaaatttaagagacaaaaaaagtgggaggaaaagctgaaaatacaattagtttatggctataaaatcagccaagaacttaaaatttttttgttttaacacaaatttctcttcgacaagttctcatgatttttttcgaagaatacagagagctatgagaacgttatgttttacactgggttcagaaaagcccatccaaggcctgttatcataattggctaacaataaaaagatattccaaaaatggcgcgtgattcattcgcggatgcatataatgcgaaacaaaaacttcattcatgtttgaaagtttgaaaccaaaacaccgtttcttctgctttagagtgtagatcacaagattcaatcaaaacaattaccttaaaacattatttttagagaaaaacaaaaaatttattaaaaaatttatttataaaaaatcttaaaacctttaaatttatatataatatatgaaaaacatgttcaacttatagttataacattaaaacatacgaaccaaaacgaccggatactatatccgatttgttttcaatatatttaaatttaacacttaaaattaccataaaacatgttgacttatgacaccacaaaacttgtgaaatgttgaattttctaactagtttacatcaaaaataaaaatttaacacttaaaaaaaaaagatatcatttttaaaaaacatcaagtgctaaaaaattaattatgtgtaaaccatattaaacctaaaacacctattaatctattatggtttgaatgttatatatctaactagtttacacaaaaattaaaattttaacatataaaagaaaaagaaaaaatgataaaaccttttaaataaaaccaagtgctaaaactttaattatgtgtaaaccaaattaaacctacaacacctcttaggggtttggatgatgtgtctaattagtttacacaaaaattaaaaatttaacctttaaaaaaataaaaataaaaacctttttaaaaaaacaagtgctaaaactttaattatgtataaaccaaattaaacctaaaacacttcttaggggtttggatgatgtatctaattagtttacaccaaaattaaaattttaacacttgaacaaaaagacaaaacattataaaaaaaaccaagtgctaaaaatttaattatgtgtaaaccatattaaatttagaacacctcttaggagtttggaccatggttaaatggcgggatccaaaattcagatttcacaacatcatattaatttaatatttataaaactttaaaaaaaaaaaaaaaatcaaaaacaaaagagttaaaaactttttaacaaaagaaaataaaaagtaaatgttaaatataaagatgtgaaaacatgttggatttgtggaatcgctaatgaccatggttaaatggcgggatccaaaattcgtttagatttcacaacttcatattaacttagtatttataatacgttttaagaaaaaagagataaaatagaaagagttgaaaactttataaaaaaaaataaaaaaaatgctaaatatacatgaagatgtgaaaaacatgttggatttgtggaatcgctaatgaatgacctaaatgccgggatccaaaatctggttagatttcacaacgtcatattaattattaatttagtatttataatacgttaaaaaaaaaaagttgaaaatcttataagaaaaaaaataatctaaatatacatgaagatgaaatgtgaaaaacatgttggatttgtggaatcgctaatgaccacggttaaatggcgggatccaaaatccggttagaattcacaacgtcatattaatttagtatttatagaacctttaaaaaaaagaaaaaaaatagaaagagacgaaaaccattttcaacaaaagtttataaaaaaaaatgctaaacatacatgaagatgtgaaaacatgttggatttgtggaatcgctaatgaccacagttaaatggcgggatccaaaatccggttagatttcacaacgtcatattaatttagaatttatgatacctttaaattaagaaaataaaataaaaataaatgctaaatatacatgaagatgtgaaaaacatgttggatttatggaatcgctaataaccacggttaaatggcgggatccaaaatccggttagatttcacaacgtcatattaatttagtatttatataaaatacctttaaaaaaagaaaaaaaaaaagtttaaaaccttttaacaaaagaaaataaaaaataaatgctaaatatacatgaaaatgtgaaaaacatgttggattattggaatcgctaatgaccacggttaaatggcagaatccaaaatccggttagatttcacaacatcatattaatttagtatttatatagtacctttaaaaaaaaaaggaaaaaaaatgttgaaaaccttttaacaaaagaaaaaataaataaatgctaaatatacatgaagatgtgaaaaacatgttggattattggaatcgctaatgaccacggttaaatgacgagattcaaaatccggttagatttcacaacgtcatattaatttagtatttataatacctttaaaaatagaaaaaaagaaagaaaaaagttgaaaaccttttaacaaaataaaataaaaaataaatgctaaatatatatgaaaatgtaaaaaacatgttggattattggaatcgctaatgaccacggttaaatggcgggatccaaaatccggttagatttcacaacgttatattaatttagtattgttatataactttttaaaaaatcaaaactattactatgttatatgattttaaaaaaaacctttgatatttattactataaaaaaaaaaaaaaaaactattactatgttatatgatttaaaaaaaaaaaagtaagaaaggaaattatacccgaaggttgtgaaaccctaataactcgcgattccttgatctccaccgctggattcgttctctgttttcctctgattcgcgtcctcctccttagtcggagctttctctcccaaagtaattgcgcaagcgaatctcatacctccaatccaagccgatatgcaacatgaggctacaagagatggcttgccgagaacgcctcgtaagacgtaatcggacggatcgttgagaacaaacgtggtttagtcgccgttaaccgccgccttggcttcaccgactcatcggagagaagtgagatcaactcttatggatcatcatgttgcagaggagatcatcatcatcatcgacttttcacttcttcaataatggatcatcggaattcacacagagtctctgtataaagagattctctcaagaagaaaattaaagaagaagaagaagatgcgtgaatcagagagtttttgatttttttttttctctcaaggaagaattagaagaggctgcgtgtgagaatctgtatttataagcgaagtgttaattaggtcttgatctataatgataaccgtttgttcaatgtagccgttggagtcggttaatgactttgacataagcagatatttgtattgaatattgttcttaatttccttttctttgaatgggctttttttccttttttcttcggatgggttttggttcctttttttttgatgaattgtaaaaaagttacgcagagagaagaagcaaaacaggaatagacttttggtgattactaatgcagtgcaagggagactctgtctacttggtggttatgtctcttgctgaagagccggtcttgtttagagcttttggttctgttgatctgtgtttatgtaatcacacacgtctactgtttggataacccgagatagagtaaaaactaagaagacaacagatagagatgatgatcctgaatcaatatatcctcaagcaaactgttagcatatatggagatgatgttgcaaaaccagtttatgtagcacaagcaagcagcagattctgaaaatttcattgatacaagttacaaaggacattattatgttctgtcacaaagtttcaaacatttggatcgaaaacgttacaacataaatacacaagtgaacattataatggcgcgtgattcattcgccgatacatataaactgcgaaaccaaaacttcattcatgtttgaaaccaaaactagttgtttcttcttctactttacagtgtgtgattcttctatcttttgaatcaaaagtattttttgtttctatcttccaccagataattcaatagcatcttgattattaatggaatcttcaccccaatcaaatctcctctgcaacctctgaaactcttcttgtctcgtcacttcaagattctgccactcttcccatctctctgcaagcccttctccttctagcattcttactacttccgacatcgctggtcgttcttccggtgctgcttgtgtgcatagcagagctacttgtatcatcatttcaacttcttcctttatataatcctcatcaagcttcttatctactatgtcttctaatctcttctctctttccagtttcttcacctgaaacctaagattgttatttaactatatgagaagcttgaaaagaagcaaaaaagatcaacattacttacatggtctagcaataagacatcatcttcttcctctaaccgcgagaaatcaattgctctttgtccagttacaagctccagaagcataattccgtacccgaaaacatcggttttctctgacgatttccctgtggatatacattctggtgcaatatgacccattgttcctcggacctgagtggttacattagtccttctaacatctaccaacttggctaaaccaaaatcaccaaccactgcttcaaagtcttcatctagtaacacatttgcagctttcacatctctgtgtatgatcttcgggttgcaatgttcatgaagatattcgagtcctcgtgctgcacctaacgcaatctgtttcctcctgaaccaatccagaactggatccccgggtttaatctctgcatagtatatagatcacaaaatcttaaactcctgaaatcaaaagtttatagcttatgttcctttttttacctcttaagcaatatgcaacacttagattctgcatgaaaggatacaccaaaagtcgttcagtttgtgttgtacaaaagccgataaggcgaagcagattcctatgaacagctacacttatcatctcaacttctctctggaaagcttcatctcctcctggacgttcaaaatcagtcaatctttttacagcgactttggtgccatccgaaagcaatcctttgtaaactttcccaaagcctccttgtccgagaacattcttttcactgaactcatctgtagccaactgaagctctctccatgcaaatcttctcaactgtccaaaagcaatccttctgtccacttcacctgaaatcaaaccttttttaaagttcgttcctatgtaaccataaagaagaaagattgattattgtcacagacctgcaacatccacaaatacgtctcgtttatatcctttatgtttatccttgcagaagaaaaagaagaagaatcctagtagaataaccgctattccgctaacaactccagcgatgattccagtttttctactgcttgaatcacctatcagagccaaataaaaaacaactctcaatacttagcatctctgcatatggaagtgggcaatagcaaatcattgtcattttacctgaaggactggactcggttacacaaggttgcgggaaagtgccaccacagctcaagttgtttgctgtgaaactataaatttgaaagactaaactcagattagtggtaaagataaatcaagactataagtatttgtgtttgaaaccgaaagagctctaacgtacttgtattttgggattttgaataaactctgaggaatctcaccactgagattatttgagtcgagcagactgcaaaagtagttcaagcaacagcatctaagacacttgagagtgttttttcgaacaaatggagaaaagaactagcacttacatatttatcagttttgatagacctgtaagtgaatccgggatagaaccattaaggttattcctactcaaggtcctgcttggccaaacagagaaacaatgatatgatcttcattctttgtcctagagatctcaaacaagttcaaagacacttgtgggggagaagaatatacttacaagaactgtagattcttgagattaccgagagtggatggaatgcgatcagttaagtgattatcctccaaatctaagctggtcaagctagacagatttccaatggattctggtattccacccattattccatttcccttcaatgtactacaagcgaaaaaataacacaacagaaaatttcatataacaaaacacatgtaacagaactttccacaagttcacagttccaaagtaggcacttacagagtcttgagagttgtcaagattcctattcctgaagacagtgttcccgaggagaagttcatgtaagacaaggttctgcaaatcacaaccatatatagttaaaaccataactaaactgaagttttgaccaatttagaccaagtaacatgaaacttacacagaagtaacatgtttcttgtcatcacaaataacttgagaccaagtacaaggatcgacttgattctggttccaatcactaagctgttcaggagatgcacgtaacgagctcctcaacgcaaataatgcatcccctaataacgaaattgcaagagtttaacaaaaaaatctttactttgacaaacttagaaaccaccaaagagagttatgaaggtgaatgaaattaccttgagcatctggtgacacagatgaccataaactactaaaaactaaggcagtgataataagcagagccatttttctaagagctaccaaaattgaaaacgttggattctctaagaaattgtgacatctacaagaaacctttgaaacaaaagttaaaacatatttttaagtttgtagattagatagagtggatttactataggaatccgagactttctaaattcaaaattctacaatagtaataaaaaaacgaacttttttcagttacccaaaagataaaaatccaaataactcagagaattcttcagttttcacggaaaaacagagatattgaccccaaatctcaagaaaatttgagaaactcagatttgggaacagcaaaaagaaaaagaaagtgcccaacaaaaaaaaaaatcgatgcggagaagaaaatccaaaaagggaaagagaataattccagcaagaaagattcactcgacgaataaaaccaacaatacttaggcttggatggttccacttcggctagttgaaaactctttaggaagagaaagtaaaactgtaaaactctgtcttttacaaagaaaaaccaaacttttgattttctttcttcgtttacatttgttggagctgttgttagatggaaaagtctttcgaaacaaatcgcaattatgacagtcgttgtgtccagtcagagttgagactaaaaaagccgacattcgtcgtaaaactgcttttcgtgcgtgattaaaataataattaatcatgatgatgctttgactgtcattaacaaagaaattaagaaaatagaataaaaacaataaggccttttcgacaactggaagaggcccaaaagcccaagaaaatctatatgataatcgttacttgttgattacgaataggtttggtttatgtccaaactttttaacattattcgtcatcaagaactttcttattagaaggaaaaaaactttaattcgaaacaagtgaaaattacaaaacccaaaacaatgatgataatacagctacgtaaccacagtgagtttctccatacagtgttatcgctctcttgacttcaaagagtattgtccatacaaaacttacacattgtcattacgtctgtttattgaacgagtatctgtttgggtgttgagggttcctctgctttatttttccgttgttcactaggggattgcttgctactagtactgctctcaaacagcttgctgctctttgcgattgtaaggataagctcgagttgctttcgctgttgttcctgcatagcaaagcaagcaaccagctttcatgagctcaaacgacactagtatggacttcttcaattcagccatggcaaaatcttagaagatacccttttacacactcaaataactaataccaaaacaaatcggatcattggttaatagataaatacctgcatagcaagcagcaccttttgaatttcgccaagctccttctctagaatctcttgctgtgcaactaataccctcgtagcctcagaattcttttgagctaaagctgcagtcttttggacaaaacaaaccaaactcttcagatacatacagccacaaagacagctatattgaccagtcataaactcaaaaactgatattttctgcaagattatcctaaatctccaaaatattgattcaaacactagaacatttgttacttcctcagacattcaacaactctagatcaattcccaaatcatcacttgttccactttcatgcaatttcactcacatagtgacatagagaatgggacgttttcaatggaatcatttgatgaagcaaagctcgagaaagagaacaatacctcagaaatgggttcctttagagcttttcgtgtgacccgaaaccgaattcccagcttctccagatgcctagaaagaactctaacaatagaagtcgaactttttaaatccttttcaagtttctccaaccttcgaattagattagtcccctcactttctctcgcgcctttgcaaatcctcatccattgtcgtcgtctaagccaagaaccagtggcgactgagccaaccaatccaacgaaacctaaagacaaaacctttttcccaatttcaccaaccaccacgtaattcaccgcgagaaccactgaaatcacggcggatgataaaatacaaagcgcttccgcgaaagaaacaaagctgcccaaatcgaaaccatcggaactggcgtcttctagtaagttagaagaagagctatcctcgaatgatccgatagaagacgcatgagctctataatttcgatcgatctcgaaattcgactgggtagagatgacgtggcggaggaagataggctgggggaatgatatagaatcccggcgagaagctcgtgcggcggagacggcgaagcagaggttgctcctcctgctgatgcgaacaggagtcgagccggagaagagagcgtatcgagaaggaagcgataaggacattatcgtcttttcgggtctgtgacaagtgactggttaaatctcaggtcattgcaagaaatggctacgaccttgacgtccatcatcagaagagaacctcttacaggcgcatggtagcaaagcctcgacaataaaagtttaaaatgcgcggaacatctttggagttgatttgctaagcgaataaaaagagtcaacactttcatttaacagatttcagctataacccaatagtcccaattatataagcaacacttgatccaatcattatatgcatcatatcaaaacgatatgaaacttataataccagtctaggttcgaaaatgtttacgcgcaaagttctaaaaggcgaaagagccaaagtcataaagaaagctcaatgaaggatgggtatagccaatacacgcatccacactggtagcgaatcccttctatgcttaaccatgatgacggttttattggtacggcatgtaacgcataggccttctaaacctaggagcttttctgcaaaaaaaaaacaccaaaaagtgtgagaagtggataaagctgtgtgaccacaatcaacatatatgtcttgatgttaaaaccaacttacccgtatccatatggggaatacatataaggagacatgaaaggtctgcggaaccggtaacccatgtatggattgaatcgtctaccacggaactgtttcaatccaggaacgtttgttctcttctgcaagacctgaaattattttaagccagatgagaaaacgatggaatcataaggggttttttcatggtaaaaagtgttttgtttgatggtatagtaagatgtgtacctttaattgacgaccatgtagctctgattcattcagttgtagagcctcttgaacagcttccacttcgacgaattctacatatgcaaatccctttggctgcccgaatttgtctgtcagaatggtcacccgatggacagtgccgcatgtttggaaatgctgctgaacttcttcaggtgtgcaagcgtaatcaacctgcacagtcaaatatgcagttatagtatataacaaactagcataaacccatggagtccttcaccgagcacacaaagagtaatccatcaaattaattagttcagctaaacaagaaaacgtagcaaagacattcctcttttactatccttcattacacacacaccaacataaatatatgtgcaaggtaaagcagaacaataggaaagcaaagtggaatttagtatacttgagcagcctttgagttgaaaagatcccttacgctgtgtaccgagcataaactttatgccaagcttaattttatgttaccatcaaacagctgcttctcaccaacgcagctaatgagccttgactacaaagcatccagcatcttgatgcagcacttcaaacgctatctcctcgaggatggattgagaaatactccactcaaacattgtcccctctccagatatctctttttccctcataatcataacatttttccttctctatattgctctaaagcgtattcatttccttttctttattcttttttcatagctttattcaatgcttttttgcctcttttttttagcttttttcatcatgttccacaacaaaacagaacagatctttttcaactccataaaaggaaaatgtaaagaccccacaaaacctaattgatataacccagagcaattaagaacttcaggaacaaaatcctgcgattgtagtgagaaaaatcataagaaaagtaaaactcaacgccagaaaacaaaaactatagcatcctcaaatttgcacagaaaagttactaaacatatgaaattttcaattatatctgaaggctaaggttccaccagtaatatgaagactcaatctactttccaaaaccctcaatatcactaacaacagaaacccctcactagttttcatttgaagataaagtcttcacgctaagcaccaactttttaccattcaacaatttcatctaataagagttctcactgaatagacaagaatccatagcaacaaagatgtgacattacaccaaaagtcagagtaaactagtgatatattcaagcactaaatgtagagaatgcaatcatggatcaggaagagaacataatcagataatagatttctacgataataattctaacaccctagataaaaggttttgtatcaagagagctaaaaaaggcacaattcatagtctaatccaatgaacattaagatcaatacgagttaaaaactatgaaaataaagcagaagctagctaagatggcttaaagaaagaaaacgacgcagaaacataaatattcttacattgccaacaaaaactgatcgagcatcaacctcctccttgcctgcttgattcgctgcaatactagcaggatctggaataacaaaattgaaccaaaaactttagtcaagaagcaaaaaaaaactccatatacataacataattcacagtggaattctaagatggattcaaacaccaccaagtagctaccaattatcaaaaacctagcgaattgcgggaagcacgatgataatcatatcaaagaagcgagttatagcaaaaccaaatcaaagagacgaaaaccttgagctcccatttccttctcgaccttagcctgcatctcacgcagagcagcagcttcgtcctccatctctttcaatcgtttcttcatttcatccaactcctagaattacaacagcaataacacaacaatcaaacacatatacacgcgataacaaatcaatcgagctcagtcacataaagatgagcaaaacagtaagagagaaagagataatagtagaccttaaccgcatcatcatcagcagcagccatatccaaatcggggttgagagcctccatatctccatccatctctccgacgtctggaatttcaccaccgtaaacctcgtgctcctcttcctccatcgtctctctcgctctctctccgtcgcgacgtttgctttgttttcttctgaaaacgcttaggtcactttttgtcaattcggatagcgacacgtaatcaaccaaataacggccctttattataacttaatgggcctaataaggcccaattttaaaagactttttaacattcgaaattaccctatttgatgacatcatcacccaaaaacatgcgcctgacagaaagataattgtcgaatccgtcaaatctcaccgagccggcagaatccaacggttaatatttagacacgtcatcattaattaaaaatattgactaatagttgacaacgacgacaatacgaccgtatcagatctctctctgcgtttaaaacttcaaaaaagctcacttttcggtaaaagcttaaaacagaggatttagcaagagaggatttagcgagagagagacgttgaagaagatgactagtggaggaggatacggagatccgtcgcagaagattgattatgtgttcaaagtggtgttgatcggcgattccgcggttgggaaatcacagatactggctcgttatgctagagacgaattcagtttggattctaaggccaccatcggcgttgagtttcagactcggacgcttgttatcgatcacaagagtgttaaggctcagatctgggataccgccggccaagaacggtaatctccgacctctcccggaacttttagctacttcaattgcttgaacttagatctcgtaagattttactgtttctctagatctggaagatgataggtctgcttaggatttcgaattctagtaaagcttactgatctgtatacgaaattgggaggatctgaagtaaaatggtagaatcattgagaatttgggattgggatttcaaaattatgtatagactagaattatgtatattactattccaatgttattaagcttctataattttatgattggtacaaatttggacacttttgttatacatttcccagtgatgcttcatcaactttatacattcactgatctttaatgagtaagctaaccaccacatttcatgcttatcatatgcttacattgtatatctttctatatgtgtggtattggttgaaacagatacagagcagtaacaagtgcatattaccgaggagcggttggggcgatgttggtgtatgacataaccagacgccaaacctttgaccatatcccaagatggttagaagaactacgtgctcatgcagataagaacattgtgataatccttattgggaacaagtcagatcttgtggatcaacgagctataccgacagaagatgcgaaagaatttgcggagaaagaaggtttgttcttcttggagacatctgcatttaacgcaaccaatgttgagagcgctttctccacggttttgactgagatcttcaacattgtgaacaagaaaagtctggctgcgagtgaagatcaagagaatggtaatcccgggtcgcttgctggtaagaagattgatattgttccaggtcctggtcaagtgataccaaacaagagtaacatgtgttgtaactcttagataaaccaattcaattcttgaatgttacttgataacaacaatatatagatgttttaaagactctgattgggatatttctcctatctagagctgtgtgattcatttgttgcttaatgagcagtttttgtggggttttggggtgttgaatccaagtataacaaaccgatcttaatttgatcttaaaaattggatattaatttgatcaacatgtttttattctctctacatttgtaagattattgttacatttttgttaattacaaatatataccagcaataacaacttttctatttctcttgttacgtcaatgtgaaaaagtaaaaattaaaaactgaagcatccgattttaataattggtatcacagttctgataaattctcactcggccgttttaccactcgattgctttattctctctaatttcaggtaatcttcgaatcctgcttgattcttcaatcttgtatgatttgatcagaaagttcaggattactgatctgatatgatgtgagaaatctgcgtaccatcggcaatggattgttttacgtgattagaattgattttgtcgtgattgttacttctctttttagctttttatggggatgacaagttttgcattgcctcctttggttagtaaactcaaatcatatgtttcttatgcagcaagttgtcgatttgaatgaagaaatgaaattaattgattaggttttagataattttgctggagagtgtagagaaagagagagatccaatggctggtgcagcagcatttgttgaagctgataatgcagaggaaataatggcaaggatcgaaaccaaatcgcagaagattgaaagcttactcaaacagtaataaccctaaagttccttttttcttccaactttctcagatgacctaggctataattgttacttcgttttattcagctacaaacatgtcgaagctcttaaaacggctcttgatggttcgccacctaaaactctcgacgaacgttgcaaggtcctactgtttcctctaccatgcacataagtagtttgttcatgatcaaaaagattgtgtaatttatgataaatatctgtgaaattgcagtcagctaattggatagttgtgcacagagctatcatggcgataaaggatatcgaaggaatgttaaattctcttactgccgagtattacgacattctcatgaagtaagtctcttgccttttgctctgctagcttttaattagcgtgatgtggaagcagtgttttgtttgcttaaatggtgtggatcaggtacttgtacagaggtctttcgactggtgacgaacccacatgcgaacagtgtttgatgattcacgagaaactaacagagagagctggtctcggttgcattctccgttgtctgagtgatactaccaataccgtttaaaccattaagctgatcttttcatgttacttttattcttgttttctatgaatgtttctcccaaatctcaagttacttcaatagattatagaaagtggaataaaccggagaacctaagatcctttcacaaagagatagtcataaaagaacctacggttacctggttttaaattatatctcataaccaggaaacttagaatctaccggcgacacaagatcgaaccagaggcatactggtccagctagtccccggaatagcgaataatcatgttctgtttcttggcttgtcatattcacgagctctatcgcatcacggcacaagtaactcgcaaacgcttttgctctctcttcatatacaacatctccggttaagcgataaagggataagaaagcgtaggcattaccagcaactccatcagctaaacctaccttcttcaccaagccactcttccacactacttctcctgcttcaatggctgcttcgcggaaatccctttccttgggaaacacctgagatgctttagccaaagtaatggccatgccggttgctccatgagcccattggactagcttatccctcggattcccttcgctgcacgggtagtttccgctgttcggaaacctattactcatcatatacctcaatgtcccttgaacatctttaacatcctcttccgatagtggaaaatgcagcaatacatacaagattccagctaatccattcgcagcaccccaaaatcgcgttccgtgaaacctaaaagccacaaaagtaagatcaattcctactaaagataaacaggattctcttttaacaaactatagctattttgtgaaacctgtataacagaggacaagcttcatgatctgcagctccaactcgcccaccggctaagatggctgcaacaatgggtgataagagatggtcaggaacagttccttggccgagatatcggtttaggaacagagcagcccaaaggaaacccgctcttccatagagaaggtcatatgacatcccaaatcctccttcctctggtcctgctggtaactctctctcttctgcaagctgcttgtaagaataacaaatcttaaaggctcgtcacttcactaatcttgcttaagggttaatatatgacacgttggatcaaaatactgaatctatagcttttatctgaaagtgttgtaagcaaaagaaatggtgtatgaagtcaaaaagattggaacctcaagaaaaagaccgaggaagaagtcacgctttgattggtcccctctgtaattggctacaattgcaccaagcgtacaaactcctcctcttccacataaaaatgtcacgtgcctattcatgagcataacaagtccaataatttgttagaaaatgacaagtccattctaatgggtgtgtagatattgttattattccagaacctgaaaattcgttcatacatacataattttctataaactataattggttaaacagtgacatctttgtaatgactcaatctcacacatgtgttttctatcagacagattttaattaagaatattctttaaaatggttagattccattttttttttttatggaagatgatatttgatgtttacttggctaagcaacttagtgacgaagatattttcacctggttgtggcacgcgcaacgttggcacacgtgtcgattatctctgcgcaagttagcagatcttgatggttccgcgttacctcgtacgacttcaagcaggtgaacgctgtgccgagtagtcctgtgtacacagtcggatccagcactggacccgaaccagaggcaagagcttcgacaccacctttccacgtggcctccacaacctatacatacatcgaccaaaaaacatatatgagcgaacgtacggactaggcttacattagccgtctggggcgtcgcatagttatcgtaacgcacctggttcttgagtaacgtcgctgctctgaggaaagattccgtagggagagaaatagtcggagccgacggttcggaaagcaaatgatcaatttcgccattctttactgtctctccggcgccgttaccatcgtcgccgcatctcccctgttccgtcacgaaatccaccgacgacgacatagctctcgcctttgtgtctctgtcttactctt

SEQ ID NO: 965 - DNA, 88356 bp, Arabidopsis thaliana
gatcttgattgatatcttgaagaaagaatcaaatacgggagttatatttatttgtagtttttataacagccgctatttatatagtttctgtttttttatttatctttatttattttagttctattagaccaaataaaattactgtaatggatttttcttcttttaaaagaaatttgtgaatcaccttttagtttagttttggtataaaatattttagtaatttatttggattaattcagtagttaataaatatgttaggtacttgagtatgatttttagcagttccacacgtgttttcgtaattttgtgcatttgggtataggacctaccagtctttaaaataatgacttaagcatcttggaaaataaatgtgatgcttctattaaagtatcaagaaacaaaggaaaagctgaaagtggggtttagggtattggattctggttgcaggacatgaccgtaatacacgtgaaccggtagacagagcctaaacgtgtcagcatcttgtcggctctatcatttttacgaatcgatttgccgttagatctggcttaggggatatggcatggactacgaacgctcgatgttatatacctttataaataaggaataaaaaagtgcagagatttgagaatctcatactatatcagacgattaaaaaactaatcgaatatgtaatgttttagttgataaacggatcaattagttatatttttaaaataggtgagtgtgaacgcgtcgaaatgtgtttcttgtcaatttacgaattatacatttggttagatagtcacttattgaacatgaatcagtgtattagctgctgacctgtaaacacgtttggaaaacgtgaatcatgtgatattctttcacgcgtgttaattaaacacctaaaccccgtatgttgtaaaacgcatgtagtctctatagatcggacggcccatatttaattcatcaaattatatttgtaggtgtaaccaggcccagttactgaccatcaatatcaggctttgtaaagtgcagcccagttcctagaggcctaactttgttgaaattcattttattcaattaaaaatagtggagttttttttttaagacaactaattaataattaattatgaaaacccaaaaaaaacaaacagaaaattcaaaatttcatgcgaaaatgcgcagcatgatatcaaaaacttcgtgcttgcgcaagaattaagcattttcattaaacaaaaattaaaaaaaaatgtgttccttgactttctgaaacaaccaattaccttacaacttaaaatcatatttatcagagtactaatggattaaatttgacgcaaacaaatattaattttagatttgatggttgaaattatttaatattaatcagactaattcttctcaaagtctctcaattctcaactctcaccaaataacgaagataaatatttacgttttctttttaaaaaagcattagagcgtggaaaaagctgcttcttcttcttcgtcaatgaaccgaaccgagatcgaaccaaggaaacgaaactgaagaacgaaaaaaaggaacaacaaactagagagcgaccttcctcttaccggcgcgttactctcacgcgctaacgtacatatagacgagtcgagcgatctcgcagcggcgtttatcgataccctaagctcgtggttgtttcagatttttgttaattgaattctctgcatcgagatagagggagatgtgggttttctatctgatctcgttgcctctaaccctaggattagttgttttcacgctccgatacttcgccggaccggagattcctcggtacgttcttatcaccgttggatacacctggttctgctctgtctccgttatcatcctcgctcctgccgacatttggacggtaagttttactttccatgttttcagccaatacggacttgtgcgattctgatcgaattggcctttacgagcttacgattttgaatttaggagtcgtcttacttgatttggaattgaatcgtcggttataattaaagggttctttctgatgcctggaagtttcataggatcatacgttgaattgagatttagctgaagaatgtggtgtttgaatacggcttatacgcatttgttagacctatattgaaattagtatttagtggtgaaagagtttgaaatactcactgaaggtttttaagcatgaagcttagttgatttggtagtcaaacaaattgtgtttatggatagatagctttggtctctcatggttgtgagctgttgaggaatgtttttgggaaagtttcaatggtagctagattttggttgccatgtatgatttggatgtaaaccaaactagaataactaggagatgtctcatatgaaattgttttgcttcatttgtcttcttatgttctgcagacactatctctgcaacctgatcatcctgagaatggcgccatttccttcttatggagttggtcatactggagtacgtttctactcacctggtatgaactggtcaagcttttcagtgctttttacctgacacgtcttcccccatattttcagaatattgtgtctgtcttttgatcaaatccaatattaggtggtgaaaccagattacttttgaaaatattacctagttaacatgacaggacgtgtccagtgtaggtcaaataagttcatctacatggttgttatctttaaggcgtaaattttgttttgtttggcagtatttaaaatgcactcacacaatccatctacattgtttttgtagcttatagatgtacattacctcatatattaaactatgttacctctaaacagggctgtggtgccccttattcagggtttcgaagatgctggagactttaccgtgtctgagcgattgaagactagcgtgcatgtcaacttagttttctatctagtactgggattcattggtcttctcggtcttatccttctcatcatgatgcacagaaactggtaagttgtcccttatgatcggatatgcttatatattggctttgcatgtcataccttgttattagctcttctattaaaaaatgcatgatccaactgctaagtattgcaattgctcatctgacttgctgggtttagaaaatctgctgccaaatctttctcaattttttctcgggtggaagttacattcgttcctggactatttgactgagacattcttgtacgctaacaggacaggaagcattttgggttatgctatggcatgctcaaatacttttgggctggtcactggtgcatttctccttggctttggcttgagcgaaatacctaagaccctctggaagaatgcagactggaccacacgccaaaaagttctctcgcacaaaattgctaaaattgctgtgaaacttgataatgcccatcaagaactttcaaatgcgattgtagtaagtattatctggaattaacaagatttcattctcatccgattagatatgccctctctgcttcaaacttgatttagaaccttagaccatgacataatcagtggtgctatttaagatatagggagatattccatttagcaggcttgaattcaaattaacttcacttcacgtgattaagtaccttagagttttagcaatttaaataacttcacgttgtgctccctccagaaacgtttcatgtattgttttcttatcagactgtttatcacttcataaccattgccttgctaggttgctcaagcgacttcaactcaaatgtccaagcgtgatcctatgagaccatacatgaatgttatagatgctatgctggctaaaatggtaacttctatatcccactacccccttaggttgtggacatacattgaaacttctccagttttaatgatgatgctctatacagttcagggaagacccatcatttaagccacaaggtggtcaattgggcgaaaatgatatggactatgacacagatgagaaatctatggcgacgttaaggcggcaccttcgaaatgctaaggatgaatattatagatataaaaggtatagaaaggtttctattggcactgtcttaacttctatgttactttgttaggaaactcgttccattgatagattaagttactgtattatatagaaatatttagtaatgtgtcactatggctgtttgcagtgaatatctaacttatgttacggaggcccttgttcttgaagatacaatgaagaattatgaacgtcgtgatgcaactggatggtcagattttcagtcatttcatctctcatacagtatacgattatctctttcgttattaacttaaacaagtttatgatacctttcacctgaagaatctttgttgcaccgtatttcaggaaatacatttcgagcttcagagccactcgaactgggaaaatggggaatcttctcgattcattaggtaaactctttatatacttttgtactcattctctcttccgacctgctgtacgggattactgaagtggaaagtttcatgactatacccactttgaaagaaaaataaaagaacgaacgagaacatccctgaatatttttgtacattgctaccattggcagaatttatgtggaggtgtatattgaagaaacaaattcagatggtgttggcagtagttatggggattatgtctgctgcaattcttttagcagaggcaactctccttcttagtaaactggacttgtccctcttctcaatacttataagctctgtgaaatccgatgaactgctagtgcaggtatgtgtacttttacattttattcagttctcacttcaatggagtggcgtgatatcttgttatcttagagtagcaaattgtttcgccttaccagtaaattcctcttcaatcctgatcattttgctttcaggcatttgcttttgtacctttggtgtatatgtgtgtctgtacatattattcacttttcaaaattgggatgctgatgatttattccttgactcctcgacaaacaagttctgtgaatctgctaatgatttgctcgtaagtgaatatctatccatcatttttcttaaataaaaaatttacatgcttatagctggtttatatgtatctctttaggatgattgctcgatatgcgccaccaatatcttacaattttattaatctcattcaacttcattctgagactatatttgagaaggtatttctttttatctctccctttgcgcattttgttgtcttcgaaatcttaagagacatgatatatatgtgcttctttgcaatgtttttttcatttggttctacagaaaatgggtagaatcgatgatgctgtcccggtctttggacaacggttcaatgagatctatcctctcataatggttatctacacattgctagttgcaagcaatttcttcgatcgcatatttaattactttggtagctggaaaagatttagatttcaaacagagaccgaagatacggacggatttgatccttcggggttaatgattcttaaaaaaggtaaaaacactatattgatctttttctgcattgagatttgatccataacccttgttttgaattcattttccatttataataatggttagaacgaacctggctcgaagaaggacaaaaagtcggcgagcatgttcttccattagcgaggaacttcaacgatgttgacattgaaccaggaagcaatttctctgtaagtagtaaaacccataacatataaaagcggagctcatagtacttgttccaaattctgactatgatatttgcaggaaaattcttctgttgaaatgaagatgtcgtcgagctatgacatagacacactaaaaggaagttcatcaaaagacgatatgtcccgtaaatacggatcagctagagaagcaatcactaacaaatatgcagccattagagaacaacagaacaaacactcgccatcttctatgacaaagccagagaacatggcttcagctaaagtgtccttactcgaaacagacaattcaggtccaagtaacggtcaaggatctggagagccatcttctcgtctggcttccacatggcgaaacatgaaactaggaatccagagttttaaagagaatgtagctaccaagaagtttcttccattaagacaaagcccagaaacaacagcactaacaagcacaagagtagtgacttcatcagtgccacagtcgctagatgagatattccagagacttaaaaaccggtctgtagaacacagcccctacctcgatgatgatgatgaagtttgattatgaagatggtgttcattaatgatgaaaatttaaaagaactccattttaacaccagatttgttcaccatagtatataacaacaattttacaaaaaacatctaatttgggagttggaagggtccattttttgtgttgtaggtttttatatgttacctgttaatgacatgttatatacttttggattatataatacgatatacataaagtactcggttcattttaaaatccgtgatggattccatgttaatacagatattaatatattatagatgtcttatatgacaagccacttatataacacgtaagtttttttttttttttggacaaaataacacgtaagttaagtcatgaaaaatatactttaagatatgatcaaaaatactgattgggtttgtcaatcccaggaaacttcatagcttttttgcttctttggtcaatattcgactagtaacaagttctttaacaagaaataatagcactaattggtagtttttttttgcctttctagccaatattaacaaaaaataatatattatagatgtcttatatgacaagtcactcatataacacgtaagttaagccatgaaaaatatacttttaagatatgatcaaaaatactgattggttggtcaatcccaggaaacttcatagcttttttgcttctttgttcaatattcaacttgtaacaagttcttttttttgtcaatcacaacttgtaacaagttcttttttttgtcaatcacaacttgtaacaagttctttaacaaaaataatttgtagtgttttttgcctttctagccaatattaatctccattttcattaatgagaaatcactttcattattttcaccattttactttcttaatctgtaactgtacacgtcaaaaataaaagtttcaggaaaaaaagactaaagtcggtcatttaataaactcgttgccgtgaagtaacaaacccgccgacgtcggcgccaccgcctttccctttaagatgaagcaacttagtccaaaacccagtcttcttcttaaccgtcgtagatttcaatttctccgtcttcttcttcgtcaaatccctaacaatataatccttgggaacatgagccatagatctgcttttcattaatcctccacctaaagcttcgatcagattaccatttaaagcttccctaacagcgaaagacatcgacatcgaaccagctctccgatgatccttcaccgccggagacgacggagaagacgaaacggtggtggatgaagaagaagaagatctgtgaacgatgtaatacgacgtagtattaggtaatcgagagagtttatctcttaaacaacaaggacaaactcctctgttgccttggtggttgtgttttctgcattccatttttctatcttcttcgttctcttttttttcttcttctttttacactttgatttgctctcaaagaggtttatgtatgtgtgggttatatatatacacacgcatgtgcacgtgtgaagtattgccacgtgggcttcaacgtcggtataaccaaagaaaggtcattaaggtttcgctatgttgacagggcttttcgtagaagacgcagttatgacgtgtaaaggaccacttatataaaaaaattagtcaaattactgtttctcttttctttttacgttattaaaagtgattggttttttgcttttgatcaattaaagaacataatttagaaaatgattgttttatttttttgtcaaacttaagaaaatgattgttatctttatactgaaaatatctgaggaaaaaaatctaaacaactgatatttgtcatataatgatatttttgtaaagaaaatcttaattgataaaaatctatattattttatactaaatgtatgaaaaatatcaatagatttggaatttaatttagtatctatataattttggatttacttactttttagttttatttttatttcttaacttatacagtttcatatttacttatttttagttttcatttaaaagaaatttacagctgtttgcttttcttttttccaaatttttttaaaacaaatctaaccggaagatccatagatttttgttatttagcaaacaaaaatgtccctagattctatgtacagttagttaacgaagattatatgatgggtgatgtaagtgagagaagtcacaggccgtgacactaataacaactcaattttggtttcacaatttcccgattcagacgcgaaatagggtcaacaaaagaaacgcaaattaaaagcgttgatagcgatggacggttgggatttaaacaaacactcaacatgctacggagcccacttgttaggtatcatctgacggtgaccgttggccggtggactcgggactcgcttctaacgcgtaccaaataataataaaacacactcgtgcgcattcatttttttactatctcatagtattttcttaatttacgtgacttttgattttctgtatattaatagtttcagttttgtttcttgaagaatggtgcgccgtatgctttcaatttcgtgtgcacgtgagagtgtagtcaaaaagaacgaccaaaatttatgggaaaacgaagttattgagaagaaaatctagaagtttgtacggttcatgatcgtgggaatgagtgatgggatcagattacaaagtagatcctcttgttttataacttaattcggataaacactatttattccatgaacctttcttgacatttaatgatttaccaattttttttattaatatagtatcttaaaacatgttctatggacctcgtggtgttgacgaagcaccaaaaaaatcaattataatctggtaaagccacttcacttttcacgttaatgtttctacgtacatatattaaatatataataaaagtgattgtgttgataaaagatggaattatataagatcttatgatatacggagcaagtataatacattagtgttgtgacttgtaatagtgatgggacatggaaattactaaattaggccttttggataacagaagagggagaacatgacgataataataaaaagagggtgaacatagctcaaaaccaagttaggccttttggataacagaaggaggcccaaagaagcccaagtaaataaaaacaatgcaaaaagaaatattggggtgagagaggctcgaactctcgacctcaggatcactcactagctatgagacctacgcgctagccaactgcgccaccaccccaatgttgttgagtaccgtaatattatgtattttttacccctattttccataaaaactgaaacgacccttaaggtactacttctcgcacagataaaaggtaccaaaattatacacaagtttctagtattgttcaaacgagatactttatgagttcccttagatattatgcattaaatatcacttaatttcaccttttagggttagttatccacttcgtctgaaatggaccaacttgttacacattaaatcacactgtcacatggagaacagcaagcgactattcgaagataatgtatgggttaagtctctagtatctagacgggtaaacatgtggtctagttttttcttccttatgcctctaacagtaagctgaaagcgacaaaaatcacatttaatatatgcaagcaatttatgggacctgaattattcagccctaaattaaaaagcacactaataaattacttgtttattactcaatgatgatcagttgtatttcaaaccaactcatgatggtttagctgttgagaaattcactacaaaatcaagagttcatagttttgaagcgtataattgcagttttgaatgttttaatcacaaagatatcatcctcatatagactttgataattcgtttatcgtttggctcaaaattccatgattttgtaagaagaagaaaaaaccaactatcttcaattatcacaaatgttttatttacgggatcattttcgagctagttccatatagcagctgcatattatttcggaattttacttttagatgcaatctgagccgagctgaaatgattgagccggtggatcaaagaccaatttggattagcggagcgcgtgaactcacagagtcttctttataactccgaggcatatggaaaggttagtggtgcttacgtgggagtcaaatttggctgatgggtgaatcttgggtccctcttggtgaccatgacaaaagccaagcttgtttctttgtggagagccctacaacgttccgttatgggagattttagtttttataatttgcttgctaattgtacacaaacaaaattactattatttcatgatttttccttaattagatgcttaagttttgcaacttcaaaagaatggattatttgactacgatttcaaaattaactttggaaatcgccttcttgataacaaatatttgtgaaattacatttccacatacaagttctttaacccaaagtccatcacaaattcaacaaaaataaaacaaaaacaaaatgggacatataaccggatgatataactgactggaatttccaatttcacggaaatgatcgtcaaacaatattaaatttccggttactccagctttccgattaatataaaaagtttatcatgtactgtattatacagtattatattttaaaataaaaatgtcgaaacagcatatatcctatgggtataagtgcacatgcatggttgggaacttgggcagcatcaagttggcattacacagaattctcgaccaaaatcagaatctctccttctttatattttctttttttttaatcttgtatatgttttaaaatcataataccagaaccataacctttatttaggaaacgaaaagacgagttatatctgcttcagcagcagattgtcattaagaatgtctatccttaagaagaactataatactgatttgtgagcaaaatgaaacaaacactagagcaaaactcacttttaatattaaattttctgatcttttattattctgtgatacttgattatataattaactacacttactttaagaaaaagtataattactacgtaaacagtaacatcgcatagagctagaaatatacaattatatcttatatatacgtgagacggacaataaagtacgcttaggtaaagataattggcgtatcaaagttcaaagctataaagggatatataatattattaataatcacaatttgcagataaatttccaattaaaaaccagttaagtggtgatattttttatttattaactttagtctttaggtcgttttaatagatgataaatatatcatatatgcttataagtatacgcgtctaattcaatgcaagaaattcccttttctgctacaaaggtcgaatactaattaaacattatggattttccactttaaattggtaaaaaatatttggtgatggaaacgaatggttgtattataaccttggtttgtaatatgggtcaggattagggtcgtatgacaaaacgatgattatatatactacaataaccaaaacgatgatcatatctgtactgtttatcaaacaaaacagataaaagaaattattgtgtagaagaatataagctgcaaaagtgggagaaataaataggaaagatgccctaaaaactacaacataatcgctgtttagacagagtggagcatgtcaccccaagtgttagctaatgatcattattccctcggcttatgacctaatttattaattatcagacaaccaatcatgagtacgactcataattataactaaaaaatggttatagtgggtaatattttgtgcttaaagatgaatgatagtggaagtcgacctgaacaacttttttgcaattgttttcagggatgaaactagctactactactagtaatcctagttgaataagtaatttgtttaataccgattacacttcttcgtacccaaaatctgtcattcactcttttatgtgatccttttcgccaaaatctttttttctcgacctttaacatagaagattcattactccttttatactgtaaaattgtgttataaaattttctttttacgttgaccagaaaacaacttttttgacggcggtaaatgattatacacgtgcagataataaccattaccgtgaaaatatgaaaaagaacatgaaaaagaaaggagtttgcaggtgcagcgtacgtgtaaaaataaacggtgacgcgacggcgtttaaagtgacgtgttcgatgtactatgggtcctactcacatggctctccaccaatgtctttgtctgaaagcgacaccgcaaaagtcttctgggctctactttgggccctaccacagctttttgggtttttggactttctctaaatccaaaaggttcgattagaaatagatctcgtgcaaatctaacacgtgtacggcagctacgtctggagatccatatgatcaggatactgatcgccgcatgtaatacgacctctcactaaacaaatgttttttcctgagacttcgttgaacagaatcccatgtgcaacatctatccacttcgtcttgtctgacatattttatttattttcttagtaaatttataatattttccttagaattcatggttttaatatttcaagtatgtacagttatgaaaaacttgttgtaccaaaaaatatcaaaacatatgaaaaatcaaagacaacatcatcacccgagaagattgataactaaactgaagatacacacacagagatgtaacgttgtatgacaatgactatgttacactcaatttaactgagcgctaaaaatttagaggtagtgatattaaataatacgatacctgtttcataaagtatttttttctaagcggtaaaaagattgatttgagttgtgattcatagtgaaagttgacaaggaatggtacattttctctagggaatataccaacttttttttgaacaaatacgagtatatcgaacgatgggatttatatttgaataaacaaatagtaatcgtgcttcttccttgcagcaaaaaggcaaataaaaaacaagattttaggttatgaaaagcaagtaacaaaaggagaaaaaggaacggctagaaacaaacacggatatttagggagatccaattatgtggctcggcttttcatgttttatctccatgtccttactgagaaattttcaaaagataacgaaaaagagaaattatgcatacgttgaatggttttatgttttttttttttttatcatgctatgatttgtatgttattaatccatttacaaaaaatgcgatatgacattttatcctaattacagactttacagtgttgtagctcaaaacttatcaccacataaatcaataataatcgattatcataaaagttggtaagacagatgctaaaactaaacatacaacttagacctatctaaatgaaccaattgaagatccaattttaaagaaaccaacaagaagatttgaccgattcaaaacaattgttgattatatttgaggattttttttggttaaaagcattatttggtaatgcatcttatcaaatccgacatctcaaatttggaccactctcaatctcgaaataaacagttcttattagcatcgatcgtatcatgtcgactttgaaacagatcaatgccaaaattaaattatataacattttcaaaattcagataggtttctctaaaaagacacattgtacatagggaataatcttatgaattgtgcatagtcgtcaatggacgacgagaacaataaaagaggatagatagttagtcgtgctcagaatctttaacccttcggaatttaaagatttttgacgattacattcacctaagtaaaattattcaaataatattataaacgacgaaaaaacgatttcttcgtcacatattttttttattcccgatgatttcagacttttttgtcctctctcattcaaccttgaaaagattacggccacacgtgcatggaacaccacacgctcgtttttactaccctctcgcgtcatattccattttctcaagaaaaaccccaatattttgagtaatgcattttccgacccaatatgacttcagtaatatttccacatacccccttcagcttttctatgcttttaattctgcccccacattttacgaattccactgatcggagcaataccattgctcattgtccgcaaacaacttgcaagcttcctctccactaaacagatcttcatgctcttccattttcacgaattggctaaaacaacccatcgtcgacatttctacagtcgtggccgccactgcgccagctgcttcaaccgtattgggactatactcttcgttcaaaaccgcgcttgagtcgctgctatcggcaggatcgtctctgaagttttccgtgcgtggaaaaatgctaaacatttcgaatgcgagctccgatgtcggagcgtccgtaggaatatgcggtggtggcgatggagaacggtggcttagctctaagacttcattattagccatcaccgattgatttgcttccactgcttttaaagcgccgttctcttctatacctttaaccccttccacgttaagttttgctttcagctctttaatctgcataaatgtcatgttttataaatatcaatactctttataatctaccaaacaaaaggattatctctgaatttgtttaaatttagctattattatcccaaattatataataaattaataaacatgaaacttttagtatattaatcacaaaattcaaaaaaaaaatctgtttgtgtttggtttatcatttgtaattagcttaaaatgatatttttaacaaatgatattagcttaaaatgcataagtttgtgacttttttatacactaaagaaaaatcaacgtaattaaaggcaattcaaacacagacgatcaaaactttagtctaacggtcagaattcaaattgtaatttcaaaataaacaaattgaaacgatgttattaatgttctatacgttcgtttatttgattgaccgaatcattgatggatttagttacaataatggctaagatggttgtttgggtgtgcctagacgtttaaatttattgacaaaaaaaaaagtcacaaagactatacctgtccaaggagtgaatcgttatcgcgttgaagcgagtcgcggttgcgtttgagtgcatcaaagtttgacttaagaacgccgtaatcacgttcaagctgctttgtcttccaccgagcacggcggttttgaaaccagatcgcgacttggcgtggctgcaacccaagctcttgagccagcttcactttcctctctggctctaacttgttatcaatctcgaaattcttctctaacgctttcacttgctctacacccaaccgccgttttttctccgccgccgtagaagacgcgtgtccaacgccgccgaggtcctctagacttccgtcgtcttctaatgcgtcaaacatctgggagtagtctccggcgccggaatagagaaagccggtagttgttggtcttgggcttatttgtttgtctgttaaaatcattaatcaaggtagtacattaaaaatagtactactatatatctaaccaatctcataaaacggatagtttcaatcaaataatggaatatttatgatgtcatgagtaatcacaaaaccttgtcaggataacgtctcgatagtatgaattgtcagaaaacatatatttacttaaaatgttaattaataaaacacaatcatataataaaaaaattcattagtatctttctaatgatcatcaacaaacataattgcagtttcagaattgtataagagtttatattacaagagtcttattttacctgttgtagaatggcgaattggtaagaaaccggataaagaatcggagcttccacgtgatctcttcatcttgtttggtcggaacaattgagatcgaaaagaagaaggaaataaagtttatattgaatggttagatcaaggcctagatggttatcgattaagatctatctacgaccaatacgtgaagaaacgatcctctctcgtctctcatcttctttttctccaaagaaggatctttgctctgtgtctagactatccatataagatggaaacagagaattgactaatactaagaaatagtcatctaataccaatcaacaccaagaaaatatgaacttttaattcatcaggttttcttgggaaatattagtgagagatttcaaaagtcgtattattattttcccccgagaaatggaaattggtaagagagagatagagagggagagagatagagagggagagagatggcttctcaccccaactccgggttttaaataagacgacaggataaccctagaggaagtgttggagatatcttgagttatttcaggaatttcgggggattttttaaactttgtaattaaatgcaaaatagcttacaatggttagagttagacaccggtttactcatgagactttggtccaggacgtgaatcatgacaatgccatgggttttcagctcggctacttaggagccggcatagattttaaagattcattaaattagttcaaaatcattagtttctactttatcatataaaacactcgttgctttttcatatactacgacataattttgaaaattaaattttttgaaacatatactaacaaaatgatcaacttttaaatttaacagttgaaaaatcatataataatataagatgttctcatagttagcgtaatgatacaatagttaaagttaaaatttgattccgaaaaaaatttgattctataggattaataaaaaaacttctggagtcccaaattatgcaattgctacttcgttttcacttgtattttgttcctgtttttcttattggattggttgatggcatggttaaaaaacagtaaattagagattcaggtctctctacggactacagtagagttgatatttgggatattttcaattaaaatgtcataatcaatcagtattaatacactggaccaaccttcgtttaaatacaataaatatagacatgggtcatgggtgatatatattgcagatacacgcaacgaaatactatacaaaacaaaaaaaagttgcaatagtagtcggtccagtagttggccatgcaaattgatttgctctaaccgaaaagattttttaaaattagtgtcaatgtgtttcagcattgttattaacttattacattctgattaagaaacgcaatgcaagtccctaatacatatttttctttttctaaacgcaagttacttacatatatagacagtcggattaatacatgttttttgcttcgttagctgctgcatgctgacatatatatacatataggtaatagttgtacacaaattttagtgtaatttaatattatatatgtgaaaagagtatgtggtgtacaaaggatattcacacgctgcaaaatatttttaaaattgggtaatgggaaaggagacaaagctttgatgagatagctgtctgtctgtctctgtaacgatcttgcccatttactacaaaatgtattattttagtctggcagtagtatttttatagatatattgacaatagataagaaacattaaaaaaaagttcaattactttgtaattctacaagtaaatcgactttctttttcacagtttgaattactcactaacctttttaccaactgttttactttgtagttaataacaaaaattaaaattatacaaataatatatacttttaagtgtttctgaatcaaacaatacaattatacagagaaaacatctaacagtcattttgagaaaataaaataaaatataatatatatatatatatatatttaattgacaaaagaaagagcataaaagcaaggtgggattagtaaagaaaaaaggtatttggagttgggactttttgttaaatgtgtatatattagtaaagattagtcatttgtattgtgacaactaatatgatgatttcgtatgtacccatctaaaatcttagaatagaaaaatataaactaaaataggtttggtgtttcttttaaattgagaattatataatcttacaaacagagtttggttgatgagctggttatcctatgaaagcaactaattccactagattcttgatgttcttttttgtcttctagaaacattgatcacacgacatgaatgatcagttacataattttcgaaaaaccaaaaatctgaaatttaccaccccttatataaaatatctatttaaatatgtagctaaacaggtaaaaaggtcacattaccaaacacctttatccaatgctttttaaaaatccaccaaatattattactcaaaaacatgtgtcaaatttaaaccataatatcacacatcaacaacactaccataaacttttatcaaactattatgctacatgatttcttatgaaattttgatttcaaaatgacatttaccccatccgaataatgtaaactagagaaattttgtaagttgggccgctcaatgaaggcatgctttttcagatgtttcggtcaccgatactagcgtttaattgtagacgaggctcgttcgtatttcgtaatctacacgagctttcagtaatctcgaggaacaatgatccggttatgcaaaattgaatcgcatccgcgtccggttttactgatctaaatacgagatatgtttcaaaggcccatttcttgtaatgagaaggcccatcgtgtgaatcttattatattgcgcttaaaattagctcttccataatattaaatatctgatgtttcttgaatataaccaaattttactagtgtataaaagaatacacaaatatttttttaaaactcaactgattacatatactcatcaattcatcatgcttgtattttatatcctcaatttaatagacgtcaacacaatgttattaactcagtaaaccaacaaaaaaaaaaaaaaaactaaacaactttaatgttaattaattgtatatatgtaaattacacacataagagattgtttatacaataaaatagaatttcaaagttagctagtatgtaaacaaaattcaacgttccttgtgaactcttctaacgacttcatgcaccgtatttgcgacctcattaccagaaggcgtcaattgacaatctgcctctacctaatacagagaccaatcattttgagcatatatagttgacttttaaaacaagaagccttattttagttatttcatataaatttatgttaactaacaacttctataatcatatatattatctttttcccctaaaacaagagaggaagagaatagattaccttgacgctaaaagtgaagagagacatgtctttggaagttgtgaggttgagatgaagagtacttaaacctaaagagttaaactcattgataatcttgaagagcaatcttggctgtgtcttcgttaacactttaatgttggcatgtctttctaccattgtaacctccacgtcagcaaccacctctagtcgcttgtgatggtggtggctcgaggaggatgaggaggcagtggcggtggcagtggcagtggcggtggagtattgagggaacatgaagaagtcggaaaatatatttggtgattgattgagtttagtagcttttaattgggcttcgagagattggagacgttgttctagcttcttcagatagctaatggtcccttctatgattgatgcttggtcattctattataggaaaaacccaaaaatttatcaattcgcaattttatttagtaattgattcaaaaacaaatatactaaattactattatttaattaacggcttacttttaataaggaaccttaacactctttgtctaaactaaattttaaccgaacatatcaaattatcaacattgcttagcctgcttatatcctataagctaaattaaagatagaaagaaactcacaggttgagaataagagagaggcatcatagacttgaggatagacagaaaatgattcatctgttttctccggttacgctcgacggcaatgtgattcatcctttgattctctttatctacaatcgttttttcacttctccttctcctcttccgcgacagaaagtcaccgcaaccatatctttctcgtagaggagataacttttcagttaagtgagatttttgctctgttatggagcaggagagtgtcgctgatgaataagaagaggacgaaatggaattttgctgtgacgccacgtcttcagagttcgaaacgacgatgttttgaaagtaatccaacatttcgtaacttaaggatgtttccacgagtgaaaagccatgagggtaatcttgttggaacatcatatatagcctctctctctctcaaccaaacgagcacaaaaagaaatgaaggagttaatgcataaaagttaatggctacgttatcttttacacaaagtaatgtttatgcgtgtatttataatggggtcttgttggtttgttttaatttattaatctttggaggactttaataatcaaattttcacgacgtttatgtaagaaatgaagccctagctctgaagagatcaaccatttgattaattttaacccgattttacgcaataaattaagaaacgaatgcaataaattcttaatactaagatcaacaattagtttataactttatattttacccgattttacgctttatatatcgtcatgaaatctctcatgtttgactaaggggtattttttataccatggactttttgctcaaaacctcagttacaaatagaaataaaaactcttacaattgatggaaaacaatctatagggagtttatttatttattgactgcaatcaaatatactatcaaataaagaaaattggattatgaaatgaatctaaagggatacttcagcaacagatcccacataacataatccaataagaacgttcagagatatacacaacaaataagaatgttaactttcatgatcgcaaaacaaatcttaatactttaccattcaagtaatatatttaatgaggcataaacaatttatatttctttgtgattgccaatcacaatgtcgttttatatgattggtacatttcatctaacaaagaaacgagtctatttgtgagttgaaaattcgtgatttgtggttcactattggatcgtcgttatcaatctgacattaattgtaccctattatatatattgttgtgtctataataaggcaagctggttactacatttgtcgacttccacattcccaattattgtgtattttcttgactagctaatacatatataacaagaattaatcttccacaatatgaattgtgatgcgtttacagtggtaattttgcaataaacagagtgagtatatatatacccttcgaacatttagttttaattatttgaagagtgtttttatgttagttatttttcacaacattctgattggagaaacaatttatagatttttgaaaacccttaattaacaactataacgtaaaaaaaaatttgaaaaaaaaagaaaaaaaaaaagatagaagaaacctagaaataaaatgagttgaaatctttcttcaattttttgaaaacccttaattaacaattaagagtttttttcttagagacagattttcctttttcctccaagtttttgttgcacaattaataattacacaatcaaatctatagtatttttttaattagatcttaattttgtacagcctaaaataaagtaccatcgagaaactaattaaaagtttcctttttttttggtctctaccatcgagacattaattaaggaaatctacattagatattggaaatcgaatcgaatcgtaggagcgtagatcttcacgcctcgcgattaacaacgacgcgtcgcgtttgcttgttcccgtaggcaccaaggcatctatataaacatattgagttcacaatgtttcaccctcaattcgacaatacttcttcttcgtgtgttctctctctcggaaaaaaccctagtttcttgccgaatcaaggcaaagtcacgatgaagcaagcttcttcttcttcttcgtcacgtaattcaacaagtttaacaaatagacttaaaaccatcttcaagaaagctgaagagctttcgattctctgtgctattgaggtttgcgtcatctattacggaccagacggtgaactgagaacatggcctaaggagagagagacagtgaaagacatggctttgaggtataaagaggccagaaaacgcaagaagagccgcaatcttcatgagttcctcgagaaggagaaggacaaggacaaggggaagacgaatttgaagaagaattggtatccaaactttgatcattactctcctcaacaactctctcaattgattcagtccttagaacggactctttctactctgcaagaaaggcttcgtattgttgaggcgcagaaactacagaacacaaacttggtgcatcagagtttaacaccatcgtatctgaaccagacccaacacttgaatcctagcaagttctcgctgtttatgtacaaccatggagatgctactctctcacaactcccactgtctgctccacactccaatcaactcatcaattaccagaatcacttgatgcagcatggttttggtcagaacatgtgttcggacaacatcaccaacaacaactttgaacatcctggcgtgtcaaacacacaagactactcaccgttactttcggtacaagcatctgcagtgaataactacgggttgaataatcacttgatgcagcaacaggatcagcttcatggttttgatcagaacatgtgtatggtgagtgaaatcatcaacaacaacaacggtctacaacatcctaatctctcaaacacggttccacatgaattctcttctgatttcaaccagaacccttatggtaatgcggtcggtaacattagcttctctcaagacatgttttcaagctatgatgcgagcagtctgctacagacatcttctctgccacctctccacaacattcctagcagttattgttttcctggcaactcaagacttctctgataacaaaatctgtccaaaagaatttgtttttttgaagcttcattaagagtcagtcaatagttaagtagcaagcggatcggagagagattgaagctgtttctgcttccgatttcttctgttactgttttttttaatattttatagtgtcattataactgcaaaacaaatccatttgttttttttttttgttaagaaaacaaatccatttgtggagattttgtttttacttttaagttgatacttttttcagttagtattgacatatatatatgaacttccataaaaaatctttcacaaaaacttgcatgaaacaaattataatcttaaaaccttaattcttgcaacttagtatccttcttgtctgaatcaactaatatatacaaggagatggagagtggatctgagttcgtgaagcctctagactttttgcagaagaagaatctctgtgtagtttctgagtaatggtatgaggaagaagataaagattgagctgattgaatatctgcaattaaactagcccttgtgttttatcaagaaagtcgatatcacattgctccagcactccccactattatccaattctacaacagcaacaacaatcccagcgagtacccaacaaacgatacgcaaaacccacgaaccttatcgccggaagacctccgattctgtcgagagaggaacaccaccgcgtaaaataaccgggaatttggtacgattttgttttttatttgatttggttcgccacaaggttaatttggtctcaaaactcaatcctttcaccaggtttttatggcccggcccaatattaatttttaaagtccatttatttgcaataaggcctattagtaatacccaataagccgaagatgcagacgaagacgatcattattgagagacatgtatgacgcgttaaatttacttcagtttgtgtttttgagattgtggttggttaatggttactgctcaagaacaagaaacataacatggtgtggtgtcagatttatcattttatgtttccttcttgctactaagattatattactttttgttaaagattataaggattattacgttatcaccctgattgaataatccaagttttagttgacaaaacaaaaggaagaagaataattccaagttttatgcaatatagcttaaattttttgttcctctcaaaattcgattatcaagttacaaaaaaatgtaatattttgcggatcatccaaaataatgagtagaattttgtgatgtattgatctatttctttggccaaaaacaaaagaacattggaaagagacagagaaagtggcaagctggttgtcttagctgttcttgattccctctaagcaaaagtataaagctcacgaatgaatgaataatgttataataccaataacttatctggttctgtgttatgtaaattattattttaatcgatagttgttagtgttcttgtagtgatggattcgccgcgtggactcttattattctcccatgatgagtctcgactctcgttgacctcatccccacgtacgagtattttttttatatctactatggagtattaattattgttgaaaatttcgacaaattaaaactagttacaataaacaatagccggaacttcttcattgtcacgaaatttacaagttaagtaggcaatcccattttttttttcgttgatcaacgtcaaccataattgtgttttcgcattcaacaaaaaaaaaattgtgttttgaataaattacacaaaagtataatcatttgaaacaataaataaagaatatgatttatgttatatttataaaaaactgcccatatataatagtattttgtaaatgaattactatatcattttgatacttgaaataaaacagttatagtagtttgtaaagtatagtactgttgtaaataataaacgatatttgaaatttagctatgcaatttgcttgtatgtgtatatatacacacattctatttgtatagatggccaacagaaatcattaactttattccccaaattattgacaataatagaaagcaaatatataagattaaaaaaactttgcactataagaaacacatgaacacatggtcaccactacagcatacaaaagttgagatcatcaaaagctatgcttattacattttcatctaattaagcactgctaaaaaaatctacgagacacattaatcggttaagtttgccttttaaaaggaagaaagaaagaaaaaaaccaccgatgatgatgaatctctaaataatcccaattatagtatccaattgcaccgattgatatccttgtgctagaacacacaaaacgatccaagatcatctttttgacgatctagaaaagaagatacttagttcttgaccgataatcccacgtgggtcaacgagatggaaagattccgaatcaaacgaaccaaaaactcgtttgaaactcgctcttaagtacatcatatgatcacttttctctcggtttatctcttctccgttaacaactccggctccttcagccaccggagtaagcaccttcaacgcagctagctcagacttcgaaggctctcgtttgatggcgaatccaactttccgaccgttgcaatacatgttccataaaggtgttgtaagaagtgaagaggaagaatcttcatgtgaatcatatccgtcgttattgtttgattcgagagcgatcctgagcacgcctccttgcatttcgcgggctaatacctcggtagggacagtgagctctaagaggacaatgattgggtttagggttttggagtttgttgcttggatgcagaagtttactttgccacgacggaaaccgaatatggttccggtaaaagtggagtttgtggcggttgaggaggcggaagaggttcttggtttaatttggcggtgagataatttgtcttcttgactatcatttggatcgacgattgtgcagtaacaagatgggatgagaagttgggcgatggtgcgaaggagccgccatgaacgaacttgtttatggcagtctacggctaccgttgcgcttgtggtggttgaagctaggcggcgacggtaagggtttgtggggaaggcggacatggtttttttttgggagttgtacgaatgggatgagaattttatgtgtgttagggtttaggtggcatggatgtatatatagaaaatgggcatgacaataaaatgatatgaacttgtgttgttgttttctccttacttcaaatttttttatacaaatcaaaagcaacctcaattgattctaaaatattataaattatactatatctaaaatgatttatgtgaataaaatttaattattacataatagaaaacaaatcaatccattataaaactaaaaactgtttgtgcagtaataatcgatgtatcacacgttaaaaggattattgtacgcggaatcgcggatacttaattaaaaattaatgcgttacaaaactaaaaatttcttttatatatggtttgaactttgaactgtttctacatgatattttagttttaactgttaaaatttggtttacatgtaaataattgaattggaaagtatatggattttatgtaagaaaagaaaagttattgttggttagtatttcagaaatgttggtttttacatgatctatgcccaattttcctctattaatgtattcatgtaaatcgtttaatggctagaaaagaatgacacggtgatttagagaatttccgtacaatcatagtgaacgtgtgagtccatatcattgaatcataattcgttattttaccttatatattattaagttatcattgatatgtttaatgattatgctcgtgcatagataaaagaccttgacgctaaacaactctcaaactcctattattaactcacaacaattagacaacattgattaaattcatgatgtagtttattacgttttctttttatgataaaattttttgaatcatttaactctcttttaataagccaaccctaaatggacaaacaaagcaaataaataaacgacaaagtcaaatcagccatctattcgagcatcgacaatgattgatcatagggcatgaacttgttacccattttgtggcccatcattggcccaatatattcctcatgttcccactgaaatgtgatcaataaaagagttttactaaattaacacaacctagattacaaaaaaagaaaagaaaaaaaaggaatcaataggatcacaaaactaaagaagttattaatgattttttaagcacaacaaataatagtagacggtagtttataaaattcccggatctaagactagtaaattagtaggacacaacggatattttctattttacacagtataaagcttatagaatcaaaataaagttacgtcaaatcagtgtctatacattaaaaataaaatcaaaataaaactaggattaccaagtttttagtcgtgggtcttctatcatgtaagatattattcacctgacagttgacacgtttattttgtttctaactttttaagttttactgttccatcttttgtttcaataatttatttccgcgttgtaaccctttttttgcatatttcttttgcgaaaaaacgatagaactcatagagggtggagaatacgttgtcgttttgcgctttaatatttaaattttctgctagcttggttctttccacttaaaagcattatacactttttctaatttggattttacaaaaagaaatgacaacacaatatatcattgtcccatttctcgcaatatacaacatcctattttgtatttttttgtccttctcattttggtaatttctcgtttgttcttttcttttaagatgacgccatcaaattactaagaaacaacgacgcaattaacaactcaataaacacgcccaattaaacaacattagtatcaagacactttgtcatcagtcttcgactacaatttacacaatacatagtaaagaggttttctaagtggagggatcttcatttcttttttgattaaaagatatttcctaacatgaatttatacatagtgaagaggttatagaaaacagggaacaggtttaaagaaaaatatcttcatttctttgctccctttaaattgcacatgcctagaacacgagaagctgtgtttgtcggactaaaataaataatatcaaggggactaaaaagatcttaataactttacataaaaattaattatgtgtctagatgtcttgtttaaatagtttacacaaaaattagaacacatcttaggtgtttagatattgaatctatctatattacacaaaaaataaaaaaataaaaaatttaagaaaaaaagacaaaacatttttttcaaaataagtgtttaaaatttaattatgtgtaaactatattaaacctaaaacacctcttagggtttggatgttgtatctaactagtttacacaaaaattaaaaaatttaatattgttttttaaaaaaaaactttataaaaaactaagtgttaaaactttaattatgtataaaccaaattaaacataaaacacctcttaggagtttgaatgatgtatctaattagtttacacaaaaaaaaaaattaatccttaaaaaaactatatgaaacctcaaacacctcttaggagtttggatgatgcatctaactattttacacaaaattaaaattttaataatttaaaaaaaaaagacaaaataatttttgaaataatttaattatgtgtaaaccaattaaacctagaataccacttaggggtttagatgatgtatctaactattttacacaaaaaattattttacacaaaaaataaaaaaattaacatttaaaaaaataaaataaaaatgaaaacttttaaaaaaacaaagtgctaaaaaattaattatgtgtaaaccaattaaacctagaacacctcttacggatttggatgatgtatctaactagtttacacaaacattaaaaatttaacacttaaaagaaaaataataaaataattaaaacctgtaacaaaaacaagtgctaaaaactttaattatgtacaaaacaaattaaatctagaacacctcttaggggtttggatgttgtgtctaaatagtttacacaaaaattaaaaatttaacacttcaaaaaaaaaagataaaacctttaacaaaactaattgctaagaatttaattatgtgaaaaccatattaaacctagaacatctcttacggatttggatgatgtgtctaaatagtttacacaaaaattaaaattctaacacttaaaaaaaaagaaaaaaaaaagaagataaaccttaagaaaaataaagtgctaaaaatttaattatgtgtaaaccaaaactaaacctagaacatctcttaagggtttggatgatgtgtctaactagtttacacaaaaattaaaaatttaacacttcaaaaaaaatgataaaaaaaaaaattcttgtttttttctgaaaaaaatcaattattaaaaatggtaaattaagaaagcaatacctcatacagaagcttgtgatatggtcgaaaaactcggcctccttgagcccatccagcttctttaccttatccaaagcaaaaactagtcctccttgagcccagccaaaaactacaacatattaaaaagattgcacatatgttaagtgactattaccatatccaaattcataaccttttaacttctcccatcaatctattgcctatttggtctaagaagcctgaaattagaaaagcaaataaaccaaggacaaagaagagagaagaatctgtaccaccaacgatgatgatggtagcaccaagaaagagaatctcagttctgtaatttgtacactactaatggcaatctctgtctttgcttctctatattcgcatacccataactacaaattccgaaccctaaagttataaatcaaccgcagaacaagtaccagaagcaatacaaagagaaaagacgctcttatacctataagaagaagaagaagaagaagaggatgcgagatcgttggatcagtccatggtttccaaaacgccatctttttcgaaaaagagcgttttggcttcttcggcttatgtatgtattagccttcgacttgagtatttataagcaaaaggctcttcgactaaaagaaaaggaaacttccgattatttccttttttcttcaaccgttgtttcctttttcttatttgagaacgttagaggaatctggaccgtttattttcatcatgtttgcaactgtgagatctgacggtgattatctaatctaaaccgtaagtttgttagagattatgtgggacctggacgatctattattctattttgttatacctcagctacaaacaaaacaatcatgtatgttaggaaagaagagatggatatatgatgatgattctgaaccaattctcaatagtttataatggaacagaagcaccagtgattgatgatctaacagacattgacatcaggctaccaatgctagtctttctttgggagatagtagcggcctggttatgagaatgttggagccatcaattgctttggttaggaccagagcaatcatgtcattcatcctcaatctacaactccacggcgatgaagtgtcaatagaatcttctatcggacacaaatgatctaattattcaaaccacaacattgtcttctttgatgttaatatataagtcttgcatcttatttagagtgtttgtgtttggttccggttgatctgtgtaactgtctttatgtaatcacacaagtgtatgctgtctggttagtcggagacagagtaagaagacatcctacacatgacattggagaattataaggtaaaatcttgaaccatagatttctaaagacttttgagaaccaaagtaaggattgtattgaacattacaagtttcattggggaatttccacaaacaccttagctgcaaataaaagcattaactaaccaacctacaagacattccaaagcagcaaagatcgaaacttacataaacccaaatccgtaaatcgaaaaacccatgaaatcccagttcgcagaacaacaaaatcatcactctcctcgagctctctcacctctaatccttctcgctaattggatctctttaggcatgatcgtcaccctctttgcgtgaatcgcacagaggtttgtatcttcgaataacccaacaaggtaagcctcagcagcttcctggagagcagcgacggcactgctctgaaacctcagatccgttttgaaatcttgagcgatctcacgaacaagtcgctgaaacggaagctttctgatcaaaatctcggtactcttttggtatttcctaatatctctcaacgcaacagttcctggacggaatctgtgtggcttcttcactcctcccgttgctggtgcagattgtctcgccgcttttggcgctaattgcttcctcggagcttttcctccggtggatattctagcagtctgcttggtacgagccatatagaaagaatcaactggttaattttattaattctggttttgatttctcgaaattgttatagaaattgaaaagtgttgagttggttatgtggaaaaggagatgaaaatgtggagggagttttcaaactttgctaaggaaggagagattttgatccgttagatatcgaacaacataaacgcaaaacctaatccaaccctaaaacacgaaattagggaaaacgaaagatatacataagcataacgatcacagtctagagtacttcaatctccttcttaagccctctcgcctctaattctcctcgccaattgaatatccttaggcatgatagtgactctcttagcatgaatcgcgcaaagattggtgtcttcaaacaatccaacgaggtatgcttcagccgcttcctgaagtgctgcgacggcgctgctctggaaacgcagatctgttttgaaatcctgagcgatctcacgaaccaaacgctggaacggaagcttgcggatcagaagctcagtgctcttctgatacttcctgatttctcttagggcaacagttccaggacggaatctgtgtggcttctttactcctccggtcgccggagctgatttcctcgccgcctttgttgcgagttgtttccttggggcttttcctccggtggatttccttgcggtttgcttggtacgagccatttggtatccgaagctttgagatttgtgattaagtgttgaagatttgtgagatttgatgaagaagaagaagatgttgagactaaagggatactggattggtttttatagcgaagcgtatacaagggaagtatttgttttgcgtcgttagatcttttatttaatcaacggttgtgattgttttaattttagtgatccgcgtcacgtctaaagcagccaatcaggttagttttctttagcgcccaagttttttagcttccttcacaattttttagtttttttatttaggcgcgtcttttaaaccttttcgctaaattttggaacctgacagtgaaggcctctatgaaataaaagcccatgttgtagagtctaggttaagcccgttaatatgttgtgtatcagtccacgaaattataatcttagtttctgctgatgtggcccatgtagaatacataagtcgagaaataataatatcattgacgcacgttaactattattaacgtgtgagtggtgtaaaatcagccaatcaggctttaaatctagatacaaagattgagagttgagttagttgattgatttgaaattgattactgaagcaataatgttttatatttcttacatttctgtttatttaataatacgtgttatactcacaaattaaagtgtctgtaattttgtataatgtgaatacttacaaaatgtgttgagaaaacgtcattttaaaagtttttttagttcaattttcacttaaaataaattgagagataagtcaattaatagaaatcttatccatatacgtatgtaaatgttgtcagattttcttaatgaactttttatcaaaaatatatcataatcaaagtactctagatagaggtaaattaaacctttagtattcatttatgaaactttaagaaaataacattaaatttagtttataaatagataaaataataataaattaaatagttattgcaataaaatccatgtgtatttaattttcaaaactgaatatctaattaaatcctggcatgaaaattccatctaatacacatgttcaatagatgactattatacaacatatatatttgataccttacaatcaaatcaaaccaaaaacacattgtgaaacctataaacattattaaagcaaagccacattgctaaagtttcataacattggaatagaacaactatatttcaaatgggaaaattagcgaccttgaatggcatattgaaagacgaagcctcacagatgaaactcaatgtggttcatttgtgtagctccgtgaatgccaaaaccattgatttagctctcttgaaagccacgtctcatacctcaaacaacccgccttcagacaaatacgtcacttttctccaatcaactattgacacgtgttacggtcctgatactgttgatgcgatcttgcataggctgcgtgtgacgacggacgtatgtgtggctgctaaatgtctcattcttctccataaaatggttaaatcagaaagtgggtataatggagaagatagtcttcggaacaatattaatcatcgtactttgatttatactcaaggagggagtaatcttaaattgaatgatcttaatgtaaattcatctcgttttactagagagttgactccatgggttcaatggtaagatttctatatactgttggattgattaggatatagatgagcacaatcgataagtcgattattctttattatatatttttgtttttgatttaacgttaaatcacaatttaatcgaaatttttatgattcatcaaaatttggttttgaataggtacaaacaatatctagattgttacttatctattgcggaggttttaggtattactccaaacataaaagaaaaaaacgaagataagcgtttggagactcagcgagtctcgtcttacccaatggattgcattctcaaacaaattgatttcctagtagaactattcgaacatataagtgataggccaaaagctccacagtcgaagctgaacaaaatcgttattgaaatgacagaactaatggtacaagactacttctccgccataagattgatgaggataagatttgaagaattgaacgtaagagtagctaaacctaacgagttggttccggttttggagaagcttgaaaactgcaaggagggtttgagcgagttttcttggcgaagcaagtatttgattgcagatttttggtatttggtatcgaaattaaaagatatgtaacgcttgatgagaaaataacagtttggtccggtttggtagttaaaatcttattttatcatagattgtccgtacacctggttttcgtctctatgggtggttttattatacatgagtcgattccatgttaggtgttttataaataaattatgaatactatatgtaaatatcttatgaatttataatttgcaaaaccaccaaagaaggcattggtataatttgaggcatatttaaaagcgatatgcacgttaaaccaataactttttattatttttactaaattaaaataaagcagttttatctaataatattacaaggcatgctataaaaagaaaatcacaaaggccattttgcagtaattgcagcgatcctatgtaatctatgaaccggctctaaatatgttgtatcacatttggatacaaaacatacaccagttttccaaaaccatattatgctgcaaaattatttaatagttgattcaacaaaatcttgaatcattttattgtgttggaccatttgttaatacgagcacttgctttctgcgcctgtaaattttataaaacatataagaaaacgttatcagtaaattctcaaatttgctaaacaaagacaaaccaaaaccaaaaaatatcaaatctacctctttttcccagtcacatctcattgtgataaaacttaagatcatggtttgaacagcggttcctccaaaaatcataccaccccaaattccctataatagataaataaaaccacaaatcattattccactgaataaaaaaaaaactatataaatataaaatgaatagttgaagaaaatcgtgaatattaccatgacaccgagtttaaaaccccagcccatgagaaacccaagtggaacaccaatgcaatagtaacatcccaagtttatatatgccacgtacgattgccaacccgatccaaccgccacacctactcagtaagccaaagaaaaaaagtcaaccaaaaacgttgactcggtttataaagtaagtaaaattgttacgtaccggaaagaaccggttgaacgctgttaagaagaacggtgaaagctagcagaagtgagagtttattgacggcgtctaagacggctacactcgaagagaagatccatgcgatttggttatggagaagcattattagcacccaaaaaaacaatccgattatcaacgattgtgttaccgatacaatcgtcgcaaatcttgctcctttaccattaccagctcctaattcgttcgccacacggacactacaatagttcacgtaaattaagtatctagatgttaatagttttcttgtatctagatgcccacacaaaaatttagaataaaaacaagtgaacatgaaaaaattataaattaaacaaaactataatagcaaggagagttatctctaattttctattctcgtatacatcttaattcagacaagacgacaaatataaagataagaagaaatcaaggcagacacggaagaagatagcaaaagctgtaaggatctagccatatatgtgccaaatgttaggtttcaatttcctaaatattcccacacacaaaattattgttcctcgaaaatgtatctaatcaatattataccccattaagtattgtattgttttattgcaaattccacgttcacaaataaaattgacagtactatggtatttttgtcgacgtatattattttgacattgacatgcattcactatgtatagttgatagttgataataaatactgattggtaattacatttatttatatacgaccgtttttagattccgatatatttgaattaaaaatagaatccatgttatatacaaacccaacatgacatctattccgcattcattgtaagtttcccacctttaattttcatgggtccgttgtaacgacctaacatagttgatagttgatatttaatatgattgtacaaaaattagactaaactgaaccggtaccaattagatcatcacaaattagcaattagcaatagaggagaatggacgttacccggttccggcgaagaaagcgagaggtatcatcatctcccaaccatttatcgccatgctgccaaaagttttgttctaaaattaatcatacatctcgaccggagtaatatattcatttatcaatagaagataaaaacaagaaaacaactataacctttccgcaacaacccaaaaagcagacgtgagaaacaatgcgataagatttatatatgattgatgacttttctttctattttagtacttttaattaaacatatcaacataaacaaaataaaggtcattaaaacgacttaattaccatatggacaaggagtcaacggcgattcgagcattttgaagattcccagtcattataatcaaaatccgataataccaattctccaaactgtaaacaaaataaacccaagtatctaccgttaaaagttgtgtcggacataattagacaaatgtcacaaaaaaagttgttggtaccagagcatgacgcctgaagaagcagagagtttaaggaattcccaaagtccggttaaggcttcagaggataagccggtccaagtaagcggacaaccaccacaagtagagtaaactaacagaataagaacattgacccaccacgagatactaatcgtagctacagtccccacgactcctagtttaagcccgtccacgaacaaccaacacactaaaatatgaaccaccaatgcaaccgctgccgcatacgcagtcacctaataacccaaaaaaaaaaaatgacttgttcaaacattgatcagccaataaactattaaacatattttaaaaatatatgcttatgacatgcacatatttagaaaaaactgaaagtagtattttgtatatgaaaactgttaccttttttattagattattagacgtataattatgtttgaaacgattagatcgatcgaatacatactcggtttttgagctggcactgaaggaaacgttgaaggggaaaagacaaagtgaaggcgaaatgaagcggtatgacccaaatggcgacaacaccggacagctcagcgatatcgtccggttgaccaagaaatttaagaaccggagtagtgaaaatataagttggtaataacaagacacagcaaaagaagagaacaatccaagaacgctgcatataaactcccaacatatgatatttcttcgctccaaacgcttgtccacacagcgtttccaacgcactcgccattccaagctaaaccatttacatatactcatattattattttttagaaaaatgaaggaaaaaaacattttaatcaagattgtgtagatactataccaagaggccaaagttgaagccaacggtgacgttattaacgatggatatggcggcgagttcaagatcgccgagatgaccagcgaaagcttgagtgattacaagcatcgaatatgtcgttactcgactgaatatggccggaccaactatttgccatagcttttttgtctcaaccaaaattctatccttcaatccttcaccgtcttcctccgccgtgtgaggacttttcaacagtgcaactcttgactccgatccttcttctccatcacctcccctcatcgctaattccttttttttttagttatgtggaagaaatgaaatataaggagaaaagaagaagtgagaagaatggtgaagacgagagatgagtcgtgtgtgaattggtttttatctatatataaagtctgtggctagtgttataattcaattgtggtataaaaaaattcctattcattcatttataaacgtttatatgataaacttcgtgtctttttctattacagagaatataataaatttcaaatatatacagtatgaaaaagaaaagaatgaaatatttatggcctcgcaatttacaaatatgacgacaacaaatagataatttcctaactataatatttgacagcaaacatatttatcttttaacgaggtccatgccatggattttgaatctatgaaagtattcaaataaaaagtttggtacgagtttattttaagaaaaaatcttgagatacgtcatttgacaaactattaagtttccgtactagccttaggatttcgggttaggtttgctatctaagtgaatcatcataataagttaattaacactgaaaaaaggaaagccatacatttcgagttctattgaaatcgaataaaatcgacacgtgagaggcacgtggtatatattggttttgtttttttgggtaaacgtcgttttatctcgatcgacatgcgtcagagtccccatgtgatctcattgcttacatactaatggcctaatgaagttaagtatttgtctgtttgagaaatgtctaccaaaagaaactactccaagtctcccaaccagacccaacttaaaacttcatgtaattaagaacacagttacatcgtaactttacaagttgacgtttttcttacagccaaattatttataaagttataacggaatcttataatactcaaccagaaaaatagtttattcctattgtctcgattagatggggcacgtacactcaccgttaaaggcaccttagactttatactttgtctgcctctaatttattgacaatttggctgttacgttaatggcaattctttcttcaattcttccataccaactctttcattaattgtttactactgtccattcgaacatttcgactactattttggaaaacgaaatataaaattatcacgaggggttggaatttgtaagaaaactaatcgtttttcatgtttttccttgataaggaagaaaagcttagaagttacataattcgtgcgtcttctgaaatctaaagcgtggaccaatattgactttatggttggattgataatatatgttaaaggtttcagtgcgtttgtagccgtaaaaaatgcttctagaaaagaaatgttcaagtattttgttaatcacaatctcttcttccaactaaaatttccacaggcaaacatagtaaacaatttaacagtattgttgtacaaaattgacattttatatttttgtgatgtataattattcttatcctataaatttgataatttgcaaaatcttaaaacaatgcttataacaaaaccaaatgataataataaatcatttttctccacaaggaaatcaaaatttgatactttaaatttagtcatgcatgttgaaagaccagattattgtcaaaaaaaaagaagaagacgaaactcgagtttttttttttgggtgagaaccaaattcgacaactgttactgtgattttatcatacttgatacacatttttaatatcttgtgacaatgatgttggaccagcccaaatacgagaacgctattgaacgggctttgcaggcctggtgacaaaaaaaataacaacgtttgtgaaggagttatgacatggaaattaacaaattcaaatattcgtgaaacaaaagttcgatattaattgcattttgaaaggggatacttattgttttgtgaggtttaaaaggggatactttttaattgcatcttgaaaacatttcatagttctatgtgaaatttacgttctgaatgtctgtcttttttggaaacatataatatataagtttaggaaaataaattgtataatttgagtcagctatctttgattgataaagattaagcaatatgcattataatactggacagatctcagatccggattccagaagtatttaaaatcgctttatttggactcatattcatccaataaagataactcaatttcataaaaagaaaaagacacgaacatgattaaacagttctgaaatcacaagaatcagatctcgagaatacctgattttataaaaattatgaattttctttttgagttcttacattttattcctattaaaagagtgatgaaacatgtgagaacgaataataaagtaattttattagcctattactggatttacacaacatattccacgtagacaacaaaccatgaaaagttacacgtgtcaacatctcattttaactccaccgtaaacaatcgaataacgaaaaatcaatcaaattatcgaaattaacaccgaaactataaaatgtaaaacataatgttttcaagatgtaaacaatgagatcctaagccaacacgacggcgtaaataatcgcggcgacaagtgaaccgacgacgaaagctttgttggttaaagcggcgttaggtggaggagcggaagcatcggaaggtgtcggggctagttcgccggggctaactccgggaccttccggtgcaggtggagaagcggtaggggcatcagacgacggagaaggagctgaagacggaggagaagaggtgggggcaggggagacggcaggtggtggagtggtggtcggagcgggagttgcggcgggtggtggagtggcaacgggaggaggagtgacggtggtggttggagaaggagctggagcttgagcgaggcatgaggtagtgaagagagcaacgatgaagaaagcttcgatgatcttcgaattcattttttccactctctctaaagatttgtttacttaagaaagatagagagtgaagcagagttgtttaggtgaggaatgaccacgatggaactatataaagcgagagagagagataacaataattataaattaagtagtatctaattaaatatcttgcggaggggatcataattattcgattattattagtataaataatgattagtagctaatattcaaatgaaggaataacattttagtagtcaaatagcagaaacgtttaagtgaaaaaaaatagcaaaaatatttgatcagtaacacacacatatcagtgattaacaacttgttttatcgtaaataagagaatacattttcaaaactaaacataattaagtgatagatcattttatcactataatgtagtcgcatatatgtatatatataattttgtaggatttttaggttaactcaatttttagctcttagttgtaaatttgtcattttttaatgatttggtaagtatagtagatgagaaatcgaagttgagaaccaattctatccgttgagtataaaatcatcaatggttttagaagaccggattggtttagctaaatcgaatcatgattgtcaataataattggagagagaaaacgtataatgaagtagtattgaatattgtatcatgtttgtcttactgtctaatcgatccacccaccgataataatagtatactttttctgatatagtaaatagtaacgatctctttgcccgtatacgatgaaccttaatgacaaaaatacagatctatcaagaaagaacgatgtcgttattatcgtatatcccatgtgcgtagcagacctatcgggataatttttgattactggttatggttttattgttgtcgttaccgttggatatttgctgtttttcgttttatttattttcttttgtccattactatctcttgtgtttgttgctagtagtaacaagagttggagatagctgtcagagaattttatatagttgaataataaatacaaatattataaccccaaataaaacgggtacatatacattacaacataacataacaacggaagaagacatttgatagcctgtaaaggtcattttacagtgaatccagaaggttcgtattaatcattaaattaaaatataatcggtatttgacaaaatgaactgaattatagttggcaattttatgaggcccatatgatgcgaaaccaaccgacgattatacactatacctacaatttttattgcactgactcgattgattaatccctaactaaaagttcaaaatatttgcatccaactttattttcattagtgtgaacatcaatataaagaattgagaagatcattacaggttgtttcagatgataacgacaagttcgttatatatgcactataacttgctttgttacatatgctataaagttcatttgcaatatatacgatttgattacatcagtgtgggattcctagaggatgaattaagtgttaaaaatgaatctatacatagtagtttgctttgaatccatatgaaaaaactgttgaggtttaatgtcgaaatttctttatctttggcttcggctgcagtcaaaattgccgaaagaccacctcgactccaaaccattttcttgataattgtaaaaaaaaaaaaaaaaaaaaacatgatgtcccatatgcgtgtctaataatatatatagccaagaagcatatatttatttaggggaagagaatgctaaagcatgagttttgtgctggctttatgttgttgtaactcttagagcaacatgtattcacttctaactgaactttacataatttaaagcatgatttggattatctaaaaaaaagttagattatgatgaatatacaagttttttttgttagtggaaaactctcatttcttcgagtaagcttctccatacataattttcattgtctatatatatattgatctatttgtaattgtaactcttgaaagtttggaaaatatttgtaataagagataaacaatgatatgggccgatatttgcgaaactgatttcaaaggattcttctttatgggcctatagagttttgggcctttctaccaaaactttcgcgacaagcgatatgttagggcacaaggacaattcgaaacctgagaagagagctagagcttgtcagatgttaggatactcctatccttgtttccaaacgggattacggttaacgacggcgatggcgccggaaattcacctgaaaccgaagaaccctagaattttatgccttcatggattcagaactagtggtcggattctccaagccggtataggtaaatggccggacacaattctccgagatctcgacctcgatttccttgacgctccttttccggccaccgggaaatcggacgtcgagcgtttctttgacccaccgtattacgagtggtaccaggctaacaaggttcgttgcaacaaaatcctaaatttccttgaattcagtattgatcattgacactgttaacactatcagagtaaaggttgttttttttctctagaaaacagagagatttggtctaagtttgtatacataatttgatttgtgtgtgtgtgtgtttgcaggggtttaaggaatataggaattttgaagagtgtttggcttatatagaggactacatgataaagaatggaccttttgatggtcttcttggtttttctcaggtttgttttgattctttggcgagattttagtactgatcactttcatatatatcagcaggaggatcgtggaccgttgattcttgatccattcttgcagggagcttttctaactgcagctattcctggaatgcaagaacaggtacataactgcataactgatcataatcctggttctgagattgaatctgcttatgatattttgaagaatgaaacctattgttagagtagttttctattgttctgttttgagcaagtgtgtgatgttgaaaccatttatatgcaacagagaggttgaatctgaattgaagaatgaaacatgttgttttaatagtttgagtaagtctgtgatgttgtaaactgttttgtagggatcggctctaactaaggtgccaaaagtcaagtttttagttatcatttctggagcgaaaattccagggttgatgtttggggagcctaaagctgctgttaatgcattctcatctccagttcgttgcccatcactccacttcataggtaaactgttactacgttgcgcatgttcttgacttgatttctcggttatgttgtaatgccaagtttctgttgtttgaagcttacgttagtagtgtgcctttagtgtagccaagattggcatgggagtgtttagactagaatctaatctgcagcactacatgttaacgttagagattctctcctacaacatttgatatgacataagagacaacttgtttgtaattctgtatcggttttgctgcaggtgagagggatttcctgaagatagaaggtgaagtgcttgtagaatcattcgtagagccagtggtgatccatcattcaggtggacacattataccaaaactcggttagtaagcatgaaaggctgatcatttaagctctgattttttttggagaaatatgcaattgaaataagtaacataagatctgtctcttcttaatttactctaatgagcttatctttgtcttctgcagatactaaagctgaggagacaatgttgagtttcttccagagcattaggcagatgctttctgatgaatcaggttctgtaagaagcttgatgtgactgagagctactccagtatggtttactttagattagatgatcttgcaattttataaaattgtgagatgtgattattcttctggtttagtctttatccagggacaattcaataaacgtaaattattaaatttaccaaccaatatggattgcccgttcatgtaattacagtttatagagaagagccaaagatggtcaaatagtttggtacaattgtcttcctttaaatatatgagcagccaatatcaaaaactctattcaaacttttttctttgttataggaaaaatgttaggagaatttaacaacaaaaaaaaaaaatgatggaagaacaaaaaatatggaggggggcatcaaagaaggtgagttaaattattgtcctttagatgtattaatggtcaaatggatctcatgataatctatgagttccacttgtaacaaagttttacttctttttcaatctacccccttataccctattaacttagccttgtcggttgctttctagtcttaaaaaaaaaacaaaatttcaactctttttttattcttgtatgaaataattgattgaacatatcgaattacagatcatatgattacccctcatttcaaaataaatatatgataaacagtagacgtcgacatgggttgtgtaatttcagacttatatgtatacccatcataagtattctcacgcttgcaaagctttaactgtttagttttcatgcacttttaacaaatcatcatcataatctattttcaacaatttgcttatatcttgaaatagttgtttggtttagtttttgtgttgttttccctgttctcatgatataccaaaccactattttaataagaggtagaaaataatttctcgtgagaatgtctagttgtgaattgtgatgaccgtatcaacattaatgtatagatatatgcaataaattgaatttcaaagaccctatcattgacttaggaaatctattaactcatgaattatgtctggcataaaactgttgaatagtttttacatgtttcttttgataatactacttctgtctctttaagtttttgtgtaacctatttatgatttctaattttgagattaagaaattttgaaattcggtttagtaagaaatgtaacgttatgatgatttacgaataatgaacggagacaaatcctctgtgtgtctccacgtaggaaagcggtttcccgccagctgacaagtaacacgtaagcacgtcatctcaaacgtctttcaggaatccatttgcttcatttcctcctcttattaatatttagtcggtgttttatatattttcagatctttatttttcttgtaacataaaaattacacttttttgttcatgtcaaatgagttttcattattcactcttaaatcttaatctctgctttgaaatttgagccgtacaaaaacattcgcatttattgttgatgcgacacagatgttacttttattttattatactattattctgaaggaacggtcagctgtatttttatagtataattttaatttaaatcatcataatctggttattgaaaaattatttcattttcaactttttattgttttataagattggaaatatttgaatattgatgagagcgaatgttggtttccttctcgaattctcgtataccaatgctaatatttctttaaagaaaatactccatagtatgttttttctttaaatttaattagctacgtcaacaaattttttatatttctcacaaataacttacgtaaattcatcatgcaattttgtgttgacaagaccaatgaccctcgactgaattaatgaagagactagtcgttaaaaaaataatactcagttatatgagtatataatagtgctggtcgtttaaagaaaacagtaaaagcatagtgaaaggataaaaactgtcgtcggagatctaacgtcagcataagttaatcagaggctgagaaatgatcatctcatacgtttcgtcttcacatttgcaactaatctacaagtatttaatgtatcattaaacttttgtttacttgatgacacaaaataaaactaaataaagttttattttagtgtttatatatttatactgaattatttagtaataattctgaaaagttgacaacaaaattcagaccttgaaattattaagggcattactgattttgatgtgattagactgcccatcactttattgcagaaaaatattaatgcatatatttatgctattggcatatggacaaaaataattatcgcgtttattttgattctatcccctttttttttagtttcccaaaaagttatctctaatatcatctcctctctctttttgttttttaatcctacactaagctttttgtattgttgtattgtccaaaaataacaaaagcttatggaaaacttgtaaaacccataagctacctagtgtgttttaagatgagccctagaactactcctgaagaagacaaacatgtttaattatatcattttaattcaagattacataaataagtttttagtgtgtcatttttagaagaaaattagtaatatttcgttcaattttcacatgtaggtaacaatctttacaactttaagtaataacccaggaaaaaataaacagtaaatggaatcaagtaaacacgaactcaaatcaatttctttttaacgtgtctttttatatcataaacatggttaaaatttgtgatctaatacaagaatagttgactaaaacaaatcatgcatggtcagagcgatacgaccaaattgaataaaataataggaatatataattaataagaaagtataatagctcttcaagtaaaattagaaagaaagaaagaaataatgcaaaagataaagaaagcgttacaaagtgtggttgaggacagattatattagattccgatttccaataaacaagaaattatatagcaaaaataaaagataaaaataaaataaaaacacttctcaaatcggcaaatccaaaagagagagataaaagagagaaagataatctctttaatgtccacattatctctctcttcttcttcaccttcttgagaaacctcctctccccaaaaacgacgtagtttcacatttctcgacttcttgaatggagtttgaagacaacaacaacaacaacgacgaagagcaagaagaggatatgaatcttcatgaggaagaagaagacgacgacgccgtttacgactctcctcctctctctcgtgttctccccaaagcctcgacagaaagtcatgaaaccaccggaactacttccacaggcggtggcggaggattcatggttgttcacggcggtggagggagcaggtttaggttccgtgagtgtctcaagaaccaagcggtgaacataggaggacacgcggtcgatggttgtggtgagtttatgccagctggaatcgaaggtaccatcgacgctctaaaatgcgccgcttgtggctgtcaccgtaacttccaccgcaaggaattaccttacttccatcacgcgccgccacaacatcagcctcctcctcccccgccagggttttaccgtcttccagctccggttagctaccgaccaccaccgtcacaagctcctcctcttcagctcgctcttccccctccacaaagagagagatcagaagatccaatggagacgtcttcagctgaagcaggaggagggattaggaagaggcataggactaagtttacggctgagcaaaaggaaaggatgttagctttagctgagaggattggatggagaattcagagacaagacgatgaagtgattcagagattttgtcaggagactggtgttccgagacaagttcttaaggtttggttacataacaacaaacacactcttggtaagtcgccttcaccacttcatcatcatcaggctcctcctcctccaccaccacagtcttcgtttcatcatgaacaagaccaaccatgaatcttgaatttctttgatcactagggttttaatttagcttaattaattacttgagaaatttgagagacaaggtttttattgtttaatttatgtacccattttcctctttgatgatgatgttgatgatgttggtgatgatctttaatttctggttaattatgttttgcattagtagctttttaagtctcttagcaaaatctttgattggtctgactataaattactgacgtccttatttgcatcacatttgtcagtgtttgaatttatcatgttttgtgtatgaatctatatgaacttgatcctgaatatatatgtacatgtattttgtgtatgcattatttatgtcttctttagcatatgatttcatttttattttattttgtgcagcctaagcttttacttgttgacattgttatatattgtttcttaagttcctggtgtttttgtgtgttattatatttgactgaccattattttcacccacacacacatttgtagctagctagatctgatagtgttcttgtttcttaagttctaggtttttgagtgtttatatattttcttgatcattttttaccacacatatctaatgataaattggttattgtcataattatatcttatgtgggattctatatatatatatatacttgtcatttaattgtccaatgagtgtaggactcaaatgtggatcggtcggaatttccttgggatggagatctctgccctaagaattaaataagtatttcaatggcttatattattatcatatatgcgtgaattaaataattttttttttccattggaaatgaaaaaggtgaaataacatcagctagctgcggcaacagtattctgattcctgggaattaattcttcacttaaaaaaaaaaaaaaaaattaaactcaaaacatgtcgatgcatccaaagcttcttatatcctctttatgtcttatattatatgtatatgtatattgttctttgaagatctggggaagaaggaaacatgtgggcttctttggaagcaagaaggagaagataggaaaacatatgggcacacatacattactgcattaatgatgttcttcttccaaatccctagactttcatctggaactaattttgtttactttttcttaagatcactcattcacttatttcacctctaatgataatttaatttgagtagtaaacattcaatttaatcgagcaaaaacatattcaattggttccataatcatttagtagtaataacaatatcaatttcaacgagttacagtaattataattaacaaaagtggttcggcctagtaatttattttatgcaaagtgtgtttgtgaaaaatttattgactaaggtatgtgtacatatgaacatacattatatctctctatcttacatcgtatacctgagagaaacaaagataatgaattcagatgaaattagggttttgagtgatggtgaaatgcaaagatgcagaggaaagagggaaccaaaatgattgtaaaaggaaagaagaggcagataagattcgagtccccatctcacggccatttccatatatagcttttcatgtctcaacctctccatcatctctctctttttctctctccctcagacagtgcagtaaaactcgaaagagagtgagagagagacaaatatacacacaaatgaagagacttgagagagatgcttttgcttgataaggcaatctctacgcattcttgtccaagctaaagctgcacactcctagagtgaagatgactttgttgtggtcctctttcattttctcccttctttcttttttggtccaaaatttagttttcacaaatttcaaacgcgtttacctcaattagttcattgatatggctaatgaatcggatcgaatttaaacttcgatcaacacttgtttgaaaataatgattatagttgcatggaccaaagtttcagttacttcgcaaataaaacgcagttagctcaaccgaacaatatctaattcgttagaaaattcaataattcagttgaactttaatacaaatcttggctaagttagatcgtaattttacgtataacttttagttgctagaaattttaatttcgtctacattgcttcataaatcgagttataagagaaataatgatgaggacatgtataaatattatgattatagactttattcagaggggagaaatgtttactcgctgatgcagtaatgagaaatgttcgtaccatacgttggagtctgaacttgtaataaatgttcatagaaagtagtgaaaattaaagtagttaagttaatttatcaaaaaaagaaaagtagttaagtaaatgaattttagggttgtttttggatgtatggtgaaattgaaattattgaggagcataatattttgatcagataataatactatttatttaaacatgattttttaattttactgtggtcctcttcatggaatctttcagtcaatacgcagaaacccatcggacaacgacccatcaatgtgtatattatgtaccatacatatattatatgagtgtatacgtttatatcatcatcatcatcattatcatcaccatcatcatcattctcacagtgtttttactgtggaattgttactgtcgttatgcttcatttagggaatctaaatgtgacccgcaagcagggtttattacctccctttcaagctaagtttcgaaacaagtagttttttaatatgaaaaagtaaaaagctttattttgattgcgtaaatttaaatgtaggacaagctagggttagtaggacaagctagggttagggttttatatttctttaaactatatgatatgggcatactcttagcttcataaacattgccctaatttgggaaactgatgatgattcacgtgcaatgaataattttttttttctttcctgctttacatttcaatttttacttattcttagatatgtagttaattagtcatgtcgtaccatgattcaaagaattttacgattgtatggaattcttaaatacgtaatttgtttttctttatacgaaaggaaaaatattttagatttgtatttgggtctagtgggatggtttgtaccatcttagttgaatttgctaatctaatacaaattaatagttgggaaaaaaaggaaaagtattttctctttagttcatatgtaaaagaaaaggcaaaggttgagaaaagtttagaagctataacttttagcaacttttatttcagggaaaataaaaaatatataatttggacagttgaatgactgtgacgactcattatgacaaagcccaatgaaagaattataaaagtttatttgttttgtattgttgtcttcacttagtcctctgtccaactccaaatagtttcttcatttcaaaattttcacacaatcgtacacagacatataattatgtacgtatatatatatatatatatatcattccgtgaagattaattttgactgtgtctaggatcctaaaattgaacaccattaatataattagtgaaaagctaaataaatttaaaagtctagtatatgcagtgataaaatcatattcacaaagttttcaatgacagatgatctttcacattcaccaattacatgatggttattactaacattatttattttattgattattgagacatatagaaaataactgaatacaacaaatgttatgagttaaaattgtaattattttaaagaaaatatataccaactagcatttgttaatacataatttaagtttttttcttacacaactatttcacaagattagaccgacttgtttaatgatgtatagagacttttttttaaccttttcagattaaaaatgtctatttaaaaaatgatacaaaaaggggaaatcttcataaattatctccacgcacaattattttatttcaggatcatcaaattgctagtatgccatgcgacaatggtagacccaaatgattaaatttaatgaatatagcattggcccattttcttcatagttacagatcctagaggtttagtggacctggagtccaatcattttatttattttttgttaaaaagttttcaataaaatattgggattttggagttttgttgataaaaggtataaaacgcaaaagctccataaagcacaacctagctttggtctctttacgtcaactttaagtcaaagacttctgttcgtgggcccaattctaagcccattagtgcgatgcgcgctttatctcacaacggcaccgtttgaattaaaaaaggtcaactctaacgctcaacagaaccgatacggttttttcccgctatatttatttggcgggaaccaattaaaaaaagctctgtttttcctttgttttattttctttctcttttttgctatttcctgccaacaaaaaattcttataattttatttgttcagtattaccaaagctataaacaaatcaaatattgaaattaatacacttttatttatttaaaaatttttgctttgatttattgtcctcttttttcaacctctcatcagacatcatactgattataataatgtaagaaaaaaacagttttttttttaagaaagatgtgtataagaagaagaagaatcatgggtcttaaagctgaaacaacaagccgatacttctaaaaccccattgggtgtttgtgaacataagtctgagccatcactctctatcatttcccctatcttcttcactctctcctgcaataaaaggaaccacaaagtttaaagcttgacacttttgtttttgtctcttgaacacaaacacaaacacaacacacaaagatctcttcagctttttctggtgtagaaaaacaactaatggaaaccaggctgatgttttggattgcaagatcaaatcagaatcaaacatgtttttgtgggggcagattggttttagatgtgactagaggctgtgcagtgaatgtgtgtgtgtgacagagagagtcacaagacacatagctagagaataatataatttaaagtggtctttggtctactctccactagttttggaagtcaaaggattcagacccattaaccggtttctctttttttttttttttttttttttactttttggatttataattacacatattatgtgtatgcaatgaataagttagtgcacacacatatatacacataaatgtgtcatctttaatgagttcaaacttctccacaactggcatttccttgaaattgaaccaccaaaggctgctttatatgtgtgtgtgtgtttggtattaaaaaacaatagatttatgagtttgagatgtttggtggattgttttttaccttttgaagtagtgagaaaagaggagagaaggaagagttgtcaaagtgtactctctgcaattctccagaaacagaaagtgccacagcagcagcaacttcagaaggtctaaactccaaaaagtcaatacctgctcactcgacacaaccaccattttaatccaaaatcataaaaagcaaaagtgaaaaaaacaacaaaacccaaaaaagcacaaaaacaaaagtggtcaagaaaataaaacataaaggaaagactttttttttcacctttggttgtgctggctatcacttgtaatgatctagatatcaatgtgttggatggttcttgatcacatttactcatctttctcaggaaatatcttatgtatgagcatggagttattgctctcaatctccatttcaatttgttcaacaccaaaagctccattctttggactgatttagcctcaaacacaaactgaggatctccaacctgttccgaaatgtgatcaaaccgcaatcgattcaagacattgtcgggtcgaatagaacatctcgacaatttaacgagtttagaggagaacctgaagatctatcaacattggaacttcagtttcttcaattttggctgccaatgataaacaagccacagccaacaactgcaatatccaacctttgccactctacaagaagaatcacaaatcaagaagcgaaaaaatgagactttttgatgatgaatggctaaaaacattatcaatcttttagtttaaccaatgtgaacttacaggcaaatcatgaaccgataagaatcgatccaagtagttcattgctaagcaaaaacacaatggtccaaactggtgtacttcacaagcctgttgtaatcagaacagaagaaaagatcaattagagatctaaaactctgagactgaagtgaatctattgtcaattgaagtgtgaaagatcggaaattgagcatcagatttacagatttaagacaaaacctctctatctgttctgcataagcctctgatctaatagacatagcaacacactctttatgttcagatcattcatcaaaaggattgtgcttttcacaatttgagcttatacagatcattcaaaaccaatcaacatccaaatttcaaaaccagaaatcaaaatcaaatagagaatcagaccttccaaatccaattgagggcatctcttcttccaacattcaaatccaaatctccacttctaagtctcttgatgtaatcatcacttggcaaatgctgcttctccttctccaccatctccatgataatctcctcactctccgattgagaaaaacccatctgaggaatcgaaatttcaatcggagtttcgtcaacaatcatgccctcatcatcaacgttgctctctgtacataaaagactcagttctagattctcctctgccattacaacagagtgttcatgtaagaaaaattgatcctttgtatttggtaatcgatctaaaaggaactgtatcgttagattgtcatctagagattggggaagtgaaagaaagattgggtctttgatatttctgtatgccctcgtggaggaaggggtttttgttttggggttgagggtaaaattaaagggtgaagcttttcttttttttattgaggaagttaagaaatgtggtttttagggtaagatggagattgtgtgagaaggagagaggctatatataatggtgaagaagatgaaaaatgtaagataaaatttgaagattttagaaagtgaattgactatcatggtaacaaatgtgagaagttggaaaattatgaaaatgtggtaggaaattgaggtgagaattgaaaagttagttggttttattcgttgtattttagtttttagatgatgaatcgagtgaatatcgttggtagttcggtatcagatttgcgccataagttttttggaatttgtatttcggtcttgtatgcatagttaacagttaacatttttgtatattcaatggtaaaatattgaatgttgaaagatttaatcatagtatatgtctttacatattttttgatatttcataattttattccttgttttaataacagtaaaatatatatagtttgactaatagtttaaaacagtattgaattctataaatcttaggaaatattttttaacaaaattgtttgactaaataatgcaatttgatattatgatcgaaatatacgctgaatcatgatattttattttcaatatccgacattgaacaaaataaaaatgaccccaaaaaaactaatgtaaattcatgccacaaataaaaagaagttttgaatgtaaaatttgactcaaaatccatctataatgatatttgaaccatttgctctggtagatctttgaccactgttttttgattctagggtcacttttagacacaataatttcaatatctatcatcattgcatatacctttgaatgaaaaagcagactgtatatttgtataagaactacgtcatatactcatttaagttcaaaatatggtctctgtttgttacacaatatggtctttgttttttacacattatggtctttctttaatatggttttagtttacccaaatatactgtcttctgttttacccaacttataagatttaactataaggtttttaatatttataaaagtatttatttttgttctcttgcaagttgaggtcaataactagtgctctatcacctccaaagattctacattagtatatttgtaaggagattagtattttttatttataaatagtaattagtaattttctaccacatgaaaataaagctagctacgcgacgagttgcttgaaaacaccacacgagaatttcttgcttgaggttacatggcaaatagtcatcgagccactggtttcaactttcaactactatatagtcatgttatggaatgaaacatcaaacattagctcattgtcattttagttaacaaagtcgtattttgtaggaagcaaatgaattacacaaaattcattgcaataataaagaaaatttttccttgaaaacgattatcttactttcaaaaatcaaatttcattctatattatatctgttattcttacaattttcatattttctcgtttcttcattatcagtcggagtcttaaaaaattgtaaagataaactcctgttcatacaatatattcttatccaactaagttttagaaatcaccgatgcgcaccaaaacacacagctttttgaaattgtaaagtagaaacaagtctacaactatacgaccgcaaaaaaccctttaacataaattaaaaaaaaaaaaaactatacgaccgcgagcatgtttgatctttcggtttgtagaattttataagatataaaagaaatgtattatatcattttaccaaggtgctcttttattttgttggtagtgtagtagtaagtatagtaataacgtgattgtgacaatcacgtgtcagctaataaactttgatgtttttactgtctttaaatttgattatcttttcgagcggtgagaagaaacaaaagtttaagttaaagcaaaaaaaagaatgaagcgtttttttttccgaattaaacttaaaaggctcaactatttatagatttttattatctttcatgcatgcaaatgtgaaatgccagacaaaagtggtccaagtacacttttgatgttttgctactctttgtgtgttctgagattctaacttgtaagtttctgcctctctctatataacttttttttttggtatagtgaatatataattcgtgttttatgcacgcctatgtcaacttaacaaacactttgctcgagtcacatggcctgatggttcaaatccgaagttagatgttttttaaaaaaattataatgaaaacgtcggctgaatccatcggtttggtccgacctgtaaagaatttaaaataaatctaactaattagtgaagtctaaaacgatttaggtgatcatcagttttagggtttcaaaccccgatcaaatccaaatcaaatctaaatccaaatttcaaacccgaaaaactgattttatatccacaatttatatattacatattctaattgtcaaaatatgcagattttcagatatttaaaattatttaaataaatttaaataaaaactgttcaaaaacttttaaatattttgtgtattttcgagtggtttgaataagttatcagactctaaaatctccgaatactaaattcaaaaatccaaaaatcctcaattcccgaacaagtacctcatttatttgtgtgtttattggtcttaaacgattaggtaccgagttagtttagcaattttagtgtgttccaacgatcgtctgttcagttttctagtgaatttcgactaagtgttagtgatcagatttgttggtcatttgtgtgaactggtagccatttgttcttttaacgattcgggaccaagttagtaattttagtgtttcgactagcgatcgtttggttagagcgattagatttgttagtcatttgtgtgtgatcattttgtttcgacacacgcccatctacgcagactagacatacacacattcaccctacacatacatctacacacattcaccctacacatacatctacacacatgttacacacgtccccgctatttcatccacacccctatacacacatctatgatctatacatgatccatgtcatcaaaaaacaaaaaaaacatgttacaatagtttatatacacagagtctggttaacttcaaaggctggccaagcagaagatggaaaactctggacacagcccaatatgctctgtttccttcactaccactctgcaaaattaatcaagatcaattttcattacaattctttaatcttccgctgtcaacaattttgcttcatgtataattagtacgcttactataaaaatccaaaaatctttttagacaaaaccttttatgtctttgcttttcacaaatattaaaaaaccattcagttttcctagtacagaacatatataaaactcagaataccatacacataattgatctcacaacatgatatatataattgaagacacacatatataactaaaatagtttactacactaactaaacagagtcatgacagctaaaacagagcatcttaatgtttgttgaactctataaaacatgtatggaagatgacaaacacagcaattaacagagaaatcttctaatggtaaagggaaaactagaggaattaattattagagcagagacttttacctttatatgccttcaaaaattcgtttctccctcggctaatgagcattaagttcgagtgagaacgagaactcaagtagcagaacagaagagaacagaactaaaagaacaaaaacagagtgtgttcgacatttgtaagaatataaactgaataagagaattcagatttctgaacgaagaaaggagtacttatagactcataatctgaatttcttacaaaaaaaatattacatcaaacggtcgaaaaatgttaccgtttcacaacgttcataaaaaatgttaccgtttcacaacgttcatattttcctactctcaactctcaagtcaaatcaatataggaaatcgtaattacgctcaagactctcaggtaaaatattatttgtttttttcatttaacagttgtattatatctctgtaatctcatgaaaatttgaatcgtcatcacgcatttacttgtcttccattgatttatgagtcttctataatgatcactcttgatgatttaggttgtctaaactccgatttttttttttttttttttttgtttcagctacttctccgatttttaatacgagtttcaattatacataatactactactagaaagcaaattcttgaaaacaactgaactgaaaccaaaccgttaacttgaccactcataagcgaaatcatctaaaacgctacactaagcgtttcatcagtctcgaggaactcacaaaccaagctaagatattgttactttgtttgaaatataaaattttgagaagaaaagaagcaaagatgaggataaattaccaaacaaaaacagagttgatacagagcagcagataacaccaaagctgtgcacataatctgtcataaaaaaacaaacttttcttttcgacaagttttacagcaaaggaggttgaactcagattttcggttacggttgcaggtacattacataaccgtcttttcttccattagaccttcaggcctcatccatctgctcctgaataaagcagtcgatcattgagttttggggtgttattatccgaataatcttataagactatcaatatgcgagtttctgatgatgcaattgaatatgaaagtatagaattgggcaaacctgcatatcggaggtccaaagggttagattgtcccttagcaactgcatgatgagagtactgtccttgtatgactcctctcccaatgtgtccagctcagcaatggcttcttcaaaagcctagaggtgatgaatccaacaagaacaagttagaaatgcgatgataagatgagctttaatagtcttatagaatcttgtatatgtgatgcatgagatgttccggattcaatatgcaccaaaaccccgatcagattctacacaatctcgtatgcataatgtatgagatattgtggttctaaagtcttgtcattttaagagattctactgacaaaaggaataatttggttaatgtgaagcgttagtcaaaaaagttatatcaaaagaggactttgcagaatgtctttttctttagaatctctgtttattaaaaagaagtgggtccgttcagaaagaagaaagagttactttttataaacaacttgtctatttctggtaaaggtttcaaaattccttcaaatcaacccaacacaatgaatacaagatggggccaataggaatagtaaaacaagtggtcaagttagtaactcaaaatgcaaattacactctccctaaccaaacttaagacaatgatgatcagacagagaaactctacttgaaacaaacatgcagtatagtggatgaagaaagagtacctgtttcgccatgctacaagctttctctgaagagttgagaatctcgtagtaaaacactgagaagttaagagccaaaccaagcctgatcggatgtgtaggtgctagatcagcaactgcaacgtccttcaatacaaaaacccacgaatgagcaaaaatacatattttcagaacaattatatattactaagacatattagggaagcaattgatcttaagcccaaatagtaaaagttgactacttctaacgataggatcaatacaatagctagattcgagaccaatttacttattatgagacaactgattacagattagctaattgaagtaatctcagaaatagggttttagctccacaacaggatcgattcaaggatttagggaatcaaagatatacctgagcagctttgtaagcgatcatagtatcttcagcagcagttttcctctcatcaccagatttaaactcagccaaataacgatgataatctcctttcatcttcaggtaaaaaaccttagactcactggcagtagctgaaggaattagatgcgaatcaagtaacctgagaatcccagaacagatcgaagaaagctcagtctcaactttagatctgtaatccttaacaagcgacacgtgttcttcgttcttcctgctctcttccttttgctcaatcgaagacacgattctccatgccgcacgaagagatccaatcacgttcttatacgcgaccgagagaagattcctctcttctacggtcagctcaccggccggtgtagctccacttacgagctgttccatgaattgaaccatctcttcgtaacgctcggcttgctcggcgagcttcgccatgtagacatattgatctctgcttaaggtcgtcgccattagagaagaagatctcgctttttttttcgatttcaccggaaaattttgaaatcggaggaaatttctggaagaaaaaaagaaattgagaagaagaataaaaagcttcaaagccgagtcataatgagctgtaaaaggaaattctcttcactcgcgcgtgattaacacactctgataaacgacgtcgttagttgaaataaggattaacagcgtgaaacccacgttgagtgtacgaggcgcgtggctaggtttcggtttttttgataagagcgagtgaatggacgataataatttagtgcgtcagcttccccaactagttgacactgttcaaggtcaaatgttagaatacgggcttttgattaggctttagatgggctttttgaagcctgttaaagctattaccttgctggctaagcatatgcgttttcggcgtgacctggacacaactaatgtggtcggagaaaaggcatatgaagacaagaaaaagttgtccaaattctttctttcgttgatattaatttttcttttggtcaatactcatattctttaatttcttatattgttgattaaagaaaattaattattttcattttccaatactttaaatttaaaagaccggatcaaattaattgaattcgttttttgtgggtttttatttgttgattcattgtaaatttcaataaatgagaattgatgaaaattatgctatattaatttgattagtcaaatgagataattgagatccggcaggacatttgtttggcatgaaaaacaaaataataaagagttggttaatcaaatgcgaccaaatcattagatcgaaaaatctgaagaaatcgattactcatgtttttaatactggaaagttgtttagattatttgggttaacaaaaatctgtatacactcgtagttcttactaatttataacaaaacctaaattctccaaaactaatgtaatgcaaattgattctctgatagacgcaccgtcacgcgcgcataacgttgccgttatgggagaaagaaagggcgtatcttcacttgccacgtcagttttacgctaagcgtaataaaagtcgccgtcaccgttaattgacgtctccatccaacgccgctcttcttctccgctctcaccgtatatatttttttcctatggtggcgcaatttttactaaacttacataaaaaaaaaggaagattaaataaaaaaagagaaagaaatataagagcttcctcaatcgatcttccatttttcttcttcttcattgtgaaatttgagtccaatgactgtcactggtcgaattttccacctgtagtcaatttgaagaaatttaaccagtttgttctactggaaaaatttctggtttcacacttgtgttgactctttcactggaaaaaaagaaacgaaaaaactccgaagagtcttctctgggcagtgtaagtaagctaatgcattaacattttttggcattgagaagtagatcgattcttcaattttgtgagtttccgttcacgatttcgctttctttcatgtgaatttcgtgaaagagagaaaaagtaattctcatctttcttgctacattctctttttgccgttttcactagaatttcgcttttgtagccttcgattcgtttgatttcgtttgatttcgtttcagttgctatgttttagggatttcattatagaactgagatttgattgttgaatgtgaatgaaaattttgataatttttcttctgaaatttaggttaaaaggtaaggagcaatgttcagggaagctggcttaagaaacataggagaggtacgaacaaaaactttatctgcatttttcgatgttgtttgattttgctgtaactaatgcttgttttgtaggatgttgattcgaggtggacgattggtaatcggaaattggatgctaagtctgttcccaatgccaattctggtcatggttttggattcaggagtgctcctccattgtcttcatcaattaaacccgtgagaggtaataacaatggtggttcaagttcagacatggacattgcttctgattcagatgaagagatattcgagaggcaacactctcctcaagattatagaattcatcttggtttgcctcacgtcgcagctcaaaatggacttggacgtaatggtgctaaggtctttggtgctgctgatgatttatctgactcagctactagcactgaagtttcatatgtacttactttttacccccttgtctctcgttttcctttaccgtttctaaatatgttctgatttgattatcatgtttacaggaagcagaagcttgtggtgtgcggaacaatatatcttcacataatgaatttgaaagacgaaatgttgaggctggaacttcaggaaggactctgaacgggacaagcacttcaacaagttcattgcctcgtttccccacctttcatgcgaggtttgagttacattgctgacttagattttgctttcttgtttttttaatcctctgtgattattcattccatcattttttgtgtggtttgaatgcagtgagcaaggtccatggtctgcgatgattgcctatgaagcctgtgtacggttatgtcttcattcatggtcaacggatagtgtcagcgaggcttcttacttcctcaacaatgaatgcaccataatgcggaatgcatttagtttgcagaggtttttccttcattctgaagaagagttactgggaaagggaccttctgagttggttactgagacgtctgttccaaaatcgaagaagactattggaaaaattaaactccaaggtatacacatttgtatcttttttcccttccactgtattttaccacttgtagaaatcgcagtagtgcttacaagagtaagattttgtacagttcgtagaattaaaatgggattagatccaccacctggctgtaacattgcaacactgacggtctccaaggaaaagctcgaagttgttcgtcaccatattgtggaactgaattcgactttatcttctggatggaaagcagcgaggaaagttcatgtcactccccaagttcctctaaatggttcactttcgcgtcaaagtttggcttacatgcaggctgctgctcgctaccttaagcaggtctcaaaagccgttaaaaaggaaattgttacatctcacactggaccacaaacttatgaagcagtacaaggtatttcattgtactttggacataactctttgtcttattttcgtcatcagtatttgattctttctgttttcagaaacatattcatgttcattgaggttaaagagctctcctgaagatgatcaaattaagacgcaacctggatctggcgaaacgtttattttgtatgtacccttgtttattgacatgatctttaatgatcattctttctattcctttctttgtggatcttagtattcttttctcttgtagcttaccagatagtcttggtgatgatttgattattgaagttcgagattcgaaggcgcaacttcttggccgtgtcgtagctcagctagcagctatggctgatgatccggtaagattctctctctctcactcgcattatgttttcagattactgattccattagacgctgaagctgaagatcttatgttttttcttttctttctaaatcagagtgaaaaactgcgatggttaccaatatatcatgaaccagagcatgaactaattgggagaatccaacttacgtttagttactcaagtagtttagatgaaaaaactaagtgtgggttggtggcagaaacttcagcgtatgatcttgtcctagaggtggctatgaaagcagaacgatttcagcgtagaaatttattatttaagggcccgtggcattggatgataactcgatttgcatcctattacggggtttcagatgcatacactagattaaggtaatcattgagtgactaagaatggttttagtgtcttaaatttctgtcgcagtaactaaacgatgttttgtgagaacttgcagatatctttcttatgtcatggatgtcgcatcgcctaccaaggactgtcttgatctgatacatgattttctattccctattataatgacaagcaaccacagggctgtattgagtcatcaagaggtgggttagctttgatcatcaaattgttatattttcagtattcaagtagcttacttcaacttttggtcctttggtcagaatcggttacttggggaaattgacgaacaaattcagcagattctcgcttcagcatttgagaattataaatcacttgctgaactgtctttctccgggatgaaagatgtttttgagtctgctacggggactccagcacctgctatagaatcagctgtcaagctttatggtcttctcaacgatgtattaacccccgaggcacagttgaaactctgcagatactttcaggtattaatcaaacttgtatctgtttcttatccatcttttctgaagttgtatatgtgattcatcacctacggaaaccacttcaggctgcttcaaagaagaggtcaagaagacatttattggacacaaacgatttacttaacaaccgtagtgaaggtgtaccagttgatcccatggtgcttgcagcttcgtatcaaaagatgaagtctctaatcttaagccttaaaaatgaaatatccactgacatagcgattcatgactgcaatgtgctcccaaggtttgtttaagactcaagtaaaaaatatgcagcacatatgttaactatcaaacagctttatcttttatcttttttaatgattttctcgccgtcaactatcaatcagctttatagaccttccaaatcattcagcggcaatatatagtgttgatgtctgcaataggctccgggaatttcttctcgtttggcctcctcctggaccatcacctgcggttgttgatttagttattacaactgctgactttcagagagatctctctagctggcacataaagtaagttcactggtaattacttttaaacttccgttttttttatacattcctgttaccaataggcacctatatattgtcttgtcatgttgcagtcctattaaaggtggcgttaatgccaaggagcttttctattcatatatcacaacctggattgaagagaaaaggcgagttttatatgaactctgcaagctagagacggtactaatcctgcaactgagttcttccaagtttagttatatactgcagaacgtagaacaatttaaatcccttcttccatacaattgaattacattctatctgtttcgcttttcagtcaaaagcatgcgtcgagattccgggattgacttctccttttgtcgatgagatgtatgagagactcaatgggacacttgatgaatacgatatcatcattaggcggtggccagaatacgcaatatccttggagaaagtaagtgaaacagcaaagacttcgttcaagtccaatcatatgttatgttgttgttttatggatcataatccaagttgttccatggaaaaaggttgtagcagactcagagaaggcaatagttgaagccatggagaaacaatttactgagattttatctccgttgaaggaaagtaaaatatttggcctgaaaattgtcaagaaattcaccaaaggcacacctaatccttattctgttccaaaagaggtatgtcgcttattgtatttttgcaaatttaacttttggatgtaagaggagaagacattgaccccattttggtataatttcagcttggagttcttctcaactcaatgaaaagagtgcttgacattttacgcccgagcatagagaaccgcttcaaatcttggaattcatatatccctgatggagaaaacagagtcttgggagagcggttaagtgaggtgacagtattgttaagatccaaattcagaagttatatgcaagcgcttgtggagaaacttgcagaaaatgtatgtactctctagttgtcttccaaaaaatttgattttcttctggtttttgttctcacagccacctttgttgaaatcaatttcttgactttgttatgttaacagacgaggatacaaagtcacatgaagctaaagaccatcatccacgacttaagggaaaccacagcggaaccggatgttagaaacagaatgacgtcattgaaggatttgctagacaaaaccatcgatcatctacacggtgttttcttaccagatgtgtttgtagcaatctgcagaggaatctgggaccgaatgggacaggtaagagacatcattacatttcattataccggttggttttgtcttctgcttttacctctactgttctgttctgtctattccaggatgtgcttcgtcttttggaagacaggaaagataatgtgacttggcataaaggcccaagaatcgcagtttctgtaagtatttgtttgaaactcttttgggagctgtaataaaaaaatgttggttgccattttttcttatcttattctttgataactttaggttttggatgaaatctttgcgacacaaatgcaaagcttgcttggaaacggtttgaagcccgagcacttggagccaccaagatcgatgatggaactcaggtctatgctatgcaaagattctacggattacagagaagggggatacaactactagtaccagagattgtgagccggtgaagaatctggttcttgtttggttcattggtatggtatggccattgccaagtttctattctttgaaccaagcaaatgtagttaaaagaaggcgcgggggtaaacagagagtttaactgtacttgtatgttataaaaaaaggttgaaaaaaatagaagaaaagagactctcgcatttttctcaagttgttgtttgcaacgaaccgagtttagtcgttctctcgttaactttagttgggccccggcccactaaggtatgagtataaaaatattcgtcgcctgagagattcgaactctcgcgggaaaatcccactcacttagcaggcgagcgccttaaccactcggccaaagcgactacttgctgatttgcttggtaattatacaactaaactaaaatatatgaataattttacatgaaaataaagtttgctccatggtgaatagttagtcttgtctgtcttaaaaactaaagagatttgttgtaatgctattgggctaattgggctttaagattttgtaattgggctcagttcatcatatatgaaaatagtagacgacaaaaaaaagaaaggtaaacgacaaaaaacaagtgcacgttgattccctcctttcttctctattcactttctctctctaacaacacaccattctttctgatttcttcttcttcttcttttctctctctctagctttaatctctccagatgcccaaatcctttacccgccgtcgcttctctaatcgccaccatcttctccgccgtcttaccttccacatttactcttactctcaccatcaccgtcttcgtcctcctctgcatcaccaatgttaatcacctttccacgattcgtctcttccagattgattctggcttctcacgtttgagattataatgccggtttctcttgaaagtgaaaccttagggtttcgttgtctattgattgggtgtatgatgttggtttttcttctgattcgccggcaatggagatctgcttctgtgagaagagaagaggtgattcgtctcattgctttagccaccgaggaatcttatttggcggaggaagttcgtcccgccactgttgattacggcggagactcggtttctgatgtttaccgttgtgccgtttgtctataccctaccactactcgttgctctcagtgcaaatctgttcgttactggttcgttcgtttcctctcaattcaaatccgaggatgactagtttaagaatctgatcacgaggaaaagtttagatttttaattggttctgtttcttaaaaagatcatttattgttacctttttttggtagttcaagcaagtgtcaaattcttcactggcgacgaggtcataaggaagaatgtcgatcgcctgattatgatgaagaaaaggaggagtatgttcaatctgattatggtaacacttgagattttagcttttgatttataaaggtttcacatttggtggtttgtgattttgatgactgaaagctctctgcagatgctaaagagtctaatgtggattttccatctcgtgggactgcgtatgaatcatcatctaatgtgtctgttgatgttgcctgtgatatgtctacaagtaggcctagtattcataaagtgcaacctagatctgaagctgtggatttcactacttctttaaacataaaggataatctctatgagaccaggccactaagtaggaagaaatcacgtaatcgtacagacaaggttgagtcagccagtaattattccaaaggaaagactgatgcaaagctgcggaaacttggcaatcaaaattcacgtaggtcaggtgattcggctaatatgtcaatttcagatcaatttttgtcagttgggtttgaagaagaaatgaatgcacttaaacatgaaagaattacatctgaaccatctagtgcttctgctgcaatgtcttcgtcttcaactcttctcctaccttcaaaagctaacagtaagccaaaagtgtcacaagcttcaagtagtggattgaaaacatcggtgcagaaagttgttcagcattttagacctccacagtcgtccaaaaagtctcaaccttccagttctattgatgaggttattacgatatatgattggtttgtaccttgattatatctactgccatgatcccatagtgacgttgctgtattttttgtgcagatgagcttctcgtatgagttgtttgtgaaactttattgtgatagagtagaattacagccatttggccttgtgaacttagggaacaggtacgtatctatctttaacacgtttcttgcttttggcatgaattgatgatctaatgtgctaatatatttgtgtttgtcacttatattattacttttgtagttgttatgcaaatgctgtccttcagtgcttggcattcactcggccactgatatcataccttattaggggattacactctaaaacatgtaagctgcacaccaaaacaattttcactgctcttattttaagtttgtaactatgtggaatcttatcttgataattggattttcaggtagaaagaagagttggtgttttgtttgtgagtttgaacacttaattttaaaggcaaggggaggagaatctcctctttcacctatcaagatcttatcaaaattacaaaagattgggaagcatcttggccctggaaaagaagaagacgcgcacgagtttttaaggtgaatcatatgggttttgcttttagtagcttctatcggtttttcaaagttaaatatttttgcaaaggtgatttacattgttctttcataagaatgccaggtgtgctgttgatacaatgcaatctgtttttctcaaagaggctcctgcagctggtccgtttgctgaagaaactactttagtaggccttacgtttggtggatatcttcactccaaggttataatattattaggaactgtgtattggctttagtaccatttggagctttttttgttgtaatcccaattattgacattttaatgttgaatactacacagattaaatgcatggcatgcctccacaaatctgagcgaccggagctgatgatggatctaactgttgagattgatggggatataggaagcctcgaagaagcacttgctcaattcacagcatacgaagtcctagatggagagaaccggtatttctgtggcaggtacttgattttttctcttggaaacttaatatatacgttataaaaaactactactaattcctttgcctttggctttcctttttacaactacagatgtaaatcttaccagaaagccaaaaagaaattgatgatattggaaggacccaatattcttactgtcgtgctgaaacgttttcaggtgagagtcttcatcctcgttagtttgaaggtgtctactattgttgggttaactcagaagaatgatttatttttccatgcagtctgataactttgggaagctgagcaaacccatccattttcccgagcttctcgatattagcccgtatatgagtgacccaaatcatggggatcatccggtttatagtctctacgcagtggtggtccatttggatgctatgagcactttattttcaggtcattatgtttgctacataaaaacccttgatggagattggttcaaaattgatgacagcaatgtaggtctcaatatatcatttatactatttagataccaattatgctattgtctatttctcgaatcttgattttgattctgaattcgcaggttttcccggttcagttagagactgtgttactagaaggagcatacatgcttctttatgcaaggtgaatgaatacaaagagtggacacatatcataaaacccaactcttgttcattttactaatatagctgaggaaatcctcttctttgacagggattctccgagaccggtgagcaagaacggtggtcggaaatcaaagcaaagaagaaatttggccgcaattccgtcaagaaagggcaacaagaaacagagagacggtgataataacagtttgttgccgcgtgtggactggtcgagtggaagcctgtcgtcaatgtttagctcatcggacacaacaagctcatgtagcacaaaagactcatcaggtattgagaatttatcagattacctgtttggtggagttgaaccggtttggaaatgggatcgtcataataaatctcaaacgtttgattgagatttaatttttgagtttgatgaccaatttttgactgtgaaccaataaagcaaaaaaaaatagaaaatgttaacattttttgggtggacttgaaccggtttggaacgtcatgattcatatcctctataacgttttactgaggtcatgttttttgagtttgatgaccagtttttgactgaaccaattagcaaaaataggagaaggtacagttttttagaccttttttgaatccagtaaattcgaaatttaataaatggatttctcttattttgaatttaacttttaaaatttggaaagcataaaaaattactccctccatttcacaatataagttgttttggactaacttttttgtttcacaatataaattgttttcaagtttctatgcaaattatatattattttaatattttatgattatttctattatgcagtctcttttataattggttgaagtttttaaaagtaaatattcttaatttgtgtgcttttagctaaaacaacttatattgtgaaaacggagggagtatgtaaactggaatccaagagaattccatggaagtgagagcttttctttgctgaaactgttcttacaccaaataccaccattattggcggaaaaacacagaagtacacacaaatacagagaaatccaaatccaaatatataaatggcctcgcagtaaaaaaaaaaaaggatacttacagaaaatgaaactttttcttcttattgtttcatgtcgattttgtatcttttaagactcctcctttctcaagctctccaacgaggtccctaagagagggaaccttcatggctagagttctgtagagtctagagtatcgagcccgtgtgccatcagctgttctagctaaggccagtgaacttagagcttcgggcaactgaccaaacacttgtttcatttcctctaagctcatgttttctaaaaccgaaggtcttggcacaactctcactatttcgcctcctttaggttcttgaatacgggcatccgctttgatcacgagctctgagttggagttagctccgcattttatgatgaatggagctgaagagcctcctgtgttgaattgcaaaacattccattgagacacatcggtttcagtcgaagatattgaatctattgaaggtctcttttcgtcttgaagattgtcctcttgttctggaattgtctgcagtccaataaaaaaaccagcacgtaacaaggtatcatcaaacttctcaacatttttggatcgatcttttgctggacttttattcatcacttacctcgaccaactggtgagccgtatcaatttctctctgtgcacatggatgatcaacatcaagcagagaaggcattcgttcgttaagttcatcaagagactcaagcaatgcctttttcttgcttttactcaaaacgtggacagaggcttgtcttgttatttccttcaaaaagcaaaccatttttattttttctcgtggtttatcataactaagatcaagaaagactcgtaatggtttcatatgataagagtaataaataccttgacttgcttcagtatggcatccagagaaatgagggaggctaatctcgagtcttcggctgctgtagatggattttgaacaggggaactgccttcttccaaggtaaacaaagctgcatcacttctcatttgttgcaaaatctgatatagtagaaaatggaatttaggttcgagaaaaactctgaagagataacaagagtgggattaacgatatgacatcatacggttctttttcagggtttacctttcttcttttgtggtcaacagactcgagagctgatcgaagcttcgcgacttgaccagcatcttctgcctcttccgaagccaaagtaccggcaatatcctaagcaagcattcccatatcagatctcacatggcaaacaagttcttcagcgactaagacctagatctcaacataatcccttaacagatttcttatgtaaaatcagttgctgctgaaatcattctgaaatttccaccaaaaaaaaaaaaaaaaacacacacacacatcaagttcaccttggacatggtatatttacctttagatgctgcatctgagaagtgtagactcgttttgcatactcagacaaaagctgtcctaaagcgtctgtgtgaggtggcaccgcagctcctactccagccatccagccatccataattgctgtggaaagaagctctaattggccagtggttactcctgaaacatcatctgctgtaacagagagaaactcaaaactttctgcaagccatgacctaatctgtctttgcagttcaccagccggagtgtgaacaaataaagcagctaagggtttgtttccaatggcaaaacttttggcttcatcttgtatctccctcagctttcctccagtcacttgctgcctcccagtatcctaagaaaaattcagaaacaagagaagcacgtttgtttgtatcttggattctcagttattaggttaaagaaaagcatctctgggagtcatagctatattacctggtcatgtccacggattcttgaaactacagataccaacttacttttcttttctggctttaaattaactttaaagccataaatctgctcatcataatatcgaactggtgatctacctgggctgctactcccgctggagcttctagttcgaccagtatatggcttctccaaaaagcgttcaacaggagaaacctaaaagaagtgggtgacgtgagattgatcttgccgggagaagaaacttgtgacacataccagcaggaaaagctaaaaggaaaattagctaactaaatctggttatgctcaccttgatcgactgaagctcaggtgatcgtgcaagtaaggaccttatgtacaatatcctgactcgagaaacaagcattgtatccattactctccttggttccattttccggataaatgaaaagacagaatctctgatctcagcaaggatttcatgctctctggaagcaccagcctttatgacagctgctaagacctgcaagtcaacaataacatttgttaacatataaacatataaatatttgaacacctatcccaatcagcgataaatgtatttttatcttcaaatactggtagaatcaattcagttatttacatccctgaaaaatctaaatgggtactcaatatcaaactattaacccgatggcagtaccagcatcagaagcttgtttgcgccatcagctatggctgcaagaccttcatattgttcgggatcaaaatcattcaatgcagctgttaagtattctccagctggagtggtttttactaattcagagctggattttactaatgtaatcgtgccctcatttttatccactgaagacggtaaagtgcccgcgctatttttcctgtagaaaatacagatcaggtggtaagggaagtaaacaaaatagagaagacagaaatttggattaaatggttccaagtgatcaaataactacctgtcaacatctgcaggctgcactgttggtgaagcttttgatgaggggctagatacctatatacaacaatggatgagaaagcctaagcaattagctagctggagcaggaaaatctccatgtgtatggcaattagtaacatttgatgaagagaagagatagaataatttttcttccaacagctccaaaaagagaagcgtccatgatgtgatactatatcatgtgcagatactgaatcatgtgcagtgtaggatagagaaaagaatcacctgagtcgagctagccactgacttttctgttaatctgtcgaacaatttttcattttcttcatgcaacctctgcagaaaacaactactctcttcagacaaatgttaagttcaaatatcatctgggtaattcaaaaataaggaaatcataaataaaagtgtgctcaataggaagacgaagcagaacctcaatcagtgcatcacgttttttcaattcttcctcaagtttcttggtaactgcagaagaatcgagtgtgttctcagctgctctgggctgaggttccaagggatctctcgatcttgtcatgtcagacttcagagctttacttagttgtgattctaagtctttcactttagactgcataaaattatgtgaaaaaatggaagggagtgtcacggctatcatattcagagaaggctacttgaaagctatttcaccatctattttctgttacgtagatgtttaagataaaaagggtaggagacatgtctcgaagtttagaaagtagatactaatgaagtaccaacctggagattttgaatggtggaatcttgttgttgcgcctgcagcttttgttcctgttctaactgtaaaagttgagctatttgatttcttaactgaaaattctgctccttttctattttatgtttgtctacaaccatcgcattctctgactgcaaaaacaaataagtaaatcgttagcagaaaggaatcttataaggaataattgaaataaggagacactatcccagtcagcatcgaagacctttaaatctgattgcagtgtgaatgaaactctccacgctctctgtacttcattatagagcagtacacattggtcatttgcttctttaagtgcttgttttaaacccgtaacctcttgttttagacgctgattttccctctctttctccaatacctccttccgagcatcatttgcctacgggaagaaaggatatgtttacaggttggtactttttcaaactacgtgtacatagtaagttaagcaaaaaaattacatgtcccaaatctgttcttcagagaaataaactaaactccaaaagaggtagagatcaaaccaacagagtaattaagtaaaatcctaacagactgagtcaaaaactatgattctatacttatattttaacaattccatctgttatatgtatgaatgtcaatatatgagaaaagaaggagagggaggacggaatactctaattccacttaccacgtctctccatttcttaattgtgtctcgattcccaaggcttggtacagtatttcgagctctagcagcatagttgagacacgacattatttcagacaagttccgtgcacttggacaaatgttgacgatcatcaatgttttggagctccctcctgcacgttacaggataataggatattgttctcatttgaaggaacttcaaggaatggaaagaaatcctcaacacaaagataatatatatttagagctaaacgtagaggcacacgcactggaaaggagaagcacttacctagtgaatctgcaagtattcttgtaagaaatgagttctcgtaaggaatggtatctctttttgacgtcaaagatgataaaacatctcccagcctacagaacccgacatatatgcagtaagtaaaggggaaagctaattaattcaaagatttaagctaacaacacctatacatgaagaaaaatgtcaaagatatggaattcacttgtaagggaataaacgaaaagagggaacggagagagaatacttaaaacttacgcggaaattgaatttgttacatggagcagatcagttacatgatctccattgtcatcctccacagttaaaccttcacttccagccaggtcaactaaagaaagcttgctaattacattttctctcgtaattgtgttgctataacaaatgtgtatcgagacaatcctaccaagagagcagaaatccgttaagaaagtatcatgagtagagaatcttagcagagaattatatgcagaaaaggagtcaagcatataacaaaacttacagatgggtcacagtagactttgatttatcattccctctattctgaaatgcagagttcaggactctcatgaactctgatggattatcaactttttcctgtgaaagttctataaccgattcgcgtaaacccatattgatctttggcaaattgctctgacaacccgagagtaaatccctgacctaaaaaatgaaagtttctgaattagaaaagactttcaatttccattctagtatcgaatgcagtattacgacttcaaaacgaaaaaacaaagcacctgttcgttataaagctcaaacactgaaacagagaaactgaactgagatgcggaagttgaatcagaattggccaagtccataagttcctcaaaacaacgagcatataaaccacggtcctgattagatccttcctgagaaaaagcgacagcatataactaacatcaacagagagcaattgcctgatatataaatctctcgtaaatcgataagataatactatgaacgtccatgaacttactatgaacgtccatgaacttgcctatcatatttaaatcctgtcaaataacatgaaacttttttgcgatttcaaagttcaatcacatagatatcctcggcttggttagagccaaaaagtattgaaaccataaacatgcaaataagcagtaaaaagaatgagtatattagaagactgttcataccccctgtcattttagcaacttcgaaaaaattattttgtatgcatgtacctcaagttagatactaagcataacaacatcgataatacggataccaaacaagacctatatctaatttcagagaggaaagggaaaggaggggcaaccatggtgtatgtcttccccgcgtgagtttggccatacgcaaatatagaaacgttcgatccatccagagcggattgcacaaaaggttggacatcactgaacagtgaagctgaggaaattttactgaataagttccggattacatatttacaaaagtattggaaacagttcttaaggagtattataactcaccttgtccaacttgaggcccataaactctatcaaattcaaattccttcttgggattggacagagtatcatcactagtgtttacgcgtatagtgcagttatcaggaaattcaatgatagagggaccctcgtcttcaaataagggtcttgctcgacaaaatacctttacattccctgaaagattaaacaataaactatacattcagggtcatatagaacaatctaaacctggtgtgatcaatatcaatagaagtaaggatagagaatgacgtcggaaatggaagatgtgcacctttggtcgtcagtaagtcattgaacagtctcttcttctcattgataagtggagatatcctagcctcagtctcaagtgcatattgatctgtgataggctatgcagataagtgaacaaaacacattcccgaattgtaacaaaattcctatcacaagagatacatagatatagatgcatacactctaataatgcatagtggccaaaaataaactacactttcacatggaatacacagacgggaactaaaaacttacccagtttacgacttttatcagccagaacacctaaataacgtgtaaccctttcaagcttcgcattggagtactcttgaagatcagtagcttcctgtctcaatcccacataatcgtcctttgcaagctattcaaccaaaaccaaattttcttaaaaaatagcttaatcacacaaccgcaaaatagcatcattgtacttaaaacttgtacaaaacatcacctctatactcgtctaaacattaaaatcatcatctttcacaaatttcaaactcatcaatagaaagagcttagaaacataattcttactcaaacccaaatatacaaatctcagaaaaacattatcacacctgaactttatccttcaaactctgaaccttagacgcaagctccgacgagtgcggtggaagcgagttcttcgggatcgagtaccgtcgaagcatagaagacggtgtccgatgaacgccttcctcactagaaggcgacttcttcgattcgaacccagtcacctcccagttccacatattggtactcttctgctccgccattttcaaattcacgaaaaaaccctaatcctattccagatttcagcacaaacccaccaaaattctcgagcagacaacctcagattccaaatgaaaacattcaaaagtttttgaaatttattacctccaaatccaaaaaaaatgtgtttcttacttttgtctctttgtctctctctcagatataaaaatgaaggccgaagcaatgagtatcatacgatgtcgtttttgctttgttcttcttctttttttaataaacaaaacaaattaaaaataataaaatgacagagacaccaaaacgtcttttaagacacaaaatattttgtgctgtgcgttaacgacgccttctcgtgttcgatttcagttcattgttcggtccttttttaatagtaataccgatcaaaatattatagagtcaggaatttatcaaatagagcttgtttatttgttgaaaatgtagaagaaactaaaaaaataaacacaatgatcatttcaaaattacggtgcaatgagtatctacagtagtctctgtatttattttacttttcgtatcagtagtctctgtatatattactaattttaatacgataaaaggatggtaccataagatgatgatcatgacaaaggtgcaatgaaaatcgaattttaattgattaaatgataatggcacacgcagatctgtgtggtgcatatgattttttttttttgttattaattcttttggaattttggaccgaccagatagcgtgacattgaaggtaaataattactcactcgtatttataccaagaaaaaaaaaattgattacaaaagttttggtgggtctactttatgaaagaagaaaaaagtgtgtgggagaaaaattgagctttagagggataacttctgaattctctaaaatctacatataattttacttaaaaaggcccaaagttattgtattatttttggaccttaaacagtctactacaatgaaagggccttatcttaattgttcaggcccaaatgattttaagcattgacactcaaaacaatatcttaaaggcaattaaaggaaatctcaaggcactaaatatttgtggaaaaaaagcttaaagtctatttaataaaacaaaatcagatgatgtatattgacattaattacaaaattaaatgaatttctaacccaaaaaaatggttagattcttggcgttatggtactatttactttacttgcgctttatataaactttggataaattcatgaataccgttgtttaataatttgttcgatgtgatattgtaacccgaactaacccaaaactttaactttatacaatttgtttatgtacgaaacactttaatagtatgattcaactcatcttctatacctttttcctaaactttaaaaacttttttttaatgtatgactaacttttttttccttgaaacacactatcaagttatcaacgtacagctaaataattgcttatttgaagcaaaaataatgatataaatactgaaaaagaaaagtagaagaatcatattcacacgccaacaaatcgtataatgctgcttcatctaaaattggtccttcgaaagtcacgtccatttagctctcacgttctacccgaatcaattttaaatccttaatttacagtcataacacatatctctgataacgttattttctggatatgtaagacgcagaatttcatttctattaggttaatttaccaaccggagtaatttataaatttgtgaaaatctcgcctaacacaaagtgaataataataaatcacttgatagatgtttagccaaacgtagatataagagtaatcttattgttatttttgatagtactataggacagatttattgatgagaaaattaaaaagtgaaaaaagtgggtgaaaagaagagagcagaaattaaaaaaaggacgagaagcgagaagagtgcatcttttgatggatattgaaaatcttaagtcaagctgtaatgggaagaaagaacacaacaagtgtcggtgcctctaagcaaattccacataattctaaagaaacaacataattattattttatttttttcgcaatatttttaacagaaattgtttttattccagccatgcgtatatataagctgtcttttcggaaaaaataaaaagctgtctttatctatcccaacggtccaaaaatttaataaaatagtattataaatgcactcgtaatacccaatgttttatttttcctgaggattaaagaggcaaatatactagcctttttgttttattaacagctagctaatgagcaaaatagctgtagatagatagcgccactaatctaatccaaggccattagcttatgttgtgtatgatgtgatacccccaagtctaaattagtgatggtgacgtataattaataatggtaattttgacgacgagtatggaacgtgttccgaatttttctctcaaataatgcgttttgattttgattatcaaaagattccaaaataaatacattgaagaattcgttctctaatcttctaaaccaacataataaacttcggaccactcgacgaccaaattttcagttatgcgtaattactatttaagtcaatcaattctgttatttaatgacattaccaaaaatcttaataatcctaggctatatgtaattatgtacgagtcacacataattaatatagatccgtgatgtatgtctctagacgttatatataaaccataacagcaaaataaattataacaacacatagggaaaagattttatgaccactaccaaatagaggcagtcatagataacaaataacaaatgaggcatcgaactttaaagcttaaagatttaataccgcatttgtatcgtcattaagtgcgataattctgtaattatgtaacgttgtcattcaggagtccggaaattaattaattaattaaactatccgttgtcgtgtcacgagaataaaaggttaaattcgccgtgtttttattaagaggagactaggtggggcccaattgagacagacagcaaatttaatgaacaggtgtccatgtgagacgcattcacacgctctctctctcaagtctctctttccattactactactataaaccgttctgggaacttgatcaacatttttaatcctaaaacttcttttgagtgtgttgaagaagaagaagattaaaattcactaaaaacccgagaaaagtggaagaagaaggaaggaagaagaagacaagagagcattctgattcatgtgactctggtttcgtttctttctgtgtctctgctgtgtcgttttctcggcatatttctgatctttcgttctcggttggtttttggtttctgggtattgattgattgattcaaaagtcttcaactttcctggaaactggatctgggtttatccgtttttactcgtctgagaagagaaaaaaggatgaatccttatgatgcgaaagacagaagatggattctctctatgttcttcttcgtcgttttgttctgcaacaacgtttcgacttcgtcttcttcatctgtgagttgggcaaaactaaattttctatctttccctgtttttctgggatttgttttggttggactccggggaaattgcaaaatatcagcttttgggttttttctttttcttgtctctggaaagttcactgattttaacatatcctgaaatagtaggtttaacttgcctaatgaagaaatttctcaattttgaatacttttgtagaaagagacaccaacggtggttgtgtttttctgtattgattattcttaattctgtggtttgttgaatttaaagattttatcaggaatttgactagtttgggaccggaatatatatacacttagacttgttcaatttcaggtcaagagtctctcttgagttaagtagtgaagttctcttgattatatataaaatcaaatcactctttttttgcaggaagttatcacgattaagccaagacatttatccttgctaaagagtgctttacaacgggtaaaattggatgattttataaaagtttctttgtcgatcagttttcgatttcagaaagtaaaaaagtttgatgagatttcttgtctttataatttcagtcaagtggagaacagtctgatctatggaggccattgactgatcaaggatggagtccttgtattgatttgggaaattctccttgtaagtattgacaatttgtttgaaaatttcttctttagtttcagattatattgatctttgactaatcttgttgtcttggagcagcattaccggataaaaccgcgggatatgttcaggtatttcttgatggaggacttaaccagcaacgaatgggaatatgtgatgctgttgcagttgcgaagattttaaacgcaacactcgtgatcccttatcttgaagtgaatcctgtgtggcaagattcaaggtaatgtttcttgaaaaattctctgctgttgaagagttgtgttgttgcctcggaagctgatgttgtgtgttttttctttctgtgtgcagttcttttgttgatatttttgatgtcgatcattttatcgattctttaaaagatgacataagggtggttagagaactacctgatgaatactcttggagtacaagagagtattacggtacagcagtacgtgaaacacgagtgaaaaccgcgcctgttcatgcctctgcgaattggtatattgagaacgtctcaccagttctacaaaggtctgtcttgcacttaatctgactaatgaaagtttaagtttttgactttcagactgtaattgtttggagcttttttgttctattttgtagttatgggattgctgccatttctccattctctcaccggctatcattcgaccacttacctgctgagatccaacgactaagatgcaaagtgaatttccaagctttacgttttgtccctcacattacatcactcggtgatgctcttgtcagccgccttagaaacccgtcatggagaagcaataaggaacagaaaaatgttgatcatttaggagacatgaccaacccacacagaagacaagaacccgggaagtttgctgtgcttcatcttcgcttcgacaaggtaaattatactttattccaatcatcctattcaaaacttttggtgattgttgttagttatttgatcaagattttcttcttgttatgtttataggacatggctgcgcattcagcgtgtgattttggcggaggcaaagccgagaaactctccttggcgaaatacagacaaatgatttggcaaggaagagtgttgaattctcaattcactgatgaagagttaagaagtcaaggacggtgtcctctaacaccagaagaaatgggacttcttttagctgctttcggattcgataacaatactcgtctctatcttgcatcccacaaggtcagaattcttcagttacattacttgtttaaagtctggttataatgtgatgtagcagaatattaatcacgtatttttgaattacaggtgtatggaggagaagctagaatctcaacattaagacaagtattcccaagaatggaagacaaaagaagtcttgcatcttctgaagaacgagctcgaatcaagggcaaagcttctttattagctgcacttgactactacgttagtatgcacagcgacattttcatctccgcatcacctggaaacatgcacaacgctcttgttggtcatcgaacattcgagaatctcaagacgatcagaccaaacatggcgttaataggacagcttttcctcaacaaaagcatcacttgggtagattttcagcaagcgcttggtgaaggacatgtgaatagacaaggacagatccggttaaggaaaccaaaacagtcgatttatacttatcctgctcctgattgtatgtgccatgtttgattagtttttaaagtcttgatctttagatatttcttataagaataaaaataaaaactctgattcttgatgaggctagtttgtgtttagatttgtgttcttgaggcttaataaaaagagtatagtttgattagaaatttgattgtgaatgaatattacaaattattgtagcgataatgataatttgatcaaaaataagtaaagaagatcaagtggataatcccttattaacaaccacaagtgtctagaatatgcttattagtaataatcccttcagattcatcaaccttcagattctgatgaatgcactatttttattttgtaatcatcttataagaatttattctaatatttgagaattgaagatgtgaaactttatgaacaataaattagcactagtagagccttgaattgtggccaagaaaagctgacgacctattggaaaaaggaacctagaattttgtttctttgttttgttctttttatgacgtctgttacccataattttgcaggttttttggcgaccgttgttaattaattaaatatattaacatatttattactcataccatttattatgggtgggtgatgttttaataaagtacttaaagttttaagatcaatccttgacccttgtgatatacgagtagtataaatttcattgattttaatagagattttaattaagcatctctataattacacaaaaatccatagagaaaccagatgattgaatcgggggaaatgcatgaactttaattatttccgattgataattccaagattttgtatcatcattataccaaaaattaaaattaacaagaaaatcgatttgttttattaaatataaaatgttgatttattacgtataaatccctgatatttgttttttgttttacttttctgaatgggatataatcaagtgttatgaagtgtatagtagaacggtggaccgacagttgccacgaaagcaagtaaaccgctaccaaccgtcggatcaatctttattggctttgcagaagcgaggcccaattaaaacggcctaaaataaataaacaaaagaaataaaaaaaggagaaaagagagtaatataaatgaagcagagcagaagatgagcttctctgtacaaagtcagagaaaagtcagaataagaagaagaagaagaagaagaagagaaagagagtcagagacgacgacggacgaaacgacgctattcttacgctttcttcgatcgtcgatttgattttttcccttccttcttatttttctcggtaatttactacgtttcgcaattaccggagatttttctctcttcttccttccgattttttcgcatttatttccgccgaattttccggcgaagccttgccgtcttttgacggacatcggaggcttttgatgatcatcctttgtttcttcaattgtcgaccgctttcgcttttctattttttagcgattgttttttttaattggaccaccgatctgatgaaacattaattactttccattgatgaagaatcatcgagtgaaaatttaaaaaagaaaaaattgagatc

SEQ ID NO: 966 - DNA, 7240 bp, Arabidopsis thaliana
ttcgttgtgtttatcctgaaatttcattgaaaattgaaattgagaagaaaaaattctgttttaatcataaaatctcgtgtttgatattatgttgatgagttaatctaatctaatcgatcacatcataaacagtattaatggataagagattttctctattggcatctgaaatttgtgttaaagtctttgtgtttggtcagtgtcatcattatgttgacattatgattgttttattgatggttgattttatttttaaattgtcaacaggttgaagtagaagataaagcatcgatacatgatggctgattgataagagttttctccggagaggttcggagttttttttttagaaaggaaacattaaaaaagatggcagtctcttttcctcgtcttccgaggtggttgtgtggtggtagtaacactaaagatagagagaagaaagagtcaattcctaaaggatcttcttcacttagtccttcactgaagaagactactactagtaagactggttcttcctcttcatcagtgaagaagaccaagagaggatggattggaagaggaggatcaggatcaggaggggaagaggataagattgggaatgtggtgtttcctgaacctgatgatccagagtggtcaattggttgggttgagccacatggaccaggttttaaagctgaggatgatgattgtggtggctttgtggttttggttcctctttacaagaaagttatggatggttcagggaatcagattccgaatggcttcttctctcctgctgctcctggtaatgtttgtttccattatcatcatcattcattaatagctatcatgtaaattatctgcatgttcttttaagaacttaagtaattggtttgagtcttttgtttgtaaattgatttgttctttgttctgatgacatgtaaactgcagatgggaagaacatggaacagtggctgtcgtctatggggaagctataaattggagattgggaagaataagactagttctctgttgtttcagtatcgagatttaagcatcgaataatctaaaaaaaaaagaaaaggaaaataaaaaaaaagaagaagcaagattcgttcgtggatatagcttctggagacttcttttgattttctgtttgaagcgagtgacaacaaaacaccaagtcatatctcaagaatctactaatggacaaagatgatgctgatggagacctagcaacatgaagatgaatatgatatgatttgagtattggatatttttcatgtgggtgtttttttccggttgtgaaagcgtttctgcttcacttctgtggtcgagataaattgggtttggaaaaggagaaaaaaaaaaaaaatcttttttcttttgttcctttgtggtttgatgatgtgtaatagtagtaatgtacatgtacatatgttgttttcttgaaatcacatgtcatgtgcttactttcgacaacacaaaaacttccccaacaacgttactcacgattatgtgattaaacaaagtgaacccaaaaacaaactacattttgataagcattcagtttttgtcgccggaatcttttggaagctgcaaacccatgaggccgagcaaattggaagcaggaccaggaagtccttgttgtgaagagtaggattcaagtaggttcttaacaaggttaaaatctgcatcaactggtgtaaactcatcatccttctcatctctagtttttgatgattcctgcagagacattacattcatctcataaataccattacagtcaaaatctaagctcctaaattcactgagtctagttatgagagttacctcgttttgcttagaagaatgttgttgattcacattttcaaagcttttctcaagagttgagtttttcagttcctcattcattgctccatagtaggattcctcaaagctttccttagcatcttcgttagattcttctccttcgctatcatcttcaacgtcatctgcataccataacattttagtaagtcccacatcacatttcacaccttatagatcagtatatgttgccattaggaaaaaaaaaaaagtttaggaaataccaaaatccatgtccatggaagatccttcagagccatcactgtcatcatcagcttgttcgtcacgaccttggcttcctagcattgactcaatatctttcatgaaacgatcaacatctatactcacttctttgaaatccctacataagtccagaaaaaaaaaaattaatgtgttgagcttgaaattaacaaagagatgttcatgaaaaatgattaatgttcaaataatggataacctgttttctggaacttctgctcctttgtagcttgataccttgtgcatgaattgctgcatcgactttgagatatcaccgagatcaaaattgttcatgtttgcatcagatgagcttccagcttcttgcttctccttacctttatttttgcgttccttctttgagttataaaactccatctctttctgcctctcttgaagaacagagtttagttcatcttcaccatcgtagagccaagaatcattgtcagaagcaggaacttcctggcccttaaagtcatcctccgaataaggtaaagcaagaatctcatcaatacgtctcaccggtgcactcataatgtctctgcacataaataaaacaagtactcaagatcatataaacaactcaaagatgaatcctttttcactacctatagaaacaaaaaactgcaattacctagtcctcgaaaacgaagaactcttctggtggtattcctcagcattctccatcaacctcttatactccttcgaaccagaaagcaatccttcaaaataaccatacttctcaagattgtctttatacttgctccaactaatccctttcccatcttctccttccttcttcctctgctggtacatcatttccataccacaagctatcttcatccctagctcagcttcagagaaagcatccctgtcactgacactaggcattggataacaattcggtgcttgaaacttctgctgcactagctgcccatacatagcacgagacatcttgacaagaacaagcacaagcttctcttctcttcctttgctcagaaacttctccatcttcgctgcgtgtttcattgaatccatatcacgatcgtaaaacccttccacagcaagtgagatcaagaaaggttcatgcctaatcacttgagctaccgataccggaaccctaaccctaacacgatgcatattcctccacgctctttcaggataatcagatatccgattcttcaacgcagattgaactgaatccgacgcacgagattcgttaccacgctcgattagaaaccgtagagacgcaaccaaagaaggatcaggcaaacggcttctgggaactatgtggaggtcaccaccgcgaatgaagacacgattgagactagtctccggattaagccaacgcgggagatgaaaagcagcttcgattaggagaaactcgccgtcagtgtcccaaacacgaatcgaattagacggaaacgcggcggagattcgaaaaagtaaaaacacagcgaaccattcgtcttcgagattgtcaccgtacttgagcttcccgtggagatgaggtatagcagtattggtacaagcacaagaggaagagagagcgattgagagagagaaaggctcgtgctgccatatgtaaggagaagtaaacggagaaacgaaatcgatgatttctaagtgaagtgactgaagagcggcggaggagagggatgagtcagggaataaggagaagaaaactgtttcgtcttggagacgagaagtggtttcagagaagaaaggtgaagaagaaggcttcgacattgttcttgcttcattcaccggcgccggtgactgatttatataacagataaaaccctctgacttaataagaagagtttgacttttgaccattaatgaaatgaccaaaacacccttcattatgttcttcttcctttagagagaaacccaaaaaggccaaaaccgaagaattgatttttgtgtttatctttccttttacgatgtgttacggtcacaatcaatcgttgtcgtcgcgaagcagtctccgtcgccgatcgcatgacggagaagatgattcagtggtagacgatcttcgagaccggctggcggaaaccgaggcgcggctgagaagagcaagggcgagagaagctgagctaagccggaggttggagcatatgaagagattcgtttcggtgatggagatcattgagactttcttggaaagacgattccaagagcagaaagatcgaattgctcgccttttctctcctgtatccacgaaataaaaaaggcttcttcttccttttgtttgtttcttctttttgttgtgggatctctttagttttggttgtcccttgtctgtttgtgtttgatagtagctaatttcgaagaaccatagattttgttttgttgaagcttaaggtaaaatgaaaagctatgtgctttatgtccattttcatcaggttatttgtgtgttaagcttgtcaagtttgatcctttgttattgattactacaatatctggattctatagcttaagatgatcaaaatatagtgtttttgccaatttgaggttatacaaaagaatttaagaggaagcttgtgctgctcttttgctatgccagtcttgaataagagaacgaagggtgtgatttggtgtaagcatctggtaatcgagtctcaggtttgtcattggagatgtgtcatgtcccatgcttagccattcctgtatggcttcgagctcatacgaaaacccatctgctgctacgtgtggattcttcattacttcctgaaaacaacaacgagttagattctgaatcactgctataaggagaatggaaatgatatggatttgacttaacctgaagtattggacacatgaaaacacttggtatgtcattcggatctccttcatccatgtttgaattggttgcttcctcgtaccctcctttggttttaaactcatcggctttttcccttatcttaccaagctcttccattatctctttggttgaaaaatccatgtttcctcctctgttaactgaagaacacttcactgcaagtgcaccaaactctttagctaactcgagtggccacttaccagcggtttgatccaaatccctgagaatacttgtctggttcatagacatcgccttgagcaaaccatgccagttcctcccggttaaaagatgcagaagcaaaaccccaaacgccatcacatcaggtttcgtatcagattgatcactatgcattataagtccaaaaccggttattttcggaacaaggttacggtccaagaggatcttagacggcgtaaggcgaccatggacaatcggtttaggcttaaccgaatggagaaatcctagtccagagcaaacctgatgagctatacgaatcctatcatgccatttcagtatcttgcttcttctcgatttcctctgtgatgtgaatagattatccctcaagttcccattatgcatgtactcaaagagtaggcatttaggcctttgtgaacaaaacccagcaattgctaccaagttaggatgccgaatctcattcaaaagcttaacttttgctccaaaagcctcatctgataaactatcaccaatcactttcacagccacagttgtatgtttgatccttcctcggtacacatttgtccagttaccaccagatttcaatctcagtcgatcagaataagtctctgtagccagtctgatatcctctgcaacatactctctatacccacacttcacttcttccttcgaaaccgaacctatcacctctctctccttgcaaaactcaatcctacggttgaacacgtctctctgactcctaagtttctcaatctccgttatcatctctcctctctgtaacacaaccctctctagctcgacctcagcctgtgatttagcctccatcatcgtcttaactttgcttgagagcacttcttgaagctctgcaagtgaatgtagctttgtttttcctttttcaacatagttcttcgcttcttcaatacattctttatccgagtccaacgtcgcttgaagtttctctcgtctctcgctttcttctttaatccaagcttcaaattctccaatctgattcaaaccaaaaacgttcttttaagactaagaatctcagttcttgctaaatatgattccaaaggtttggttattagctattactctgctattgcataaagagattgcccattcagctctgtttgatctttcagcgttgactttgacttctctgcttttctcatctatcatcagcttagcttcatttacctttcttctcacatactctaacttctctgcaacatcctgacaatttcaacatacaaaatatttaatcataatttaaaacacaaatcaataaaaagcatattcttacagtatctttaccatatgttgcagcacgtttagtgccacatcatcatcatcctcttgttcttcttcaacaacgttttcggtttcttcttctgcaagattcaaactcaataactgctggaaataattctctatctcctgtaaattcttatcccatgaacttccactagccgttggatcatcattgttgccagatgaacggtctagatttcttcctggatcatgaaacatcttaccaatccagcttctgatattgctattgttgttgttcacatcattctttagtgaaaccattttgcctccacaaattatataaaactcgcaaaactctggtttgttttgataaacatagaacgatccgcttatcgcactcttcgatttcctgcattacaagaaacacaaaacttttagggttgagaaatcgataactttatatttaaaggaaaaaaaaagattaccaagatgatgaagatctcatgaaagtgattcccattacgagttttgtgattctaagctttgagattaaatctaaaatcaacacttgaattgagtcatgttgcttctcaactttgagtaactctgctttcacctgtaactattatcaccatgaaaaagttttacattttaagaccccaagaaagagattacttcgattgcttacccaaataaaacaaaatttacagaaagaggacaaacctttccacaaaaagtaatgtatttggacagcaacttgtcgatcttttgatcctcgtatttccttagaacttgaagcttttcctcgctcacagaactcgctgg

SEQ ID NO: 967 - DNA, 63921 bp, Arabidopsis thaliana
aagcttcccaactatgaatcaaacacacatgtgaaaattgggtttatatgatacaaaaagaaaataagaggtgtgaattgagaagaaagagaacatacaaggggtgtaaacaaaatcttgagaaatattgcagagatgaagaagaacaatggagataggtatgttgttccatttctttaaagcccaatgaatcgtcttgtaaccttcttgtacatcgtttcctacagctatatatactttctccattcttgatcctgattctgcttctacttccaattcgtgagtctttgtttcctccatcttcttctggcttgtgttgatgatcgtttagtgttttgtctggtgaatggctcttttaaagacaaaagttttgttcttcattgtaacttgagagatcaagattattgactttgtctatcatgtttagttgactatacggaaacaggtgaatttccatctatctttaatttattataaatggtgagtaatcataatactataaatatgaaaatgtacgtttgggatcattaaattattcattacaaaaaaagttacactctagtaaaattctatgtttaatagtgtagaagagaggaaaattcagacaacgtgttagcttgtaacatctatctaggtgagtcacctcgagtgaccaagcaaatctatccaattagcgtctaggttgactaggtttcaagaacttcattttctttctcattagctaaggtaaacttaaaaaaacaatccgaaagtttaattggcttttgaagttttttggtatttgatatgagaataggaggttatgacaaaatatagacattaagacaaagcaaaatatacagacgtaatgtctatattggacctctccacccaaaagcttatcaattcttaaaactcgattaaacaaaaaggcaacaacaagcccaaaaactgtcaaaacttggggtataaaagggaaagtagaattatatataggataacggaaaatgctctaaacaagacgacattaatccttaattgctgggcctctcttttctttttgtagcctaaaaaccatagtgatgtactacttatttgtcacctcggcccagatattttgcgacctttgttgttccagacaaaatctatcttccgctgtgctaaaaaatcacctctccgcctcctaaaaacattatttttactatagcttttactagtgaaaatgaaaacaaataccttagaaattaaactatttcatagtatcttgttttagatttaatatacaaataagtacacactttgtttaaaaacaagaatcaaaagaaaaaaacgttgttcaaattattactttttctagtccaagttagtgataacatttttgtaatgtaagaaagtaaaacaaagttatgactagattgagttttgggtgttagtttatatatctggttcggttcaattcatactcaatcttaattccattatcctaatggattagattggtaaattatttcccataatggtaaaaaaatctaccatagttgatagtccatactagcataaaaagaatattaagattccctatcaattaccgcttaaagtctcttaccattcaaattgttttaccacatctcataatcaaacgatgagtaaatcaacaaatcatttttgtcattatcatttctttcaaatacaaaaagcaaaaatgttattttataagaaaaacccctccggtttcacgccggtcgacacagaagaaaccgttcgactttcttctctcactcactgtctcacatatctctactttttttttttacattttggtaattttatcctttttgagtaaaattaaaaatcatttacttttttttttttctctcgtctcatttctttaaaaagagcttctttgcttgtacatcttcctcttcttcttccttggcattctctttagaactttcgtacaaaatgcaaaacctgaacctctaaagctaaaaaaaaagattagagactgtaactgcttttatcaggttttattttgtgtctccattttttcctcttctcttcgctttatttaacaagttgctttcattaaaaatcccatcttttgtcattttctgcagattttcaactaggaaaaaagttacaatcttttttgatggctcctccaatgacgaattgcttaacgttttctctgtcaccaatggagatgttgaaatcaactgatcagtctcacttctcttcttcttacgacgattcttctactccttatctcatcgataacttctatggtaacaacaacaaacttcaaaaatcccttctttaccaaatgacgtatatatataggctctgttgttagccgacttatcttcttcaacacaagttgcttacagcctcctttctcctctttttctcggttgctgaatttgtctttttccccacaaaggaaaacaaaaatacagaagaaagcacaaaaagattagatttttataaattttaggaactaaaaaaagagacgtcttttgattttgttcctagtgtgattttcaggtgtgttggttagttaaagttgctaacttttttgtttgtttgttttggtttaagctttcaaagaagaagctgagatagaagctgctgctgcttcaatggcggattcaacaaccttatctacttttttcgatcattctcagactcagattccaaagctggaagatttcctcggtgattcctttgtccgttactctgataaccaaacagagacccaagactcttcttctctcactccattctacgatccacgtcaccgcaccgttgccgaaggagttacagggttcttctctgatcatcatcagccagatttcaagacgataaactcgggaccagaaatcttcgatgactcaacaacttccaacatcggtggtactcatctctccagtcacgtggtggagtcatcaacgacggcgaagttagggtttaacggtgattgcaccaccaccggaggagttttgtctctaggggttaacaacacatcagatcaacctttgagctgtaacaatggcgagagaggtggaaacagtaacaagaagaaaacagtttctaagaaggaaacatcagatgattcaaagaagaagattgtcgaaacattgggacaaagaacttcaatttatcgtggagtcacccggtaatttagtttatttcaattgcaatgatctaactcaaagttttaatatttatcatgtgggttgggaaaaagattgaaacttttgagatttttgattttgggttatgcatgttggattaacaaatcaagttaacttttttatcataggaaattgtaaatgcaatatggggtgtatgaacaaggattcaatgaattcaaacttttgttttttggctgtgggtgggaaaaagatttgacatttgatttaagcaattttgatatgagttcaattatatgtatgtgttgattgatgcagacatagatggactggaagatacgaagcgcatctatgggataacagctgtaggagggaaggtcaagccagaaaaggacgtcaaggtaataatctctcattcttttgtttcctacgagaaacagtttcttgaattatttgcttggttactatgttacttttgaatgtttcgcattgcaaaaacctaatttagataaacatgatctcactttcatgtgttaatctaacttttgtgtatatatatgctagctaaaaccatttttattgtctagagtctttgatagaaactagtttgatttgggttaaaaacaaacatttattctttaacttttatggttggggaaaacaaaagcggaagcagtacaaaggttttgtcaaagaaagagtgccaagagaaatgcatgcaatggattcaataaatataaattactgaaaagtttttccttttaggtgatatgtctactctttatgatgactgatagactttggtatatgggcataatgtcaaggaaagaaccaaattttaaacagaaaggactaacaataatagaatagaattatgtaaatacatttggttgagtttttcatcacaagggtgccgccatttttgttccttgtctttattagagctatctttgaaaatctttcatttcaccttctatggggaccccaatgctgatgcctgtatgatgcaatctctgtttcttgattgacatgtttttggacccacttttgaccctttattccaatgctgttatatgacaataatgacatgcatgcatatattaataaatacatgtggtgtaagactaaacactatgcatatattcttttgctagctttgtgtttttagcgttttggtttgaaattgaatgtttgaaatctttctggttagatattagtgagattttgtagggttctctgtctataatgtgtcagattgatttgtgtcttctgttcacatacaccaaaagcaaactgtgatgtgaagttgtgaacacaagagaggaatctagccttgaccctaatcaaatccttctcacccattttttttttgtggtactatgaaatgttattatgtttttgtttgtaagtcattagtaaaagattcaagaacatgatgatttgtgagcattgtgaatgatttttgtaatggctaaacctgtctttctttgttttacatgacccttctaatgtggttctccattcgcatggctgcttcaacagtgtacttaggtaagcaagataatattctattgacaaattaattgatatatcgagtatggcaaatgatgtccatctttgattaattcaaggtggatatgacaaggaagatagagcagctagagcctatgacttggcagctttaaaatactggggttctactgctactacaaattttccggtttatattttttcctttttgctctgttttgctaactttgttttgattcttggtatgctctttacttaccttgtcatcgttctatggattataggtctcgagttattcaaaagaacttgaggaaatgaatcacatgaccaagcaagagtttattgcatctcttaggaggtgagaatcaaattaagatttacatatatgttcttgatttcaaaattggaatatttccaacttttggttaatgtaaatgtttcaggaaaagtagcggtttttcgagaggagcttcaatatatagaggtgtcacaaggcatcatcaacaaggtcgctggcaagcaagaatcggccgtgtcgcaggaaacaaagatctttacctcggaacctttggtaaaacgttatcttagtagacaaatgtcctattcttcaccctgaaaaatccagtcattgattcgtatatatgtgtatagcaaccgaagaggaagcagcagaggcttatgacattgcagccataaagttcagaggaatcaacgcagtaactaactttgagatgaacaggtatgacattgaagctgtcatgaatagttctttacctgtaggaggagcagctgcgaaacgccacaaactcaaactcgctcttgaatctccttcttcatcatcctctgaccataacctccaacaacaacagttgcttccgtcctcttctccctcggatcaaaaccctaactcaatcccatgtggcattccatttgagccttcagttctctattaccaccagaacttctttcagcattatcctttggtctctgactctacaattcaagctcctatgaaccaagctgagtttttcttgtggcctaaccagtcttactaaatcatttggttcgttcttgcttagacttctattcaccgcactaaccgatgacccgaggcttatcttcttgattctggctataaggatgaatctttcaagttccttttttaactgtaggctaagacagaagtagaggggagaaaagttgaagaatctgaaacttttggggtcaattttgtattaatgtttttcttttgtcaagggtggattatcggttttattacttattttttgaatgtaatcggcctataacggtataactctgtttccatttatgaatatttttctcaaattgtcataacatttttaaaagcataattgaacacactttaaatctgagtaaaactaaagcgttcgaggtcataatgtaaataatgaaaaatagcaggatacaaagtgaaattctaagaagttatactaaaaggaaacaaagccacgacctagtccggtccatctcattcatcacgtgccgtttacggaactaggttgagcttttaaagcttcattaaaggcccactgggctttctctttcaagcccttgaactcataacactctcccaacagccggaacaatctcgccgtatctgtaccggcggcgagcctcaccgcctcttccagatcctcgaccgccgaatcaatcctccgtcgccgattcacagccagcttcatctcagctctcttcacaagcgcatcggctcgttctccaaccgaaagcgacttcaaacgcggataagtcagcgccatatcgaacgatttgagagcagaagtatggtgaccgagcagatctagagctagggcacggacgatgtgaccggcggcatcatctggagaaatcgcgatcacattatcagcttcggtgagcgccgttttggcgagagattgagattgagatttcttgggtgtggttcgggctcgagctaggagacgtgaggcttggattagctgacgctgggtttggagtgtggctcggtgtttggttcggaatttggttaggcctcgttgagagagatacttaatcgcccagaacataaccaaggttaacaccagaattgctccttgtatgattgtttctgttgtagccatgtcttcttcctttttttgctctctctgaatctcagaagactaaaccagtcacactatatacactttattttctaccaaaatattattttttcctctaaaaggcattacaaattgtgaattttatcatctgaattttagaattttacaacataagagacaaccagaatttgaagacaaaagccaaattaatacatacaacatattccctctttttaagatttttacaatggagaagacgaagcaaaatcacagacaagaaaaagggaaagaagaacatttttgcttcttgttgtttcttcttctctgtgagaggagttttttttaaagtattggtatcatcagattgcttactccattaagagctgtctatgtcgagtgagatcgttaaggtaagaggaagaggtgtgatctaagtcgcaatcgtcgagactcactgttcttgctccacctggtttttgttcagctaactggtcatctccgcgcaacagctgaaccaactgcatccaaaaacagaacaattcatcattcaagttgttagttactattagaatctattgacaacaatagtgagactgctaaacacatacccggttcatgtcaggacgcatagtggatacatggtgtatgcacattgaagctgtttgcatcactcgtttcatctcggtttcatcaaagtcattgcctagctgaggatcaactatttcttccatgttgttcttctccagaagaggttttgcctatgtgaaaacattcaagctgttttaactgtttgctttagaagatggaagatgcatatgaagagaaaggaaaggcagatcattacccacataactatgctttgccggctatcggtatcaacagctcgacgaccagttatgatctctagaagcaatacaccaaaagcaaaaacatccgtcttctcatcgacaatcccgtgcatgaagtactctggagctagatatctgtaagaaaaaacaaaggaccaaccagtttttggactcaaaaacatcaagaagaaaggttcacagaaagagattgtagctgtggagttctatgtctaacccgaatgtgccttcgatagggaaaacaatgtgatgaggccaatgctctgggagccacttagctagtccaaaatccgaaatctgcaaaaccgattcatatcgagttctcaatacgcacagaaaagttaactgcttgtcgttgaatcaatcaatcagtcaatacctgagcttcgtagtcttgagagagcaaaatgttggaagctttgatgtctcggtgaataatccgtcgagggcaatcgttatgaagataactcaaaccatcagctatacccatagccactttataccgtttcttccaatccaaacactcctctgatcctacattaaagtttcaagaacatcatcaacaacaacaacaacaatgtctaaaaccaaccaagaagagatttttgtaccaaagagtagagaagcaagactgccatgagaagagtactcaagcacaaaatgcaaaccgcgatcacaactgaaaccacgaagcctagctgcgtttggatggttaacatgtgcgattatcccaagctccgataagaaatcactgactcgttcttctacttcctttgcatgtctcgtcagcttcttgatcgccacagtctctccgtccggtaaaacccctttgtacacctccgcatgtcctcctttcccaatcatgttctctaacaacaacaattcataagactctgtttcacaaggttcgaaaacttactttggggataatatcgtcttttcaagatttgaactttaccgggattaaaattgtcggtggcggcaacgagttcgtcgaaggtgaaattacgccacgaaggtttagcgacgaggatttgatcacaatcgaagtcgttttctgaacaaggagatagtttcggttgtttctttttgcgggtgagctcgtagctagcgaggagaggaatgacagagaatctcctaattgatttcttcttgatggattcgatcatcttgttccattgatgaaaagacgaaacgtttggaggagttgttgataatggcgacgatgatttatcaggagaacacgagctacaactgctgctgttatcggaatctgaactcattaccggaatttcaagcacgcatcttggagatgggtcttcgattgataagtcgtttttatgtagctccgtctcttggcttcctttgatcttcttctccatctctgcaacgaatcagaaggaagaattttgtttctaatttctcgatgcacataacgtaaaaataatataaatttagagttggtgttataccttcaacagccatagcttggagaaaaattacgtcgtctgggattcttcttcggaaaaatcccagtcaaaggttcatacaatattcacccagaaaacaaaaagaacacaaaagagggaagcagagtaacatctccggagaggagaagccgaaagctcagagccggagagaatccggagaaacagggaaacagaagttttgtgtttttgtgtgtttttctgttgtttgttgtctcgttaaaagatatctttagaaaatggttattcttagaagattttagagaaagaagaaagatgaggttttgatgactggtaatggattggtatctctgctatatttatacaactccaccatgcaaagtcaagttagctttataaaattatgaaacatttttttataagaagaagatgaaaagatatgatgccgtaactaacgccttccaacgaacagacacgccgacggttgaaatatccaaagaccaaagctagtcaatggcatttccgtaattatagagaatgataagacaaaacacccctctttgttttttatttattcgaaattacaatttcacttaatttgtactttcagcaatttaatattaaccatgtgaaatactgacatcttgttttttttttctttggttttggtccagcatttgtcttcattaatgtaaacctacacagaacttatttacgaaatgccgtcgaatgtgaatctttcgaggtaagaatatggcaatatgctatcttatttccggttatcgtgtcgctatcgtaacgagtgtgtaaacatatggcaaagaagcttgaccaccctagaacaagccaataagccattgttgttacttgacatcttaatataataaacatcaaatttatcacgttttataactaagtaagatagaaaacatttatgagattgttttggttcacgacacgacattcacgagtcatcatgaagctttgtaaaaaaaacatatattccaaaccacatcaggcgcaacatagtttattagagcatccacaacggtggagctctctcacttaaactcataattaaaatatttaaaaataatagaaagaaatcagggagagaagcaataggagagagttttatcaaataaactctctgtagagagattttgacacacatgagagaacctctactttacacatgttttaactttattggtgaataccaattaagtaatttaaatttaattacataataaaactctaataaaaataatattgttttattcattgcatacccattttagagagtccaccgttatggatggccttagtagttcatttggtcccaccacttaagctctcatttgtcattaataacttaggaattacgtgaaataaaacttagtttatgatttagcttacgtgaggcgatcgtgagtataaattagaaagaagtacgatatgcattgaagaaaaatccaacgaaaactataagtataaacatagatgtgtctaatttccactacatatatgtgggtttagtaaagttgagtcgttaactaacatgagttgtttttcttgggtcaaactgataattttcttagcttaaaccaaaggagaagaaacctccaagttacaagacttctccaacacaataaattttcctctaaaaaatgttagtagatttgatgattatttgttttggatttgtttttgagctttgttatgacaaaagcgattttctttacgtgtatttatttgttgtaatattatctagacaagaagatataaaaacaacaagtaagtgaagttgttgctggaaaaaattatcttttagccttttggtgaaatgagaaatgcttaacgtaatgaaatgattagttaattggtaatttcagtgagaaaggtgataaggagagaaaaagaggtttcttgtatagtgggtgaactaaaccccttaactaattttgactcctccaaatgtaatctctttcgctctctaaattgggccccaaagtccaaatcaaaatagccaccaaactcaccaatgtcaagttctgtcggagaagtcagtctaaccgatttcattctcacttaaacagtcataaacacactctcctgttcaatccgaaattcagttaggtttttagttgacttctggtttagttttttcatttactgatttagagcaattagtaatcaaagattcaaatatgtcaccgtgaaacacaattgcgttaaccgtaattttctgtgattgttctattgcattgccaaaagattaatagaaaatttgaaatgagttacgtgtaaacttatgaatcaaatgacaatctaagaggcgatcacttaatccaacaacggattagagaatattatttcgtaaaatacagacatgtctatagaaaatctaaccgaaccacaacgatagtggatgtgacatgaaagtgtttacgtctacatggaaaattgttatcgtcatcattcatgaattgaaaagacaaacaggttatttaataaccaagatatcgttttcatgtgatcaaatcaattatcttatcaaataaattaactaattaagtgatctctccatcaacgactcgggttgcctaaaactaatgactaacaaaaatattataattagttttgttgcatagcaagagatcaaataggcgcctgtagctcagtggatagagcgtctgtttcctaagcagaaggtcgtaggttcgacccctacctggcgcgcttcattttaaaattcaatatattttaattttgttttgactgggaaaattccatgagcattagtaacttaaagcccattagtgggcaaattaaatgggccttattagcctaagcccattatcaataaaaacaaaacagactcaggccaacaaaaattagacagaaattaagagtgacaatggcactgctcggcgacgacggtcgtggcttcgatctagccagaaaacttgaagtttccggcgtgtggcggacatggctcggcgattctatttactcttctttccaccattatctttcttctccttctacctgggaagctttcatgcgcgttgatgagtccaagtctagggctcagattcagctccagctccgcgttcgtgctctcttattcgataaagccaccgtctctcttttccttcgatccaatacaatcgccgcttcttcatcatcctctgcttccatttctgatgtctcttccgtcgcggtgtctaagctcaatcctaattgtaatgtttgtttcattttttggagctttgttctatatggcaatttcggtgtgttgaatgtgaggttttggttttgcttcgctctcagatttacagctacacggagatgatgtgtactacacgttggagaatgcttctcttgaaagtgggtttcagcgagagggagggattcgccacaatccgagcttaaccaaggtgattcatttcaaggagctctcgttatataaaatgtctaaaatttaaatttgattcaaaaggtttcaccttcggataaatccgaatcactaaatgctagttttatgtttgtttgtttatttatctttcgtgcatcagttaatttctctattgtgatgtttattcagagcctatcgaagccaagttttacctctgggacaagaggtagtgagtctgattttagtaatctttctcaaaggtcgaggtttgaggagttaccagacacttggtacactcagtttatttcaaggtatggttttaagtatggaatgtctgttggaggacaagaatctgataaacgcacacctgaagggatgtctacttaccttagagttgtagatactcataagagaaagcgtgcaccttttttagaagatcgaagtttagctcatatgagtagatctagtacacatcctagttctggctttgatggaagtacttcagaagatgatatactttttcttccggagacaatgtttagaatgaactgtgtacctgagactgccctttcgccgattaccagaacacaagacaacttaaaaacagaattctatggggtacttgatactttaccgcaagttactaccaggagtcatattatgatcgagaggcttgggctgatgcctgagtaccatagaatggaagaaagaggagttttacgcagtagaaaagctgaaaaaatgggttttagtgacgatcaagcagctctggtgtcacggaaagttgttgcacgcatgcttctgacgatgggatttgaaggtgccacagaggttccgattgatgtcttctctcagttggttagccgacatatgagtaaattaggccgtattttgaagcttcttactgacagctacaaaaaagagtgttcagcaatgcagttgattaagatgttccttaatactacgggatataggtgagtttcttttcagtggtgatgcctcactcaactgatctatggggatctatctttgtttagtttggttaagtaataaaacttcaaattttagttttgttcatgtgattaaatttcacgcctttttccagtaatcttgggagtttagcagagattgttaaggatggtactaggaatcatcctcccccaaatcagaaacaaccacaagtgcttcagcaacagttacatctgcagcaacaagcttctctccggttaccgcaacaagtatgtacataatggttgttgttgctcttatcatttggcattgtaattgttcatataaatggattgttattttcatggtttaccttctctgagttcttgattcgatgttattgcagattcagaggcaaatgcatccacagatgcagcaaatggttaatccccaaaattttcagcagcagcaacagctagaaagaatgcgtaggcgtccagttacatcaccgcgacccaacatggatatggaaaaggatcggccgctggttcaggtaaagctagagaatccttctgaaatggcagtagatggaaatgcctttaaccctatgaacccaagacaccagcaacagctacagcagcaactcagacagcaacaacaaattgctgccatgtcgaatatgcaacaacagccgggctataaccaattcagacaattggcttcaatgcaaattccacagatgcaaacaccgtaagtaacgtctcgaaactcaaaaacatggttacatacctactagacgggtcttgaaagttgtgtccccattctatttgcagcacactaggaactgtcagggctcaacccgttaaggttgaaggattcgaacaactaatgggaggggattcttctcttaaacatgactcggatgataagctgagatctccacctaccaaatagcattatgtacagagacaaactaccctgaccaaggtacttatttgtgttgcacttgtacacaaagtcctgttagtttaactttttgggtcaatatatttatctgatattcatctgtgtttagttatcctcatgtgtaaaagagagaatcggattataggttgacatcttgtggaatcaccaagtttttgaataaaattaacattggttatcacattgattgtgccttatttctcaactcttattacacacatcgctgacgttgacagagaagacagtataattcttcattattttgctctacactcctgctataggattctccagaaactcgataaaaccatccgcatactgatcttgcaatctcttgttcccgaatattttcttttgctgagatgcagcattgttcctgtagatctttccttcttcttccacaacaacatgtctgattgtctctgcaacagaagcactcgtgaacagcccgtctcgctcattccttggaatctccaagcctatattcatcccactgagcaacctagccactagcggctggtctaggttacatggaaacatgatcaaagggacaccaaagctaagcccttccacagctgatccccaaccacaatgagtaacaaacccaccaactgaaccatggctcagtatcttggtctgaggtacccactcggtccaaatgactccacgctctttgactctctctttgaacccatcaggtagtagcatagaagctctagtcctcttccttagcgtccaaaagaaaggtaacctgcaaagctccaacccatgagctaaaccttgaatctcttcgttactaattgtcacttcagttcctaaggctacataaaccacagactttgcttgatgtctgtctagccattctctgatgtctaaccatgttccctcgtcatctgcatcatccattggtgtagccgggagtaaaccaattggaatcacaggctttccttggagtttactgagcaattgaatccactcaggttcgagttccatacatgatctaatcacaataacctcagagccaacgtaagccaaacccaatctacagttgtcgttcaattcaactccagttacacctgccgtgggatactccatgatcctcttagcttcaaagagacggtaaactatgttggtctcaaacgggacccatggtggaggcacgataagatcttcagcagtctttcgagggtcatgaccttgaatcatgactgatgctggcccaccgatgatgatgatggaagctgcgttgaacgtgcagaagatggctcgtctcacgccgagcttctcagcgataggcgggacccaatggtgcaagatatcatacactatccagtttggtttggaagcttctaaaaactctgtgaaagcttcagaaagcccatcaaatgctttcttcagataagctatgtgagtctccgggacatcagtggtggcctcagcgttctctgggagatggtcgacggtttgacttaacggcaaagaaacgaaattcacggaaaggtcggaggatatattgggaagacgtgaaatgttacgagctgtggagatgaaggacacagtatggcctttccttgctatgagctttgagagttgcaagtaaggaatcatgtgacctaaagctaaccatgggaacactgcaacatgaagcttcggttttggctcggccatggtctctcttcgttgataaacaagcaagactcagactgattctctaaagctcttcttcttcttctgtttgaacatctggtagtcacaatggcggctaagtagatgtactcttgacacgtcaaaatctctatctgtcgtgggtctttggaatcatgcgacatgcggtaacagatgtgtttttatttgaaaagtgtgaatcttttttttttttttctctgagagattttattagaactaaagctcttacatcctcaagaacagaggaaccacataagctcaaaaccggttacacatatccggtttcagagacacagcaaacaaaaactttaagaaacgatgattatgcaagttctaaaattctaacaacttttccaatcaatacttttcaaagatttgaaactgaaatcaccatgtggaatcttcaatatcttcaatatcttcaaatccttttgtcctcacttggtaataattagacttaaagtgtgaatcttatatcgttgtatgagtgtaaaatgattaaaaattgttttggtatatatcaaaaatgaaaacaaaagacaacaataatcatctgggcgtctacaaacatcaaagcccacattggtctgtttttcatctcttttgatctactctgcataggagattaaatataagcaacagaagacaaaaatgttgtcaggagttaaaaaatgttaggttccatacctaataattagaaccaagctgccacgcatgaagcagagaagctaggcagaaggaaaagagtttgcttcaagaagaaagctcaacgagtttgcttcaagggccttctctttaagtaaaaagacaactcatttaaagaatttacagctccagtgccttaataagtaaatattgagcctttgacagcaatattcatacttgttgtttagttaaagatctaagatgaatcggaggaacggctatgccaaagtttgaacctgaaaacaagtaaatcaaaattcagaaaagaaagattagagcgtgaaatggaatggtaatgcaacacattttagccagaaaatatgaatatttgtgcgctacctttattgtatgacctgtagcaatatcacaagaaacaaggcaacttgcagatttttcaggtcgagtcatggatcaaaagaatctgagttccaaagaattgcatgagcctctggcaaattgatataatatagaaacccctttatgtgctatcaggaggtccttcgattagcagtgaatatgtctgagagctaaacttgcagccatttttctccataacgttgaatagttcataaaatgcctctacaagtccctgcttccccacaccatcaatgatgatcttccaagctaattcatcctcataataaccacattgaagcaaattctggaaaaccgaagtacctctctctttttctccttttttatacagcccgcaaatcaagactttgcaagactctagttgcggtaagtgaccaacacaaatcatatcatctacaacctttgctgcttcgttatgctttttcagcttgcagcaacagctaagaagcgcattgaaaaccaactcactaggagatattccttcgtttcgttgcatgtgatcaaacaccttttccgcaactctgagattcccaacttcacagatccctagtatcagtttttcataggatttggcgttgggagttacactgtgttcaaccattttctcaagaagctcaacaacagtatcaaactccatcatattagacattgcacagagttctggttcactgcctttctgttttccatatttcatttctaacagatgtttgatcagagacaaaaacgtatgttgagaaggttcacaaccagtatcacgcatgcgcttgaggacatcaaatgcaaaatttgtctgccctagatccccataacctttaatcagagaagaataagtgaacaaatctggggaaacaccattttccctcatctttgccatcatatcctcagcgtctagtagtctcccttccctacaataggtttgaataaatgttgtgtaagtatgtgcatcgggctttgttccagaggacaacatttgctgaaaacgactataagcatgatcaaaatccccgtcttttagcaatctatgaatcaatattgtatccgtactaactgtaggctgtagaccaatcttaaccattttttcctccaacaacgtcgcttctttcaattttccatcggcacataacccgtgaatcagggcattaaaagtcaacgaatttggcaagcaattcttactcaacattttctcaagcataagatgagcttcgtctactttacccgccttgcagtatccatcaatcaatgcagtgtacatcaccacatttggatttacacctttctgctcgagagaatcaaacaggtcgcaggcttcttccactcttttgcttttacacaaagaatctatcatactagtatatgtccactggtctggaactaatcctctatcattcatcaaactaagtaatctatatgcactatcaaaattaccagatctacactgcccatcgattaatgaattgtaagtgaccacatctggaagcactttacgctccagcattttattaagcactcccattgctttgtgaacattacttttacaatacccctttatcaattcattgtatgtgcgtgtattcgggctgagtttacgtgattccatcaactccacaacgtctacagcatcttcaatcatcccccgcttacaatacccattaatcaatgcattgtaagtgattacatttggcatcaaccctttctctagcatctgacctagcaactctctagctttctcgaacttacattggctgcataaactatcaattagcaccgtataagtgtgaatattcggcttaatgcctgtctcttccatctccttaaccaagttaagagcttcagacttccgttctgatccacacaaagactttatgagcactgtataagtacgaactgttggaaaacattcgtcatccttcatttttacaaacaagtccatcgcttcatcaatccttctcgctacacaaagaccgtgtataaggtgagtgtacgcaacctcatttctacggcaacccttcaaaggcatctcattgaagaccttaaaagccgaatctaaatctttcctttgacaataacccataatcaaagacgtatatgtgaaaaaatcaggatccaacccagcctcaactatcttactcacatactgattcgcctcttccacattacccagcttgcaatacccattaaccattttattatatgtgtaaatgttgggacaaaccttatcctccaacatttccatataaacctgcttcatttcatcgaccaatccaaatctagccaacgaattcaacaatgtgttgtaacacccaataataagcttatacttaagctcaaatctttcgtctttattcatcttcctacacaaatctaaaacatacaaagcgtctcccactgaatcacagctcttaatcatcaataacctgatcttaaacacaacacccacatatccattgttgatgagaagagtaagaagggatgcataggaatatacactgtgcttgtatctcggattctgtgagatccagtgagaaaaattaagagctgttttcggatctagatcgagtgagaatagtgaagagacgtgagaagggcttatcgcagaaaccatagatttcaaggacggagatttatgccaattaggtttagaaagaattgatagcagacggtgtggaacactcattgaatcagattcttcctccggaagattgcgaagtagcggagacacggagcaaaactgccggcgagtgaccggagaaggaaccgtaacatccgtcgagaatttcttcttcaggacttcgaaggcggatactgaaccagtcaaacccgaattgcaccgtggttgtattcgacggatcatcgatgatccgtggcgttttggatctctccgatgatgaacacagaagagaaaaaggaggaaactttgcagaacgaatcttcagaatcgggggtttatctaatgggcctaaatgatccttaatgggctattattatatgtacaagttcgtcaccttaataagctgttatatgttcaagttcaacaatttaatgggccttgatgagctttaatgggccgatatgagctacactatggaggtgatcggcggaataatgcgccggcaatgagaagagattataacggcggattgatcgccttttcgagatatttcagcttcttttctagcagaacatgttcaccggaatcatctatcaataaccagtttaggcttctctgcatcacttgtgataccctgacaacgacgcacaatttctctcagcttctcagacaatgcatcgacgaaagatcgatatcaggaatcaagactatccaagcccatatgctgaaatctggttttccggccgaaatttccggcagcaaactcgtcgacgcgagtttaaagtgtggcgatatcgattacgcacgacaggtgttcgatggaatgtctgagagacatattgtaacatggaactctttaattgcttatttaattaagcacagaagaagcaaggaagctgttgagatgtatagattgatgattacgaataatgttttgccagatgagtacacgttgtctagtgttttcaaggcgttttcagatttgagtcttgagaaggaagcacagagaagccacggacttgctgtgattttgggtttggaagtctcaaacgtgttcgttggaagtgctcttgtggatatgtatgtaaagtttggtaaaacgagggaggcgaagttagtattggaccgcgtggaggagaaagatgtagttttgatcacagctttgatcgttggttactcgcagaagggtgaagatactgaagctgtgaaggcatttcaaagtatgttggtggagaaagttcagcctaatgagtatacttacgctagtgtattgatttcttgtggaaacttaaaggatataggtaatggcaagttgattcatggacttatggtcaagtccggttttgagtctgcgcttgcttcacaaacttctcttcttaccatgtatttgaggtgcagtttggtcgatgattccttgcgggttttcaagtgtattgagtacccaaatcaggtgagttggacgtctcttatatcagggcttgtccaaaatggtagagaagagatggctctaatcgaatttagaaaaatgatgcgtgattcaatcaagcctaactcttttacattgtcaagtgctctcagggggtgctcgaatctcgcaatgtttgaagaaggtagacagattcatggtatagtgactaaatatggttttgatagagataagtatgccggatcagggctcattgatttatatgggaaatgtggatgctcagacatggcaagattggtttttgataccttgagtgaagttgatgttatatctttgaacacaatgatatacagttatgcacagaacggttttggacgcgaagcacttgacttgtttgagagaatgataaatcttggactgcagccgaacgatgtaacagtcttgagcgtactcttggcttgtaataactctagattagttgaggaaggttgcgaactctttgactcctttagaaaggataagatcatgttaacaaatgatcattacgcgtgtatggtagatttgcttggacgggcagggagattagaggaagcggaaatgcttacaaccgaggtaataaacccggatttggttctgtggaggacgctgcttagtgcttgtaaggttcatagaaaggtagaaatggcagagcggataacgagaaaaatcctagagatagaacctggggatgaaggaactctcattctaatgtcaaatctctacgcatccactgggaaatggaacagggtgattgagatgaagagcaaaatgaaggatatgaaactaaagaagaatccagcaatgagttgggttgaaatcaataaagagacgcatacattcatggctggagatttgttttcgcatcccaactctgagcagattcttgaaaatctcgaagagctgattaagaagtctaaagatttgggatatgtagaagacaaaagctgtgtgtttcaagacatggaggagactgcaaaagagagatctctgcatcaacatagcgaaaaactcgccatagctttcgcagtgtggagaaatgttggtggaagtataaggattctaaagaaccttagagtttgtgttgattgtcacagttggatcaagatcgtgtcaagagttatgaagagagaaattatatgtagagattcaaaaaggtttcatcatttcagagatgggtcttgttcgtgtggggattattggtaaagtatgggacttgtcttgtcttgtcatttcagccattctcagtacacagtgttcgtcctcaaccttcagtccttttcttagcacaaactcgtcgatatttctcgtgaaaagctcgaggagcatcgctccaaagctgtaaagatcccatttgggactcggtttcaggattccgagtctctgaaactggctcaggcttggtgtaggcagaagactcgtgaggaagtttgtgtaatgcttactactggaaatccgagaagatcaccagctggaaagaggacatggcgtaagcaggcatcgatgacgtttggtgataaaattcagaaacgattatgtatagtctgcagaatattgaaagcaccttaacagatccatcaatatgcatagtcttcaagaagaaatcaaatctttttacacatatatttatcaaacacgttagagagaattgatggtgagtgtaacgtctgaaacggccaaccaacaaaggctattttttgacggtttagaagaagggatttaggcaaagaaatatgaggacatcactaaaagactctcatagcatatcttccaagaacactttatgcatcagaaccttgtctataagctctttcttcagagctacgaacctctatttcaaaccataagttgattgacttgttaaaaagtgaaacagaatcatctaaaactgatttagtcaataacattaaaactaccaagtaaccaaaacgaactaatgagtttgcaaggagagaagacaagagaaagaaaggatgaaatgtctgagaatctctcaacatatgctgtcttccaaaaatgtcatataagattggtgtttcattgcttgcttcgaaactatgtgctcctgctttcttgttgtgggcatcaggccacttctctctctgacacagagaccagcattgatagcctgtgatatcaacgtgtgcagtagaatcttgcttctgcttcacgaaccaagattgcctgtagcaaccaccacaacatatgttaggaacagactctgttttgtatacaaacaaaccactttgaataaaattaggaatggagttgaaactcttcaccttattaaactgatcatcatcatccatcatgttctctcttactttttgataaaaattgtgtgagaaaaatagatgattctttgtaaacgtgttatattatcaaaaaaacaaaaggtttcaaccaaatcgaaatttcctttttggttagattgatattattattattagtaaaggaaatcgaatctaattaagattacctctataatatcaaattcccaacggttagatttaatctataatgttatcaaatcccaacggttaggagaaatataaagcaaaggaacattaaacagatcttcaaattttgtgggctaaccctaaaattagagagaaacgaaaaaaagcatacacagagagagagagagatctagagagagttatagagtaagaaagatgcttctttacgattatcttcttcaagttacctctattctcttcgatttcatcgaatttcatgagtttttcatctttggcttgccgttgctcttcgccaaatcttcaccaaccaaaagaagggctgattcttcttcttcgaccaatttcatgagcgtgatggaagttgatgctgattcttcttcgaccaagatgatgcctcagaccgacggcggagatggcgagagagagagacgactgagaggagaggtcaaaggattctcgtttccattgacgacgatggtggaggaagaaagcaatcatcaatgacaaacaagcttctcagatttgggcttccatattgggcttttctgtatgggccttcttttctaccaaatccaacatggtgtctcttttcttcattcttatttttattttattttctttgacaattttattttaagtaaaactaaaattatgtagcttaaaaactaaaggtttttctgttttatttttgaagtgttaaatttttaatttttgtgtaaactagttagacacatcatccaaacccctaagaggtgttctaggtttaatttggtttacacataattaaatttttagcaccttttttttttaagatttgtttttttttctaatttttaatttttgtgtaaactatttagacacataatccaaacttctaagaaatgttctagttataatttgtttacacataattaaatttttagtactttattttttaaaaacattttagcactttttgaatataaacattgtaaagtttttgtgttgctataactccaaaaaacaatattttaaaatactatataatatcggttaccaagaagaaaaaggaaatgatgtgataaggaaacatgtaactcgttttgtgttggaagttttcttcctttatttttcatcattaccagaagacgttatttttttgatgatgtgatgacaaatttagtatttgtgttcggttcgatggccaaatgtacaacacttgcttctaaagaaaagcaaaagctgcaaatctttgttgtattatatattatattcttccgttttgtttactcttttggtataacaatctaaccttttctactttttttcctatcttgccaaatggaaagatttacttccttcttcacccactttggctcacatacatgcatgtgcgcacataactgataaaattgatgagaatataaacattaattgatgataaaatgaaaataattataattaactttcctaagaattaagttacaatatgtatagatttaatctttatacctgaaattgttgcatttgagtaggcctagggcatacattaatattactagctctcaatgtaaaggatgaaaatgtaaaggcgatggaaaacattggtaaaataatgaatactatacactactatctcctccactcacgagtcgtaaatcgtgagcttcctggcaattggtttagattgttgttgcaaagccgtgaaatagcgacatattaaatctactcatattgtatgatacaaaagcagttacatcactttgttattcacattcatcatgctccttcgccatctatccgtttcattaaatcatcaaaatatttatatgattattatttattttattttattatatttatactttataatgtcatttatttgaaatcagtgacattaaatttacctttttatttatatagtgcgtgttcatggtcgtcgaccaaaagcaataaaaggttaattcttgatctttttattaccttttaatgataattaaaaaaagatgtgtcaaagagaagaaacaaaaagttaagatatccgaaagatgttcttaggataaatagggaatttaatgaaaaaaaccctcaactttggccggatccatttttaaaccctgaactatttttttagtaaaacaaaccctgaacaaaaacctgttaataaacttaatcttacagtaattaaatattaatgggatattaatttcaacaaaacaaaacaacgagacatttgtatttagcgcaaaaaccacatgatgttctttaaaactgttttgaatttattaaaaaaaacgtttagtgttctaaatgattttgaattgcctaattagtttggattttagaagctgaaagaaagacacaacaacttaaaataatccaacgagtcatgttaaaaaaaatccaaccaacataactatcgaagctgttgcaacacaacaatacacaaaaaaacaatcgtttcagagggacaagatactctaaagtaaagacttctcaagcattaactttgaagagaagattgtattggctgagtgatagggttctcttcatccattgttttctgtttttttcaatacaatattctcttcaaagttaatgcttgagaagtctttactttagagtatcttgtcctgctgaaacgattgtttttttgtgacaaatattgttgtgttgcaacagtttcgatagttatgttggttggatttttttcaacatgactcgttggattattttaagttgttgtgtctctctttcagcttctaaaacccaaactaattaggcaattcaaaatcatttataacactaaacgttttttttaataaattcaaaacagttttaaagaacatcatgtggtttttgcgttaaatacaaatatctggttgttttgttttgttgaaattaatatcccattaatatttaattactgtagggttaagtttattaacaggtttttgttcagggtttgttttactaaaaaaatagttcagggtttaaaaatgaatccggccaaaattgagggttttttcattaaattcccggataaataaagcaaacctacaaatgatgattcttaaaaagcttaaaaggatattgtagtatgcaaaagtgccaacattggcttttaataagagatcgaaactttgtaaaagaaagtgatccgaacctaaaaaaagtaattcttatagatgcgtgtgtgtatattttttttatttgcgtgtgcatatttctagatcataattctatagataaatataaataaccgaaaagaaacaaaaattgaaataaatattgtcttgtaaatattttacgtaaatataatcaacatagttaaaactttaaacggtaaagagaaaagactaattacatagtgggactgcaatttcttttatagtcaaagtaattgaagtaaagaacgtaatagttgcatgcatggctaaaaaaaacagataaaacaagtaaagtaaaaactttatagattagtgtttacaaagtgatattcttctagaacccacaaacagacaaaagtgaattaagacgtgtctcttttctctttagaagtccaaatttcaaactagtatagaaaaatctgtaaagaaaaaaagtcccgtcatcaaattaagcgttagaattaaacagactcgttatcatactacacttgtatctaaaacctatatagtgtttaagaaacttcagtgttgggtatgtttttgagagtttaacgcaatagttgaaacaattaagtttagtccgttttcacatgcctacttatgcattagttcttggcttcttgcagaccttgcgatctagagatcagtgataagatgtacatactacatagtacacatacctacataaacaaacatgcatatacgtatatatgcgtgttcatatatatgtagagagaagctaaggatggggctaacgagagactgcaacagaaggctaaggcctgatctctatgtttcacatagactcgacataattcagtgtctactaagatgctatatgctcatacatattaactagaccacacttcactgacatatttttaatgtaacatcaatctatattgttcaatatacagcacaaatatcgatgttttaacgaataatgcacagagtttttattttttcacttgggtatgacatatgatgtggatggtcagttattctgcttggctcaatgtctgtataattagacttatttaaaggtactatgaccaatcccaaggagacatattatctgtttactgaaaatgactttttgaagaaaattttaaattataattaaccttgggataacaaccatccaataagtcattaagtgaacatttcatcaccaaaccaagagctttccgataattaaacacagtaagttctgttccacctttcaattcaatacagacaaatcaccagtatataatgtaagtatctctctccattcttgaatatctcccccaattttgtttttttgtttacaaattgaaacttaaaatactagaatagtaaccaacaacgacaacaaaaagaatacaaaaaaaaaaaaaaactacaaacataaatagttttggcattacatcacaacacatagcaaatagattatatgaaattatagattatatagtttcttaaacttaccaagattcaaggcaatgcattataatgattaagatcagtccaagcttgaattccattgttccattcacttcctcctcctcctgtattagcattattactaatcactccttcattatcactgttattaccaaaataccactctgtctgattatctcctttcttcgtcggcgacgacggcgatgatgagtttacgatctcaagattccgataaagaataggttgtggcctctcgacgacaacagtttcttccttagaattaccaaaaagcatcgccatcctctgttgctgaagcctccagtgtaaatcttggtttaaacaactcaaagtctctatagaagaagctaagtttccgtcgcttgctccggcggttgtgaaccccgtcggtgaatggttgttgttgaaatctccaaaacccattagggataaacccgacccgacatcaacgggtgtgttttctcggcccgaggacatcatgggcctaagatcaagaacttcttggttattcaaaagttgaagatcgttcattttgttgagagataatccggccagctgaaaatccattgttgtcggaggagggaagaatttggatgaatcttccatgattgatgagaagaacctctgagaggaagaagacgaaggaagtgtgttcatggaggaattaggtttgatagattttttggttttccggcaaccaccaccgatggggacgtttcttagagcaccgccacgtgtccagtaacggcgacaagatttgcagaagtgacgaggttgagagagactgtagttgttgtagtaacagaactttgtgtttggagagttgcaacgagggcattttaggttttgttggtcttgagctacggaggaagacggtggtttcttggtttgggatgtaccggagatacggtgatctggtttaggaactggtttgggagaggggagattggtatgggaggacatggtgatgatgatgggaggagagaaagatgaaggaagaaaaaagtttggggtcctttttcgatttcttgctttgaatgaaataagtaaagtaggagaggagagagagaacagtcggtaaaagggtttcgtatggtttatattttatatatacaaaattattgtatatatgtgagaatatggggatatatatgtattgtcgggtttgtgtgtaaaaaagtttgttttgcataattctacatagatattttattaatttgaagtatattattaaaaaaaagtgatttgtcttttaaaagttggagagactttgattacctaagaaaataaaacagtgtttaatgactaaatacattaacttttatttagtgttttgttattagtttttcaaatgttgatgattagtaatttttttttttttcttttttgatgattagtaaaatttaattgcagaaatagtttacataacagttgttatacataatattcaatatagtaaaaatacgtatataataagtgttcacaaggagaatcacaatattatttgtgttgtacactgtggtcttcgtgttcttgttcctttacagagtcatagacttgaataatcataaaccgccatgtttatcaaaactgtggtgttcttttattacattggattaaattcttcataaaatctcgttgtagttaatgtctgtatatgtacattgtacttatgaatgtcaatagagagagagagaggcatgagtgagagataatggagacaaaaggagaagatgagagagagacatgaagtggcagaaaagacagaagaacatatataactgtgcaattgatcggaacaaatcggatagaatttgttatgtgtcttgtttctattgttgaggtaacgttttttttttatatgtgtgaagtgtgcactgcaccatctttatacgtagacaatattaacatatttacagtcacaaataatgttttcttcctttacatacacctatatacttatatagctgtcaagcgtatgcaactctattaaggaaaccaaaactattggaacaaaatttacgaaacatatatattttattttctcttctggatatctcttgtgcatgtaagttattggggggggggggggggggggtttgccaagaaatcgaataaatggataagtattaatatgtactacgcaggcatagttcattgtgcatatacgtatactctctgaaatttttggatttatgtgagtccaaatcgtcattcagaatagtaattagactgaaacatacaatatatagtaattttatacacttaagcaacatttttgaagttatattttacggacattaatttgggattacgaatcttgtaatctagaaaagccttattaagaagagggtagggtttaactctgaagaaagtaacgtttgcttaactctctgacatctttttgtaaccaaacccatttctaaaaacattgtttgtgtcgctaatacatgtacatgaaatttaagttttcagttaaaagccaaagtgattgacatatgttcaaattgaactggcatcaaaatcagattcaattggtttttagatatgaggccaatacagacaagtgtatatataatataaaaattaataaatccaaaaatagaaaaagagaggagattgtgttttgatgattgatatattaaacgtctccatctgtgaagaaacacgagagaacggagaagacaaaatgggaaacatgtgagagccctcgaggaatggatctctcgtgagactaaaccgatcatccacaagtatacaagttacaccgattttataaattacttatataaaataaagcatatactagcgattttataattttttcaacttaagtttattgctgaaaatcttgtaacattataacggatggataattttaagtttaaccattttcagctggaaaatttaattcgtaataatacttgacactaaaaaaatttctaagtagcatattacaacatacatattttcgtcaccgttgtcactctcgaactcggatctcatttttctatatttgataatatttttgtaacagcagtacaaaatttattacggcgtttaaatttaatgttatatctatctgtaattggttgttgaagcgagaaagagacatgacaaaggaaattacttaaggtaaaagacgcagtttcatcaaagattggtcaaatgttatatcgttatcaaaggtcgtagaagcatatccacctggtttacgtgctgttcccatttattccagccgtaatttgccactattttaatttacaaaagaaataaaaacattttcactgattgttatacatttttttatatgatttagagattatttctattatttaaacagaacaaatagaaagaagaagatgaattaacaatggaaacatgtgagtgaggctaatcacgagaaatgaaatgaaagagtgcagagctaaattcgtgaaggcccattagtattaagttgggccgtattttgttaaaagcctaaagctcgcgtaagcatctgttgttgtttgatgggtctatctctatccagtctatgactttatcgaaaagataataacggactggaccgtccggtggctattccgaccattagtgttgttccacgtgtcatttgtttttgactacaatgatttgaattcaaacaagacgtagttgccttttattagcgttgatattttgcgaaatcaaatcttaaaaaatgattatacattttccacatgtaacgtacgtaagttggcgtttttgaacattcaaagcctaaaaagtaaaaacgtttgattatgtttccaccattcactttaattgaaaattctgttctttgtggaacatgacttgatctatatattaaaaaacctaaaagaaggaaagcactggaatgtttgaaaatattctccaatactttacaaaggagtattaataacaatatacaaaataagattaagcatagattatacaaagaataatcattcttcaagagcatgaccaataataataatactttgggatgaaacaaaaacagagcaaaaagagattacagttaaatctctaatatttaacgaccatactcgatgcctgagaacgttacagaaactccatttgagttaactgagggagaagaagaagaagtagtagtcgagatgtaatacatagcaacaggcctcttcaatggaagatcaggcaatggtgactcaaaattcatgacttggatcccttgttttatcgaaggtctcgagtttttatcaggatgagcacaccataaccctaaaaccagaagacattcagcttctttcttgtcgaaatcctcacccaatttgtcatcaacacatgaagtgatcagttcttgttttccataaagctcccaaactttctccactagactcttctcatcatcactctctgtatcactgttatcttcttgtgtacgttccagcgattttctccctgtgacaatctctagtaaaacaattccaaagctatatatatcagattctttactcgcacttcctttcattacatattcaggtgccatgtacccaaaagttccagccaaccccgttgtatgggaaccaagttcatggttcattagccgagccaacccgaaatcacctaactttacattgaattcactgtcaagcattatattacttgccttgatgtctctgtgcagtacacattgatcccattcttcatgaagataaagcagagcagaggctaaaccaagacctatcttgtaccttatgtcccaagaaagtaaattgggtcttttcccaaagaggtgagagttcaagctaccatttggaactaactcatatatcagcaagaactcatttttctcattacaccaaccgatgagctgcacgaggtttcgatgtctcagtttgctgatgatcttaacttcgtttaaaaactcgttctttccctgccttgaatcaccggatagtttcttcaccgcaaccattgtattgatttctttcaagtttccttcataaactgctccaaatcctccttcacctagctttctatggcttgagaatctgttggttgctgacacaagatccttataagaaaactttcttggtcctgcttccctttcaaggtctttgtttatcgatatcatgttttctatatctctttctttcttctttctttgcttccgtgaccaaaccaccacggttgtgatgaccataaacgtcagaaaaacaaacccggaagccgaaatgccaattactagtcctatcctgctatcggctttgtcgctgtccaaacttgaactgagctcccatgataaaagtctatgttcctctgtgtttgtcccagcggcagctataaacccgaacataacatctgatggcagaaccttagcgaggtcgatgatgtaagaaaggcttgaactctccttaggatcagaggttgctgttagctcataagcccaagtcacacttaaattcttggtcacggaatcataagagatctttgcatgacaaatatcttggctgtgagagcttgcattccaagaagtgtagttggaagaaacaagagagttgttattgatcccaacatgagatccaacatcattaggatcccatcctggattgttaaacgtgtcaaattcaacatgaactagcggaaacgaagatgagtaattattcttccgagtgaacaaattcaagaaaccaccaactgagtatgcaggtagttgagctcccataggagcaagaaagaaacagattccatgaccatctgctgaaagattacgagcatcgattttgaaggagaaactggtgctgaaatctgaagccttaccagttttatgactccatataggcaccttctttgaataagtaatccaaccaacctgagatgtttgttcagcgttgttgaagttcactgttccatcttcatcgggagttgcatccccgtggtaaaatatgtccccgggatcaccttgtcgaaaacttgtaaagttgaagtaaagtgaatcaacaacaaaagggaggaagaggaaaagggaaaggaacaagattgaattagacatagaggaggaagaagaaagattttgacagaaaatgaaataaagcattagaaaaaatataaacacaattcaacaactagacaacggtcaagaagagagggcttatttaaagagtccaatcaacagatcactatcactgaactttgtttgaatattctttaaaatctataagtcaaaatcatcgctttaaaatatctttaaaatgtcatataagattggtgtttcaatgctgcttctctctttgacacagagaccagcatcggtagcctgatgatatcaacgtgtgctgtatcaggcaagtcctgtagaatctggcttctgctccaaaaacgaagattgcctgtagcaagaaccaccacaacatatgttaggaacagactctgttttgtatacaaacaaaccactttgaataaaattaggaatggagttgatattcttcatcattcatgttctctcttatcttttgatatataaattttgtaagcaaaaagaagttgattcttgtaaacgttatatcaaaaaaaaaaaacgaaatttccttattggttagattgagattagtaaatggaaatcggatctaatttagattgcctctataaaactgaaaatcctcaacggttagattaataaaagtatatatcaaatcatcatttaatgaagcaaaaatactctgctctaagagaaaaaaaaggaaataaaccaagaaacgaaaaatatatcacgctcttcttcttcttcttcttcattcttgagaaatcaccttcatcttctttcttcttcgagaaacgaaaaataaacaaaaacatctctttctctttttaatacctgatcgcgggatgaatgatgattcgtgattggttgaattacttctcccacatcctctatgtcagccccaatcgatgatgatttcagaacacaagcggagaaggaagagattgggggcagtgaaagcgaagagcacctaggaaggttttgatctcgacctaggaggaactctaacatgaggaagaaaccccaatcaaagaatccatgtaccagacaaagagatgagagacgatcaacttttgatcaaagacgaaaagagacttctcagatttttcagagtacgacacggtgggcttcgacttctcgtttccattgacgacggcggagatggcgacagagagagagacgattgagaggagagatcaaaggattctcgtttccattgacgacgatggtggaggaagaaagcaatcatcaaagacaaagaagcttctcagattacgaatgaagaagacggagaatttcagacgacgacgacgcaaggtgggctcacggtggtgggcttttttttatgggccccttctttgctaccaaatccaaccaggtatttctttattcattctttttcttctttttcttttctctaaaaaaatgtttttggtaaaactataattaaatagtttaaatctttcactaaaacatttcaataaataaaacttagtataaaatcatattaatttcattattactttttaaaaatgagtttaagtgttaaaattttaaaaacgtcggaaactaactgcgcctacgcatcccgtccttaattggtccgtaagtcttgcggtgttcgaagttcggcaatgttttcacgtaatatagatttgacacttaaactcattttaaaaataataattatgattttcactaaagaaaaagttttatgcttgaagctctcgtcggtcgctagagctgaatttgatttgagggagatggaaagagacaaggttaatgattttgtggttaatggcaagattaacaagttaattaagttattatcaaatagaggttcgtagcgatggaggaagagagacagataagcttttaagtagacaagattctgatgcataaagatgtacaacttgttcttggaagatatgctatgagactcttttagtgatgtcctcatatttctttgccttaatccctttttctaaaccgtcaaaagattcatggtttggaaacttgcaatagcctctggttggttggttggttgtttcaaacgttacactcacaaatataacacaatttaaaaactaaacaacggtcaagaaaagagggtttattttaagagtccattcaacagatcactagcactgaactttgtttaaatattcttttaaatctatgtggacctccctgttttaggatcccatatagtaactttacgagagcataacgtagacgaaccaacactaaccacaagtataagagcattgttcgattcaattacgcctatttggtaccagagatgttaaagtgcaacatggaaacatgattgaatttttctcaagctaagaaggtctaaacaaatgctaaaagaaaacgaaaccaacaaaactgtagagtgtagaaaaaaacatagggtacacatgttataaaccaaaactattggggtatatacttaaataaataaaagtacacgatagggaacatttgtaatacacagaacttaggggtgcatacaaaaataaaattgaaaaaacagagcatagatcagtgatccggactctgttttggaagatctctaaaaagcttaggatcatcatcggcatcgcgcagatagaaaccatcatcgaaattctgcgaatagctcacagcatcgtagtgaaacgtaactaacgttttcgatttattattctccaatccgcaacttctaaccaataataatcttctcatcaaatcccttaacttcggactaggtcttgtcttgttgttgtggttactgattcgagcgtactctgtttcttctgtatggatgagacaagataacggcgaactcaagcatcgaccggtggagtacgattgtctacggttgtcggcgagaactctatccatttcttgcaaaaataaaagagagattgttttattgattgagtgagaaatatggggtttataatcgacgaaagagttagagctaacaataaatgaattaccaagcaaagttggaaaataatgtagattttggctggttatggttaagcggtccaatcataattctcgttttttctttggcagctcataatttctcatttatgggaagcattcatttattgaaacttggaagttttcactagtcattagtcaacattttttggttgtaatgtacctacctatcttcatttggtagtaaaattgtggtacaatgtcaatgtgaagttattagttttaactcctgtttggtttcatcaaatgatataaatttcattgtttcttttgtttttaaaagaagcgtaaagttaaaacatatttggtttagtgaacaagggatcagacttgccagattacgtggtcgtagtatttggggaacaacacacagagctacttcactatcacactatatcttgaacgtgtcgtgtttgttcttgggatgctctcttcgaacaagttatttattatgtatccgtgactcgtgaacttgtgaggcccattacttcataacagttttcggtaaaagaaaaaggacgaaaaagaagagttaaaaaacgctagaaggaggggtcgaacctccgaccttgtggttaacagccacacgctctaaccaactgagctattccagcttttgttaactatttcaaaaacaataaatatattcgtaaacagatgttttaatttcaatttgacttgacaagattaccctttggcacatcgattaacatatcatcgactttggaacctcacaacataatcgcatgtagtcacacttagtcaaatccaaacccaaaaaatctcaaagaaaataagaaaaaataaaaataaaaatgaagagaataagaataatggcaacgcttgtaatagcaaacatgttaatggcgactccaacgtctcgagcctctctcaatcttcttcgtcgatcgccaaaacccaaatatttctcatcttcttcttgtcattttcgtccctcaacttttcgtaaatcatatccttgccccatctggtcttcttctttctctttttgtctccctcctcctagatccaccacttccacctctctctcctcctcctctttccgccccttctcctctcctccgtccatgtcttccgccgccgctgccgccgtggaatccgtcgtctccgacgagactctttcctcgaatcctctcttgcaggacttcgatttccctccgtttgattccgttgatgccagtcatgttcgtcctgggattcgtgctctattgcagcatctcgtatgttcacaccttcttcttcgtttttcttcacagattcatgtatttttgattcgattgttatagcctctttgattgattttcaggaagctgaattggaggagctagagaaatctgtggagccaacatggccaaaactggtggaaccattagagaaaatcgttgatcggttaactgttgtttggggaatgatcaatcaccttaaggctgtcaaggacacacctgagctacgtgctgccatcgaagacgttcaggttgaataactaatcatgcttgttttttgtgtgttagttcagtgagttgggggatttatatcttgttttacttaactacattggtcttatgcagccagagaaagtgaagttccagctcaggttggggcaaagcaagcctatttacaatgcctttaaagctattcgtgaatctcctgattggtcatcgctcagtgaagctcgtcaacgcttagtagaaggcaagtagtttcttattggaacattaaaacaacgtttctttcatgtgataactttggtttcagtatgaatttcagctcaaataaaggaggcggttctcattggtattgctcttgatgatgaaaagagagaagagtttaataaaattgaacaggtttgatgtaaatcagtttacttggtaaattggttctatgtttgtcacaactttgcttatgcttacgcgctgtttttttcttgattgtaggaactcgaaaaactttcccataagttttctgagaatgttttggatgcaacaaagaaatttgaaaagttgataacagacaagaaagagatcgagggattgcctccatctgctcttgggctattcgcacaagcagctgtctccaaggtatcaatattaactgaaagatatataaagttccatgtttcgttatttttttagtaaggtttgttaatttttgcttcttgatatgtgacactagggccatgaaaatgcaactgctgagaatggaccatggatcattacactggatgctcctagttatcttcctgtcatgcaacatgctaaaaaccgtgctctgcgtgaggaagtctaccgtgcttacctatctcgtgcctcttctggcgatttggataatacggcaattattgaccagattttgaagcttcgcttggaaaaagctaagcttcttggttacaacaattacgctgaggtagagtcatcaacctaagtaaaactgttcttttttctttctaattggcttaatgcgactttctactgttctaggtaagcatggctatgaaaatggctactgttgagaaagcagcagagcttttagagaagcttcgtagtgcatcctgggatgcggctgttcaaggtaacatactgatacagagaagatgtattcaaatcaatttgttatttgttaaacaagttggctactgttgaaacttgttacggtcagaaatagcatgaggcattgggctatccaatacggaactttgactttcttgaatcgttgtataaattagacatggaagacctcaagagtttcgcaaagaaccagggtgctgcagaatctgacagtatgactcattgggacaccactttctggagtgagaggcttcgtgaatccaaatacgatattaatgaggttctttgtccttctgtagctagtgatgcaattatatattgttttgaaagtcttgatccttatctctcgttttggtctttctaggaagaactacgtccatacttctcactgccaaaggttatggatggacttttcagtctagctaagacactttttggaattgatattgaaccagcagatggtttagctccggtaaatttggaatcttatctgttacctttccatatatcgaccatgtgatttattaaccagtcgtttagtgacatgaaatattgatttgaaggtctggaacaatgatgttcggttctaccgcgtcaaagattcttctgggaacccaatcgcttacttttactttgatccatactctcgcccgtcagagaaaagaggtggcgcttggatggatgaggttgtttcccgtagccgagtcatggctcagaaaggctcttctgttaggctgcctgttgcacacatggtctgcaaccaaactccaccagtaggtgacaagccaagccttatgacattccgtgaggtaaatgaaaaaacatccattgcacttgcacatatctaagcgtaacatgaaatctcaaaaatcctttcttgttgactataacatcactctgatttacaggtagagacagtatttcatgaatttggacatgctcttcagcacatgcttacgaagcaggatgaggggctagttgctggtatccgaaatatcgagtgggacgcggttgaattaccatcacagtttatggagaattggtgctaccacaggtaatttggagttcatttccaggcagaatcgatgttacctcgttgtgatttacaaagtaatgtgaaatgagcgttatgaattgctggtttcagggacactttaatgagcattgctaagcattacgaaacaggagaaacactcccagaggaagtatacaagaaactcctggccgcaagaacattccgtgcagggtcctttagtcttcgtcaggtgaatataagacaactagctgctaatgttttgttttcaggggtggtattaatgatgatttcatgttttgaattttcagttgaaatttgccagtgttgatcttgagctgcacacaaaatacgtaccaggaggaccagagtccatctatgacgtagatcaaagggtatcagtaaaaacccaagttatccctccacttcctgaggatagatttctctgtagcttcagtcacatctttgccggtaacaaccctcttaagcctgagagactatacatcgttggtgcgttttgatctgaccattcacctactaacttgttcatgaatttccagggggatatgcagctggatattacagttacaaggtaaatttgaaaatctctttatactataaccgactctgtaaattctcactcaaatatctaaaaaaactggatgtgaaaaacttgcagtgggcagaagttttgtctgctgatgcattttcagcatttgaagacgctggactagacgacatcaaggtatcagtatatcctaaaacatctgttatagacacaaatagttgagatacaagattacgaaattttttgttgcaaacaggctgttaaagaaacaggacagagattcagaaacaccatacttgcacttggaggagggaaagcgcctcttaaggtattactaactactactatattgtgttttcatacaatagtttcaatatttgttgcatttcattctcaattgattccaaattatgatcaggtgtttgttgagtttagaggacgagaaccttcacccgagcctcttctcagacacaatggactcttggctgcctctgcttctgcttaactcttatataatcctcacaacatttggaaactttgaaagacatttataagatggaaaatcaacttttcttttttaatatgccaaccatttacatctaatacattgcattgatttctttcttctcttctatcaccatttttcctaccacaaccagactctttaacactactaacaaagaaaaataaataaagtcatagaacctaaaaagactcttttcttcttcttcttctcctacagtacctacccactcactctcaccctctgttcagcatctcacaaatacactaaacaactcctaaatctaaaaggtattaaataacgaactcttcttcttgcttaaactagcactctctttctatctacctattacatttttctttctaactacatctgcttcctaagtttatcatcgaaagaaaaaacaaatcctttccttcagttttccccttcattcctccctttacaccctcagctaaacgttcctagtacttcaggacagaatcaacggttaaattcccaaatgattttaacattgggcttcttttgcttccacaaatggcgattgaacactatctgcatcagaatcactacctgatgaactcccacctgaccctgaatctgcagatcattacaatgttagagtcgacacaagaataggggaaacctctagcaagaggaaaagggtttatgaaaacataccactagacgaggaactaccaccactagaactggaactgcctgaagaactagaaccactactagcagcagctgcaactgcagtaccatctctttcgatctctacagatggataatcttcgattggtatgtcctctccaatgtcaacatcctcttcccctgcatctcctctccttgttctcttctccgcactacccatttctgctaccgaagcctaagagacacagacgaagaaaacaattttgagtattgaaaccacagtgatcaaatggtggttttgataggaaggcagtgcaaatttgcttaccatgttcctaggtggagttgacacgttcctgataaacccttggcgcttgattttgctagccatcttcttgtagttcgtcacaaaacgatcaagctcccatagagtctcattgtcgacagcttctatatccagctcaatttcgtccccatcttgagctaaatgtccgtttctcttcctgagaatctgaagcaactgaccaagcttctcaggaggcaagtcttgtagattcataccaagctttgacttctcttccatcgtcatcaacctcttatttggatccttagccttaggcttcggcaacttccccttccttccttttgacacttcactcacatcaggaggtgcttctacttcaatttcaagctgtggaggtggtggttgaggctgcggaagttcaggctgtatcaccggaggagggggaggaggagaaggagattgaacgcgtgacggctcgactaattgaggaggcaatgtaggttgtggcggcttcactgaatcaagcttcttcgcaatagatatttgttcggttcctttcctaggattcgccaccattggcggattctgattccactgtctttgcttgaagtcaggtttgaagtcaggttcaggacgagatgaagaaccagtgagtttaagctgctgagcctcaaacttcttaaaagcaggattgaacattccatcgaaatgatccaaaagcttatcagccataaaatacacatcttgtccctttggattatacgtcattgcattgtcgaatgtcaatctgacatcagtagcaaaatcaatcggcgaaacgtagaatcctttatcaagattcaatttcactgtacccagatccataggtttcttcacaacctgatgataatcatgaagccctaaaccaaccacatcaacaggagtgttgaacacccacgcccatttatgcttcattagcttcaccaagatctgactacaggtattcaacataccggccaataatttctccgactccggatccgacggaccaaattgattgcttcgcttgagacctgacacatttttcttctgtttcttcttcttcggtccaaggtcattcttttcaccggtgaagttattcaacggagctgatcgaacggcgggtacctctgggatagtataaccttgctgagtctcgaacgtccctgactcgatccgttctctcaggatccgaatctgcttgagctctgaggtaaagcgcttcttaagctccctgagctgacttgaggtgtacccagcgagattaaaagtagcatagcttccaaattccgacgagtcatcgcactgcttgctcgaattgctcctttcgaaattagggttagggttagggttgaagagcggaaggttattggtgttttcggtgacggattggtttgtaaatttcctcataaaaacggcgccgcattgttcctggtacgacggttcgtttaaggtagcgaaaacagccggagccatacgaatcgcaaggtcatttctggggttttcactcttctcgagcttttagaagaaaaaaaaattcacctcccaaaaaaggcgcgggaaaattacatcaccggcgaaaattccggcgatcggggaactgaaaaattttagagcttcagaaaaagggatgaaaagagggttttttgggagatggtcgatgatgatgaggaagaagatgggaggcatcatctcttcttaaaggccattggaatctgaccgacataacgcttagtttaaatctaaccgttaaatttagatcttacggttcagatctgttgggtgacgctgaccgatctagctgccccggaaatctgccacggatggctcagatcttcgtagttatccacgtggagttattttagccgtttgttcgtgaggcgtcgtgtgtatgtgttatttttgtatttttttaataattcctacgaactttacaaaaattgatgtggatttttaaaatgattttcctttttttgtgagagaggcaaactagtcatttctatgtctgaatgggtcccacactgacttttcattattttttgttttctttcgtttctttattttcggattcgactctctcattggtcgctttttattttgccaggtcagcggttgccacgtggagacagctaggatctcggtttcatgaatgctcctcgtaacttttgaatcttgcccttaaactggattactcctagctaattaaagactaaatcataactaattaatttgctatgaaataagtataaattgcaatgagttgacaattaaatattccgaccacaaacaaaacccaaaagaaaaaaaaactcatttctcatcgccgggcggtcaccgactagacggcggacgaatttagggcaacaccagttagtcggaatgacgaaaatacccttcttgtttatgaacccaaccaaacccccaaatgggctttttcactttcagatctctgggctagagaactgctaaaatattgatttctcatttttttctcaaaaaaaaacgaattttgttattttcgaaaggaaaaaaaaattgagagcggttattaccagaaaaagcatggtattgtgtggagcagaacttacatcataaactaatcagaaacttttaataaataaatctagttaaactggaaaaaaagtgaatgaattaaacaaaatctaagtaaactgaataatttctcagaaacaaagaagaagactaacaaaagtaacaacaaaagagaagatagagaggagaagaaaagaaagagaaagacaactcaaggcaaaagagtgatccaaacacacaattattgaatcaatgagggccatttttcatatatatatttttccagcaaaaattgggtctaatctggaccgttgaattttaaaaatattttctcaaaagcccatatgattattagtcgtgggccaaattcttctaaccaacctatattaattaaaaaggatttaaaacattttttcttgtaattgatatttatttccatttcctataaaaaaattatcacttaaaatataatattgattacaattataataaataaattaaacttacgtataattcacccccaaaaaaaaaaagactctttgtgaaaaagggcaatccgtaataagtactggagaagctgagaaatgagaatgttaagaagggtagcgtctaagcccaacaaccaaagtagggaccagacagctaagcaaacccactatcagatattttctctatgcaccacgcgctttttattaagagccgtgcgctcacacttcttcatctacttacataaattttgtcgcaaatcggaattttcttcacattacaagacaacaaactactactatgctgcacaattatagtttccttcataaagaacaaacattatcatttttgctaaaccttccaaattgtttcatcacgaaattaaacggtaattttcatggaaatgtaagtgaaagaatcagagaagagaaatagtgtaaatcggattttgatctcttagaaactgaatttctttcattaatcaatagggaggaagaagaatgaaatatgttaagactaaatattggataagatactttttcaataaccggttaaattgaatcacggaccggttggttcgctatgctagttggactggacttcagaatccagatataaacggcccgctaataatgggttttgttatagcccaatatgtttgttcaaaactctcagaggcccaggattacggaaacaaatagctcctctctagcactgagtatgtgtctttgaaaataaaagaaaatcgataattagcctacacgagcgaaatgataacactaatcattatataggatgctatctagaaatttgacttaggaaaaaaaagaaaaaatttgcaagctggcattagagatgaaaacaaattagaagacacgaatataaatgttactatgaaaatccagggtaaaatgaatagttttgaacatgtgaatgtgagataagatgtgactttgattatgattcgtacaaatctgtgtaaaaacaaaacaaatataataccagaagtagacataattaactgaatctggctcctgttctctcataaagctcccttcttatgttgtaataattgaatgtccccactctttttttttctttctattcgtcccatttgtttttatttcaaaagtcgttctaattgtttcgaaggaaatgtataatatgaatcgtgtcgaatttgatatttggatgtctcataaaataacagaaaaaattcataactttttgactaatgtgatatttctaatagtggtttagtggattgaatagacctgaggatggccctgtgctccacctcgagatatcaaggtttctttgatcgaattgaaaagtttcaaatgatgttcaagatattgttatgtctgattgaatagttaaaatatctcttctttttttataatatattttgaacgtaacatatagttttatcaacaacaacaaaaacgtaagacattctatgacgatacctaaaacggctttgatgctaaaatttctctatccatgacgataatttaaacggcctagccgctatttgattcactgtgtggcgtatttgttttactaagtcaatgtgcctcctaaatgcagaatatacgggaatgatcttttgcccttcgtttcacgcaaagtgctaaaactttaaccatataaaactcccgaaatataatttagttcgcacaaataatatcatgacatcagtaaagaggacacgagagaaatccgggggacccgagatcgtgttgtatgtgtgtgagagtctatgctaaaatctaaagttatgatgcaacactatgtttttctgtacacaataatgttttgtataaattattttagaattcgttaacttatcggtatatatggaccaacgaaatttcgtgaataaaatgccataacactaacacctactaggcatgattggaaaagtatgttggatgaataaaaaaatgttatgagtgtgacatgccgactatacgtgagctcttactttaacgtacacacttatatatagaacggagaatatgacgttgccttttaacttcttattcatacgcattctcgttactatatatatcgactaatgattttaggtggtttttttagggctaaacggttatattaagtgaatgtataaaatccatgtttatgggtggacaattccaataatgctcatatacactcccgttccatctcctctcaatcatgttttttttatcccatactatacgacaatgcgctctctctctttgagacccgaccctatttagagcacaagcaaaagaaatcattatttgaaacaacacattaattatatgaaaacctaaaaaaaatcaacattcactgaaaaaaacatacgaaaagaaatgtctttttcatttttcgcatatttttaaaaatgttaaaccgtgagatagattttttgaaagtcatttaaaaaaagttttatttaccatttttctataacctgtcttaattcccaataacactaatttttcaaaatctacttatttaccatatcaaacatttgctatatccaacatgcatgttttgattattcgttttgacatgataagtcttcagtgtgcaccaccatggttagatatattgcatccgtatatcttctacttacagagacttcttcttttgatctgtaagtattggggtgcatggactaactcaataacaatagaagatgacttaactaacagtaacaatagataatgcggacttccatttttctagacatggttttattatcctgaatgcctttctttttttttgttgaagtgtttaacctaaacggctaaatcttataactagttgtattgtatgattaaatattaaaatttaacgaaggtgttcactaaacgggcccaaaacgaagaaatatgcgtcctttaaatgttataataataataataaataattaaaaaagagtggacaaaggaaaaagtgaaaagcggtttcgacgagagaatatgcataaactatgggcttgtccaccgatttcatgcaatgcaaacaaaatctcgttacgtacgaaatcgaaatatttggtttttaacaaatgaaataaattggagagtcaatcaacgatagtatatcttttctagctacacgaagaaaatgctcaactcttcttcattttcccttcttaaaaaataaaaataattttagaataatcaatataaaaatcgtaagaaaaagacatatagttgttgttctaattagctaaagtggtatactggtattaattacaactaattcgaggaattatccttaattatacaataatactaggatttaacttacggtttaccgcgggcaatcggtttatttagtttttatactaaatatttgagtaaatttgatatcctaaacttataaatataatttttttaataaacataattaaaaaataattgggatttttttttgttgttatttagtgataagaagaatgtgttaaaatgtatttaacttttttttgcttgttatttatttatttttgttgaacggtttagattgaagaaaattaattttattgaacggtttagatttaatcggattatataaagtttaggagattgttaagaccaaattacccttaatgattttgaatagcaaagaacaaaatccaaaattaaaatcaaaattgaggccaaattagacaaaatttcagtttgtactttccttttaataataagaggatactttcttgtggaagtgcccagaattaaaataaagtatttgttcaagaaccaaaaaaaaacatatcctgcaatctgtatcgcatcccccgatttaagcttattatcaattcatgtattccctacacctatcttattctttaattgaaaaaaaaaaaaaaaaaactgagttcatattaaacttataaaattacgaaaattttactttttgtcagtaacaggtttggttttttaagtcaatttatttatttttgtcgaaataagttaatttatttaagctacgatttttgttgcaaaaactgtttcttcgcattttaaaaatatttgatttttggcacatacggaaaagatgcctggcaatgctaacatggacaggtggacgcttgataaaaggccacgtagatattgaggttggaaaaatatttcacgtggtcttggccccttctctttgtcatacacattcaccttgagaaccgaatcgggtcaaatcttcgtttttttttttttattcactctgtattttttttatcatttctccaaatgcttaactcgaacagtagtaaatctgttttatgttattcggattttatttttattttgaatgatttttctttttttcagtgtaagttattttatttttactttcattagttaaatgcaatcaaagtgttatataactataacgaaaattaaaaacacattagatattttaatctattttatatgaaaaaatgtagaactacacttgtaatgattcaaacaactacttagattaaatgacattaaatatttaaagataaattaaatccatatataatttagatttttagctttattaataacaacaaaaacaaaacaaaatcgtgtattgtaaccctcagtcgaattctctatatctagtgagggctttgacttatgattagaatccaaagagaaattaatacagaagaagacgaagttataatgaaaattgaggagcagcttttttggttagtcacgtcatgtgaagaggaagaagatgaaggagaaggagaagaagaagaagaagatcattaattagggagagggtcacaatgcagtacgagacagttcactgaatctgtctatctatgtaaaccccacaaactctcacgcatatcatagcttctgatgaatacaaacaagcctcgatcccattaaccacagacttgtccgtctcttcttcttcttcttcttcacactcatctttataattaacacacacatatgttatatactcatctgtggatgtgcctatactataaagacatgtcacacgtggtgggttatctatgtaactacgtttttgagtgcaatatgtatctatttacacgatactttactgttttcttttaatggatagcattagaatgacttgatggtctaaccattaacattagaatgacttgatggtctaaccattaacattagaataacttgagtccatcataacttggtttaatagttttttttggttgtgatgttacgccacaagcacaaattctgggacctttatattgtgtgtataaatgatatttgaatacagaaattaatatttgtagagattcatcaatgatatatttgcttttgttttttgttcatcattaaatcaaagatcttcgtttaataaaacttgtgtttcatatttttaaataatttataatccagatatattgtactatatacacccacacatgtataatatgaatgtgaatgttgaattatagattgaaagtgagtgaactgaaaggacgagagaggcctaagacagtttgtttgttttcgtgaacatggagcttctctttaccatgtgctctcgatctttttattattaatcttacttttatttacttttttcacattttgtttttatacggttttttatatgagaatggcactgaagatggagcaagaagttcacatgcaaacataaaatattacacataaaaaaattgaaaagctacattctaggcatatgcgtgattttccaaggatttttgtttcgtataaataatattagcagtcaaagtagctagatttgcttctataaatatactttcaaatttcacccctttactttcagatttgtcaatttacgccccgaaatggtgcccttgatagcaaacaattatacagtactactatgagaacgagaatatatctttaaaaattcgaaaagctccaatattttcggtcattagttcataacttcatcatattcataacaattaccgcgaatagcccatccaattattataaaaattttgactatgtaaaagcgttaatcaaaagaataaacgtcatatcaaacgtaagacaaatgtgaacacatatgacaattattaataggcctacacttgaaaaaatgagattactattcacaaacattaccttgatttaagggtcaaattgaaattaaaaaaaaaacaagtgatgctgaatataaaattaaggcaagatctagacgcaatttagtagaatatgcgtacacaatagataattacgtacgcctgtgtatatacgattaattccctctcaataatagttcatcattattatgtaaaatataattataaaaatatatatggcagacagaaaaataaagaaagcaagaggggtagacaaatgttcatccgttttcgtcgagacatgaaatttgtgggatcaaagcaatcctgtaaggaaagggaattaatcaatgtatattactctctttttgtttgtttctcaattagatgaatacatttttcatttatataataactaagacctaaactcttgagtccattactccatttcccctttgtttttttccaacacttcgaaacacagatgtgctagattatatatgatcacctaatgcatgatttatatataatatatgaaaaagtaatataaaatagccagaaatttaatcttgttatgaaaaattgaaaatgattcgagtaaacacctagatggtcattttagactgatatagtaatatctcaatgtatcatggtatttttttcgatggacgaatctgtctacatacaatgcacgtatacatggatgttagaaaccgcaacctctagaactatatgacacacgaattgcagaacttctaaaagttttactgcagtaaaatatcaatcattaaaccaaaaagtctcctataaaagaaatttgattattgattatatgattttgagtgaaactttcttagcagttagcagtaccttttcttttttcgtaggctaaacttaccaaaataaaaactacatcggttcatgtcaagtcttgtaatatatagctaatctagtactagctataggctacagcaaacaaaaatgtttttattatttgtcacgagaaaacaataaaatgtgttatcaaactaaataaaaaccatatattatactaatcacaaattaaacgggaatcttttatttaattaatagtatactctctcacacagacagacatctctggatttatatataaatacagttcatcttctttaatccacaaactcacacacacacacacacactctgttttcttcgtccattctattaccagaaaacagagtttgatagagagaaaagaatggaactgtcgactcaaatgaatgtgttcgaagagcttcttgttccgacaaagcaagaaacaaccgacaacaacatcaacaatctgagctttaatggcggatttgatcatcatcatcatcaattcttcccaaatggatataatattgattacctctgtttcaacaatgaagaagaagacgaaaatacccttttgtatccttcttctttcatggatctaatctctcaacctcctccattgcttcttcaccaaccgccaccgttacaaccactgtcgccgccgttatcctcctccgcgaccgccggagcaacatttgactacccttttcttgaggctttgcaagagataattgactcttcttcctcatcgcctccattgatccttcaaaatggtcaagaagagaactttaataatccgatgtcgtatccctctccattgatggagtctgatcagagcaagagcttcagtgttggttactgtggaggagagacgaacaagaagaagagcaaaaagcttgaaggccaaccttctaagaatctcatggcggagagacgacggagaaaacgacttaacgatcgtctttctatgctccgatccatcgtcccaaaaatcagtaaggtaaattacaaaatgctaatcttttttttctttcaaaccattaataataattgtagtcaaaatcagcaaaagatttgatcatttttttaatgagtaggttaatgactgtattattatatgtgttcataaagaaaatgacctttttaatcttcttgatttacctcaaaatctaaccctagctaaggtttttgtgttctttgaagatttatttaacatttaattcaaaaaattggtctcaggaaaatcaacaaaagattcgtccttttaaatgagtgaattagttataaaattggtttcaaattcagccttttgtattttaacattatgtgtttgtttcttcttttttgaaaccttagttttcttcttcaagattgtttaattattgtgttcttacttttaagggaatctacagaaccggctgaaaagtgataaatcatttaaaagtgttttaaaataatgattattggtatgttcaaaaaaatcagatggacaggacatcgatattaggagatgccatagattacatgaaagagcttttagacaaaatcaacaaattacaagatgaggaacaagaacttggaaatagcaacaattcacatcactctaagctcttcggtgatctcaaggatcttaatgcgaacgaacctctggtcagaaactcaccaaaggtacaaagatattttacattgctcttgtttttttccttctacatattagcccttgtatttatgaattgttataaacaaaccccctgtctttttaacaaatctttttgtaattctgtttatgttttgcatagtttgaaatagatcgtagagacgaggatactcgagttgatatatgctgctcgccaaaaccgggattgctactatctactgtgaatacattagagactctaggcttggagattgaacaatgtgttataagctgctttagtgatttctctttgcaggcttcttgttctgaggtatcgatttaatataaagtatttatgcatggaatgttaattatatagtattcgtaatgataatattgatgagttttgttgtatatatgtttatagggagctgagcagagagatttcataacatcagaagatataaaacaagcattattcagaaacgcaggttatggtggaagctgcttgtaatgagtcatgattgaaactaataaaccaaaactattgtttatttctaataatactagcgcttataaactttagatgttgttttaattcccttgtgagtttggtttttttttcctaggggaaaacattatgagttcagttgtataaacaaaagaaggaaatttaaaaagagatgtttctcctaaattatatcaaagaacaaattgagatataaaataaaaggttatattatgttgctttgagggaaataaaccacttcgataattgaaattagggttcgtatatgacagtgaccgatgttcgaaggatgcatcatcaaataaaaaagctgtattaatcaaaaagttataaaggctaatcataagcgtgattataatgttaatgactgtgcctccaccaatcaacgcattcatcattactgcggcacttacgtcaacgaattaatcttttatcgataaaattccaagaggccctaacttaggcttaatcaattattgggcctataaagaacggcaactgatgtagatccaaatgggctttatttagtaagcccaaactttatgttttctcttatatcttcctgctctgttattagaaagaatctccgatttagatagaaacaacaatcctccggtggtcactcgctaatctccgtttgatctcgccgacactcgagccttttaccgatgaaggatggagattccttaccaataagcacttcttccgtcgcggcgacgacggtgaccggaaagaaggaaaccggttattccgctctcttctcgaaaggccggtacaagttttgggccttagctgcgattctgttactcgctttctggtcaatgctcactggcacggtcaatctccgttggtctgccggtaacattaaccatttcaccgacgatctcgtctttcccatccacgaggatctcgatgttcttgtgagtcttcttcttcttcttcgcgatctgttttctgatttctgtgaattacgtttgatttgtgttgtgttgatgaggttattaggaaatggaggagagggagaaagtggtgaagcacatgtgggatgtgtataacaatggccgtcgtatcagattacctaggttttggcaagaggccttcgaggctgcttacgaggagcttaccagtgatgtacctgatgtggttgaggctgccatttccgagatcgctaggatgtctattcgctccattgttatagatccgcctccgcttcattccacggtgagagtctaacttccttatgcctttaacactgcacattgctctctctgtgcggtttcattatgcattcagtgtgtttaggtcatagagtcactgtaattagctaaagattgagatgagacaactacaagaaaaaaatgaaaatagagatcagagtttgtatcaattttgcagctgaaatcttaaggtagaagtagtcttgaggagctaaatcattctggataatagattagtattattctgcataggtgttagtagattggcttcatcttctatttctttttggcagctcttttatcgttatacaggccaaagaagtttttcttctattaagccagaccaggcaactagggaagaaaaacatgttgtcgctcttaagaatggtcaaagtctgatatccatcttagcctataattctaagaaactaatatggatgttgatcctttttcggagggttagtgtgccgggtagggtatcactatgaaagcttgttcggttttcttagttttgcgctctagattatgctgttgaagatagctgcataactacaaagtgatgattgtctatattcaactaaattacggagagactataggtttctctgtctgcatttaattccacactaaaccacataaggtagatataaatgtttggatgaatagtcagtttctttcctccacgtacattctcttataagtgggtaattttggtttttacatatccacttccattctattgatctgctcaatcgtaaggacccgatacttcttgctagattgtaagctatatagcttcgttgatggttagtaaagttataaggcacgatatagaaagagtttggctatttggaaaccttgagtttctttgtttgttgtagatggaaacaaaacgtttaatacttgttacatgattaacttgtgtcactttgttggtatggtaatcggttttgtctactttgtatgcagaatgtacgagaattgacaaagactctaaaacttgcggacaaaggaagagcaactcaaatatcaaaaccaagcagccgtcgattgaaatagctatggaggctttacgaaaaaggtagtgtagcagtcagccgtcgtggcgtgaccatacatatacttgatgtcagaaagatcaatcaacctcatccctagaatatatgtccatcattagtgttattttttcttccactaggggcattaatcctttcactatcatcatcatctcttctataaacaaaattttgaggaagctttttatccacaccttattagctctgaacggtaatgtcttttattttggatttatgaaatatttcatatgtagttagcccatacatttaaataccttccaatgaattttctagttatatattaattaataactctcaagcactgaagtaatttttttatttgtgcaaaatacttagaaataaacaaatgctatataatatatgagattgatgggataacaacttaaacaaaaagaataaaatcaaatatcatttgtttctaaaaatagtaattatcccttgagagttaatttcatttatacaaatggaaaatacaatcattggactgaggaatcatcacatataaagaatgaagtaacacacatccaaatgtccaataaaggaaagtatgaaacaaaatataatgattttttaaccaagaaagaaatccacttgggcactatgaaacaagttgccacaacaaaactcaatagcatgatgaaaatgaggcttacgctataatccggagacgagaaacaaaaaggcctatataacattcgtttggtgatacgtcatgtttctcacttaattagatagctagagttaatcgcaatgattggaaaaattataacagaacataaatcaaagttttctataaaaggttaaacaagagcaagaacaaagtctcaattaacataaaactggcttcaaatagcaaatatcataaaatttagcaggcaagtctaaccaagaatctcactatgcaacttgcaaaagcatgtgtgtatatacatgcatatgcattatacatatacacgtgtgtatgatataagatggtccatatccgagtttcaacattatctacaatttggaaactaatgatgaatccttttcgaattctgatgcagcccaacaagttgtgtagcagccctttcttaatcatacctgacagatattacagatgaagaaaagggcgaaaaagagaatataatgggacatgtatggattgatgatggccaaattttgttatttaaactataatctttttacaaaagttttaaactttagtttagggacgaatctatcattaacacttgaataatccaattggtgacacgcctaattatgatggattataacctctcagaggttatagtccacaaacttcataaacttacattatttaaagatttaaatgcttttgaattatgtggccaatcccattcagaaactgattctaagcaaatttgtggttttaaccgcaaaggagttggtactaatccatggagaattttttcaattaaaactacatatacctaacatttttccactacaaccgttttaaaataaaataatccatttttcagtattcgaattcatatctttattattttcattgtagctataataaatttaaaaataaatgaaaaaattgtatgattagaagaaaaatagaaaaaggtgacgtcaggataagagaagcacgaagaaatgttcccccatgtgaccttcttcaatctcaggcccgctcttgtcttgcttatcatccgtacgttttacattatactctacttttcatcattttcttacaaaattattttcattttcttaataatacatttcttagttttttagttgactatatactgtttagttctttcgaggaatgtacgtattgcgtaccaactatatatcacggaaatttattaaaaaaattaagtaaagtttataagctattgctagaatagtagtcgcaagaaattccgatttataatgttcttatttccacaatatctttaagagaaagcatgagttcatatttttttactattacaatttcttctgaagttatatgttatcttatgatgggaaatgttatagttttttaaagctggtttagcatattatatgatttttcagctaaaaacaaaaacaaataaagagataaaatggcatgatccgtaggtttcagcggtgattgcggtgccctcacatgctttcatatgacaacagtattttttaatactgttttccatgatgatatatcttagcaatactatgacaatatttaaagaaataattctgcgaattttaaaataataattataataaattaaagatacatatataggtaattataataaatctaatgaactagatctactaataattatgtgatttatatatacactaatacacaattgtttaataagaatttatgaatagacaacataaaatacgcgtatcatacaattttttgatattcttcttgttcgagcgtataatttgagcttaacaactggattaaggtgtttttatgttactgatgtgttcatgatcgctttgatttcttagcttaataaatgcaactatagtatagttaatggaagtattttactagatatgcaatatatttaaattaccaacaaaccaaataatttccacaaaaaatggtcgcggaagaaccacgaagcgtagataacgtcatcaaaggaatcagtacagtcaatttgtactttccagtgtaggacgcacttgaaacaacactgtttattttgcatcttttcgtaatatctaactcttaacaaaacttttcattactttttaatccaatgaagttaatttacttctgacattttttctagtggtcgttgttttcttttgttgtgacgcgttttgaaattaacttgatatgcttaaaaagagatttgattcgaaacttcgagttaattcatcaacctttgaaatgtttatttatttggttgcataattgataattagtggacttgagcaaaagataaatctctgtcgatcagattcggggataatttggattagaatattaggatcaacaaatggatttaacaggactgaaattcatcaaatcataaaaatataagaataaaataaaaaatagtgaaattaggtcatgaagttgattgttaatgttggaggggtccaagtggtggggatgtgtttagagagcacttggttaagaaaacttgccagtgacgtcaatttccggttggaaactttagtgccaaatatatagttctttatatttcgagggtccctaactttatctaacagtgtggagttttatttggcaattaacggaatctgtcttgtaattaacggaaagctatctaacgtctaattcgtattttatcctaatcaaaaccatacgaacttttttggtggttagatgtcaatttcagtaattccattaaaaaacatgtctcattttgtaggaacttaaaatagtatggtgttattatctgttttatctttaacccatccaagagttagatatctactggcggaaaagaaacaattattgatttcttgtccataattatatttcgagaaaatgattaaccacgaagacttcttgttgtagtaacgcacaaaattgaaacttggtttagcagtttttctaattaaagcatcaaacgtggttgcataaaacaccttttaagtttttggattactgatataaaaggaaatgtgaagaatcatgcaatcttcattggctatttctggtacaattcaaacagaactcgagatgtcctaaaatgctagcaatctattattttggtattaaaaaaaacataaaactcatagatatacagtttcgtctatgatttcatttgtagccaaaggaaaacagaaatgcatcaggacatcgacatcgaaaatatcgtctgacgaaatgtgccatgtgttttatgctttacataggtagtagcacaaaataggtgtaagatattaaacaataaaaaaacaaaaataactgtgcaactattttatcctttttcacacaatacaaaatatccagttttgagacattgttgttagtagaaaaagaaatacgtataaaaattaacctcagattccataatttagtttgcttttttttttggcacaaccatttaaaaccaactgaatacaaaaataaataatcagtgatagaaaaaaatgtaaaattttatgatccatatgtacatcaaaacgagacatttcgacatttttttccgccttctttcgttcgttatcttatagctaattaaatctaatacaaaggaacaggaaaacgcgccggcttaacaggcggtgattgcggcggagtttggacatctacggtgagtttttcaggtcgaggtggtgcacacggacacggcaatgctatgaatttgggtgtattatctcctggcattaacaccggtacgctcagattctgcggtttcttcatttcctgttcatagtaaccatatttcttagttactcattccaaaaaaaaatcccttatttttacttcaaattttagtaacacaaatgttatctcctattgttttccataaaatttgctttcgtgacatatttacagagagataaaaaaaccttatttagcgactcaaattcttaaaatgtttagattcagcatctcaaatttctatagataaaattatattttttgatagttggaaactatttatttataaaaaatacaaatactttctaaaacaaaattacatatattaaatttaatgttttggatactcgtttaatagctgtagtttatatgagaaataggaaatgaacaaagtcatattttggtaaagttataaatttgagaagagagttaccggaaaagggggtttgggtttgtaaggattagactcgatgtcggcggagggacgaccattggccaaagagcggcggagagaacgatgtttgtcccaatggtaacaacaagagaatattccggagaggctgaaaatgatgataagaagcagagctgtgccaagagggaatcctagtgacggccgagaagcatccatgtgtggtggcgagaaatcttgagtgttctccatcttcttctacgacggtggcgatataatcgacggctgagattgtgagctgatgattttgttctctcatgtgttagagagagaaggctagagaagagaagagagctttgagagtttggtgagaacaggggacggggaaacaagaagagatagggagtgtttatttataaaagatttttattttattgtttttgttgtgaaatcaaaaaaatgagatattaaaatgtttttattttacaactgtgaaaaagttattttcgcagtacacataaagcaaatatgctgtacaataaagttgtcccttttcttttcgccgttgaaatttttattcccattaataattaaatcatcaaacgatagatttttcaaaaatataaagattatgtttcttgacttttgttgaaccaatttacttatcattttactgtttgattatgcagtgattttaaaagtaatttttgttttttgctagaaagttaaatgttaatgagtgaaaaaaatctttctgacaaaataaatgcgttaaaaaatcttgtactttcatggtgataaaaacagcttaacttttatggattccttggagatcagatgttggtattggaataatatgtgagattcttttacaaaaatgaagacagacaattccaaagctagttttatctttacaaatatatataaaaaacaaaacaaacaaagtgttatgtttccattttcctttgaaaataacagattaatgaaattgttaatctaaatgaaattaattatgaagcttgaaaaaaggggaaagagagagtggaaaatgtacgtggaaagatgagatagagagggctgcctgtacggagaagacgtgggctccaagctccaccatgttaatctttttagccgttttgcacctaatcttcattaattaccctaatcctacccttatctccaatatctactcctaccaaatctactaacttatgcttatctctatcataaacccaaaacagaacagttcttcatgtttatgcaacgctctcgtgtagtttttcctggtttaaaatacaagtgagtcgggttagaaagaattttgtgacaacattattgaaagttgaaacctcttcatcgttaattatttaatgataaagaaaatttgcatagttatttgtttactcgaggaataacgttggctcgtcgatctccaccgacgttattttattagattttgatgagctttcagattttataatatagtttcacgcatttttaaatgcgagagaaaagtatatgctggtacgagtactatatgctagctaccaaaccaaaacaattatcacatgatttgtctctattcgatcgatttgtttttcaactattacatcaattctgataga

SEQ ID NO: 968 - DNA, 84440 bp, Arabidopsis thaliana
gatccttaaaatatagtacatcttttttgtactagatatttatccaaatgtgataatcatacttagttatttaatccatctgacatacacaaagtcataacagacgattgctatacacacaaatcgtcatgtattattacccacaaaatttattacacaaacattttgttttacgcattttcactgtttgatattccattaagtgaattttctaaaattttaatactaatttttaaagttaattttaatcctaacaagttttaattttcaaataatttttctttgttaatatgaaaatttgtgctaaaatatattttcaaaacatcaatcactattctacatgtcctagtcatttaatgaatattgcttttgccaacctttgaaattaataaagcattcaatatactttccaagttttgtgtaatatatcgaaactaggctaggctctctataaagacgaaaataatacgatcatgctatggccatgtgcattgattatgtgtgggcgcttgttatcacccacacccgaaatcccgaatcgtaacgattggaagagaatttgagttactactcgtcgatcgtatcgtacatacgtcatttagtttttgtattctttttcgatttcatttaaattttaaaggtgttctcaaaacaaggaaaaaaagaagaagttatgcttaacttctgttttttatttatagaagttgttgaacatcaaaacagataatgtggcattgacgaattgtgttttgttcctacaccgtccctagacaatttcgtccccacttacaccttaacatgtctcgttcaaaaatatacgctctctttatttccaaccttgagcttctcatcaccaatttaatttaatttcgtgattttgaaaattttcaacaaaaatttcgtcatatgcattaattttgattgaaaacgatcgacaaggtttaattgtgataatcagagacaagatatactaatcacatacttagtgattaagatgttgttgagacgtggttcattcatacattatccacttggtcgctataacataaaacccggaatacaagcaaatccaaaaaaaaaaaacagtatttactttgatccgacaaaatccatattatagggtaaaatctttaacttggcaaaaaggccaaaaactctaattttccggatgactatgaaacatatttacgtcaaaagtttgggacttttgccggcaatgcgtatcaactttttctttctctaagttgtcaatttaattaaaaacatctactagaaatatgggtttgatactttatataagtaataaataaaaacctttgcgactcaaaactaccacacttgatatgaaattacgaaaatggacctgagcgttttcgggtttggacctttggccttttgagttcctaagggacaaatattggtccataaatcttaaacgacttcacgattgaaagtacagatatcgatgataagattgatatgggaatactctgtttcctatttttttatataatgtttgacgtgtttgtatttgttaataaataaacgtaacatgtttgatcgttgaagataccaggaaatgataatataagaataattaaattttgtcacatgggacagtatcagtaacccatatatagactattaaagtcaatattaagttagattttacggctgctacaagatctaatgaaaaacaaaagagtagctgccgtgtggaattcgaatttgacaaacctcttacttcgatcctgacttataattttaggtatagctgtattttgtctttgcagttttaattatacataccgccaaaaatcagttattccaaatttatatatttatttattattttcttaataggaacatttgtttctgttttttttttttttttaaaacagatttcatttagacataaaagtgtaaggatagtaggatagtgttacattaacttgtttagtggttatcatcatcccatatgtctaagctcggtttccgcatatgcttcactcatttatatattgcgacaagttgattatgtataagctagttatctttgtgctaatccaatcttctattctaggatgacacatgtttaggttcactaacaaaaaaaacacatgttgaggtagattatgacataagttgggcggccttattcaaaatggtgctttacgagttaattgtgttaatgcttgatcagattattcctctatgtacacagatattggttttaactccatccgtccatcttgaaaacagcgtttttggataataatgaataatcgatctctataatgtatattattagattcatgtatatcttgtacttgttcctttggaatctacatgtctctttatatgtttaaatgttgtaaacgttccagtttgttcaataaagaatagatttctctgcaataagagcatggttagtttattacacattcacaccatgtaatgctctagttcctcttcgaaatttgacacaagataacaattatctttgagatttataagtttcttagtaagattagatacgatctttcatatgcaaacatctataaacactgttattgacgaaaactaaaataaagtaagcacaattattttcagtttttctttttaaattgtgcttactttcatatactgtacaattgagtttatagaaaattggtttcaaatttctaaaatgaaatacaaggaatttctattaggaagtagacttgctattttaacttgtaatcacaataaaaatatctatatctatgtgtgtgcgaagtgtgaactgtgaatgggtcttgaatttgtcaccgccgtttcttttagggtcaatgagtatatccactaaacccatcttacacttttttatatcacttttttttttctatcaataacaaaaaattctataaaacgtgttttaaccattataattgtaaaccctaaaccccacgatcctacactttttatatcacaacttgtgtgtttgcttaaaacgttgttaataaccattataatatatatctaacataataacattaaactttttaattagtccaaaaaatgaacttacaaattattatctactaataacgatttcaatgaggtatgcagcatgttgttgggtttgttttgagagtgacgcaaatctgtcttttctccaatctaatcaaagatacatagcgattcggtgacatcaattctagaaccaaaaagatttgattaaacagagaaattgacttaatatgcatttataatataagctcttatgttgtagaaaaatccaaacctgttccacaagcaaaaactaagctgtatgggaccatgttgatatagactaagaccctaagcgatatgtacaaatacaggtgttatacatagaaagaaaaagaaaccgtttttttctttttcttatatctaattcatatacagctagatatacatgtaatttaaaatgttatctttatgtagtaatttattgcgagggatgaaatatctgacggaggttttatgtgaaaactcgaaggtgtatttgattttcggtcaaatatattttaatggctctctcgtatattgatgatcacggctcggtacattgtcctattacgaactcgataaaattaattatattattttgttgtgcaaatccgatttagtagctcgtcgtttgaccctatattgagacatataaaacatataacaatttgcaataaataattagttgtttttgtgtatttctagttaaaaaaaaattgaaaaaattgtgatacaaagaattataaaaacgttgacagcaacatgactgactaaacgaagaaatatcttacgtacattacattttttttggggtcaacacgtagattataaattcaacaaatccttaatacgagagaggtaagtatattatggcccatcaagaaggatagtggcttatgggcctatgttataatatgaaataaaagcccaattataaatgaatttttatatactagagtgcaaagtctgggcccaaagtaaacagtctaacgtgtcttgtcgtttgatttcctccactctaattataaattaattaattacggggaaaaagattaattaactttagtgaatccatcatcaatcaaagactaataaaataagcgtgaaggacaaaagcactacgggtctcattgtcttgtctcaacccgcattatttgtactcgcaaatgctgctaatctgatctactgtttacttttgcatttttgtaataatttatctgtattactattattgttttttaccaatcactttttaattagacacatattttcatgtactcataattttaaatataatgtctgatggtagttgtagtaatttgaaataattaatatcctttacttattatacagacgattaaacaaaatatgagaaagagaaaatcaaaactttttacggggaaggttaagaaatgccgtattattattctggacggtgaatatttttcttttactttcctctttgtgcataaggtgttaaagacttttttttttgattaatcgtctttaaatctttggtaaaaggaaagaaaaaaggttaaaaagaatagagaggggtaaaaaagagataacgtgagtggtacggaagagtgatgatgaaaaaaaaagagtcagagaaggtcatgatgatgatgaacggacacaggcctctcttactctcttaccatcaaatcctacggtcagattgagatattttgtgcttcccatgcgtgttcttcaatcccatttcaccccttttgttattattatgctcccctttccccaattcccattaccttccttttttaattactttgaattttttacagtaattttttttatgtatattacacccgactataatttttttctttttttctttttaacacgaaaagaatgtaaccgactataaaaattaacatacataatttacctgtttattaccaacgaatttacttttttactttttaaccaatcatccttattactatggattaaacgttgtgtatgatgatcgtaacagtgcaattcagacatatttaatactccagaaatatgtatgttgttcacattcaaattttgtacttctaacaataacaccacaaattatactttcaaaaaatgagattttttttttaaactcaattcggacaaacttgtatgtatctaatttttgtcatgactataattttgtttcaatcagtttacttatttaagtgcaaattcaacaaaaataaaaaacaaaaatctagcacgtgacgtaaccttatgaaaaagattaatctatagtcattattaaagttacttatactatttacccattcatctatctagaagactacaatgaatgccaaaccaaaaaaaaaaagcaaaatgaaaaattcaagtttggggggactaacatttctcaatgggccccatccagttgggccaatctaagtaaaaaaaattgaaagataaggaaacgtaataatgaaagttaaagaaattaggaaggtggcggaatttaattaaatttaatccgaaagaaagaaagtgattataaaaaaagattaacaagtcttaattaattttagattaataaagtagagatagagagagaaaggaagaaagtggaagaggttagatgtcccattcaccacccggcaaaccgacttggaatgccgctttcttgtcccctcctcactcctctttttctctctttaccattttacccttcattcctcaatcacattatcatcacatagaggttacattagtcattaaaaacaaaaggatagaatcggaatttaatatttgcagacaaccatcccctttcgggtggagccagaaaagtggcataattttgtttaaagatccgactcccgacatttgtacatcaacggttcatatctgctgatttaaatccgacggtttagaattatcagcacgatcaaatctgagccgttggattagaatccattcgtaaataaaaatacgcaactttttccacttattttctattctaccactttgtttagttattttaattttaatctcggctacgagtttctgggtaatgataattaagcttttttctgctttaatggaaggaccttgacacttctctctctctttctctttgctattcatcttctacagtttcttaaaaattatactcttcttctccaaaatatctcagactctcttatttttgatcgtcttcttcttcttcgttgtgagcttccatttttcatccaggatttgttttttccgtttgaggtaattatgtcttctctgttcttcttatacatagtttcaaatccggtaatttttagcttgttgttgtttgtgtgtgtagttagtagttattagatctattagctattgagtttctttgctgatttcctcactatttctatggcgaattttggtttgtttgagctgttggcttaaaccttgctaggtttagtgatttgtagatagaattctgtggaaattcaaatctgagatcagctcgaaaaatgtaactcaacggtgtagtttcttcatctgaccttaagttgacttctatttatttttagctttccatttttttctcagattgagctttattttgctctaaattttggttgtgagtttttcatagatgcaatctacttttgaaaccctaattgatacggtttcgagtttcttcgaattttgattgaaattgagttcttgattttttctggtaatttagggttttgtttgaggatttgtttatggttatgtgaatttaatgtggaggactttgtgctgtgtaaatcatcaggtaaagcagctttgcagttaaagaaaccttgagtatccaatgtccccggaagaggagctacagagcaatgtatcggtggctagttcttcacctactagcaattgcatctccaggaacactctaggaggacttaaagagcataactacttgggtctctctgattgttcttctgttggaagctctactctctctccccttgctgaagatgacaaagctactatcagcctcaaggctacggagctgacacttggtcttcctggatcacaatctcctgcgagagacacagagcttaaccttttgagcccagcaaagctagatgagaagccattctttcctttgcttccttctaaagatgagatatgctcctcctcgcaaaagaacaatgcatcgggaaacaaaagaggcttttctgacacaatggatcagtttgctgaagctaaaagttcagtgtatactgagaaaaactggatgttccctgaagcagcagccacccagtctgtaacaaagaaagatgtgccacaaaacatacccaaaggacagtctagcactacaaacaatagctctagtccacctgcagccaagtatgaatagaagataggagcattcgttcgattttgatatggattactttcaacagctagctaactggtgttttttcggattctggaattttcagggcacaaattgtcggttggcctccagtgagatcctacaggaagaacacattggccactacttgtaagaacagtgacgaagttgatgggaggccaggttctggggctctcttcgtgaaggtcagtatggatggtgctccttatctgaggaaagttgacctgaggagctacactaactacggggagctttcttcagccttggagaaaatgttcaccactttcactcttggtgagatgtttcagtgattgctagtgatgtgtttgaaaacctctttctatttaaggatcaatgaatgagtgcagtcaaagtagttaacctgcactgtttatttgatgtttaggtcaatgtggatctaatggagctgctgggaaggatatgcttagtgagaccaagctcaaggatcttttgaatggaaaagactatgtgctcacttatgaggataaggatggtgactggatgcttgttggagatgttccgtgggagtaagtttcctctcttatattcaaaacttgttagaagctttctctactctctgccagatatcttagaatcaaatctaacatgccatagaagattatatcatggtgattggtataagcgctcatgagtgatttctgatccgatgtatattacaggatgtttattgatgtctgcaagaagctgaagataatgaaagggtgtgatgctattgggttaggtaaagtctattcttctctctgctcctaagctacaacgtaaactactatctctactaaaaccgattacaagtagtgtgtatgatgagattagtggtttgttggtgtgagttacttgtagctgatttagaaatttcaattcatgtttgatcactcgtcttcttttgggagtaaatacaacaaattaacatgtaaataaaatcgaaattaaactgatttcaattcatgtttgatcactcgtcttctctgattcaaaatgtcttaatgattcaatgtggtgaactggtgatattgcagctgcagctccgagagcaatggagaaatcgaagatgagagcttaaaagatggaacatgacaaagctttctaactatacaaaatatgtgcgatcttttggtggtgtttttaaatttcaaaacatcaatatctttagtttctgaatttttaaaatgaagtaagtaagactacgaatgtaaggaaatgaagaagaattaaaaatgatctatttttgttgtttgtttgttgctttagtcagtaaactggtcgttgttttatgttttgtgtttgatttggatgtgtggttgacttctacctttgagatattatttgatgtaacgtttttgttattctcttctttgcttcttctcgagaagagaagatagacaatccggttttacgatttggctttctatcattgaacatggaggttcttcttctgcatttgcaaaacaatcttaaatattaatcagtacttaaatctttgaggtggattgttaaattctaacacatttgaatgcggaagtggtaaacctacgtttttctcaatgtctatgactctattctaaatggaatatcaagattaatcagaaagaaaaaaaaatctttttataactgtcataactaaactgtgctaccaaatcattgccaccaacggatctttaaaccaacttgaataattcacctgaagaaccaaaagctacaagacaaatcaaagataaataaaagtaatttcgccgggaaaaggttttgatatcattatttcactttttaaccttccatgaaactttgtttaccttagcaagcatgggctgcgtacaaactcatgataactatatagtacaatccccaaacgaagatatcataaatttcaacgaatcagttttagatttagtgaataactatagtttaatagtatcgaataatatcgtttgagagaaaaatagtcaaagatacatgaacataaattcccatatactaatttcccatttctcattcaaggaacgtttattatttttctgttcctgaaggtggaagcatagtgcgcctctttgggtttggcaatggtggtttgcttatttgttttatgaaaattatttttgtgatatcatttattgttcatttttaataattccgttagcgttgacaaaacaatatgattaaaccccacctaaaatgaaatgttatattcaactgtccaatttttcaaagaggcgttaattaatcaattccaaggcatatattcgatcaagataattaaagactcatatagtactctcatagtttaagagaacctacgggtcgaatttaaatcactcttgttactttaaaactttaatccaaataatgtagtatatatctgtgattcttgtagctagcttcacgtgaacttaatagtatacacataaacaacaatcattggtcgtgaatctcatttaattcgtttcgctttgatgcacttattcgaatgggacatactatatacatccatataagttgataaactatatagtaatattcaatgtttttaaaattaaatatatgaaatagacttagggaatgacatgtcgaatttgtctccaaaagatatgaattgaattatgcttctcagtaatggaacgtggcaatacctttatcactcatctatatatggttgttccccaaaattatttcttcatcaaacgagaaaaataagattgtaaatgtaaatgatttgatcatctcaatgttgcattcaagaatagtatctataatatttagttataagcattaggtattaggtcaattatattcaactgagtctacgaatcgaattgcatattgcgtaaaaattcaaataaaagaagctagataaatgaatatacgtacgattacgagaatgaatgtgtgtttcttcgatttggtagaccttcaacaaacccaccgaattgatggtatccatagatttcttatcagttatcagtcatgggagagatttacgatctcatatatatggacaaaatatatcgtatcagcattattattgatttattgtttagttaagttcttttttttttggtttttcctttttttctttgaaaggtttgattagcagttttgtccggacagaccaagtatatatatacaataattgtgattgtgttaggacattcaaaatcttccatacagttttcgaattaagttggtatacaagtttttcaaatgttaaatcaaatccaactaaactagatttgttaaggatacataggatcatctctctttaatatcataatattcctctatctcctttatggaacattctatatttgtacaaccctagtgtagcctcctctgtacttgtatatatacttgtgtaaagctattcgtataatataagtcattacattcttaacatggtatcaagagcctaataagaacattgttggttgtaaatgggtatttaaaaacaaatttctccctaatggttctcttggcaggtgcaaatcaaggtttgtggcaaaagggtataatcaacaacttggccgtgattatacagacactttcagtcctgtgatcaagtcgaccaccttacgtcttgttcttgatgttgcggtaacccgatcgtggccaatccgacaattagacgtcaacaacgcctttcttcaaggcaccttgaaagaagaagtttacatggagcaacctcctgggtttattgatcccgacaatccatcattcgtttgtcgactacgtaaagcgatttacgggttaaaacaggctccgcgtgcttggtatacggaattgaagacttatctcctcaccttgggatttcaaaactcgttggctgacacttctctgtttattctgcaacgtggcaaataatttgtctatctattggtgtatgtcgacgatatactaatcatgggtagtcacaaaggaagcattcaacaagttcttgatgcactcgcagctcgcttctccatcaaagaccctgaagatctcaactattttcttggtctagaagatcatcggacgtctaagggcttacatctttcgcagcgaaagtacattcttgatctacttcaacgctacaacatgattaacgccaaaccagtaggaacaccaatggcatcatctcctaaactcacactcatgtctggtataactctctccgaccctactgagtatagaaagcttgttggaagtttgcagtatcttgcattcacaagacttgatattgcatatgctgtaaaccgcctctctcagtttatgcacagaccaaccaatgatcattggcaagctgcaaaacgagttcttagatatttggctggaactacgactcacgacattttctttgctgctcaaaacgagctctcccttcatgccttttcagatgcagattgggccggagactcagaagattgcgtttcaacaaatgcttacatcgtttacctcgggaaaaatccaatctcatggactgccaagaaacaaaagagcgttgcaaggtcttcaacagaagctgaatatcgatcggtggcaaatactgcttgtgaaatccagtggatatgcagccttctcacggagcttgggatcacacttcccaaaccgcctgtggtctattgtgataatgtgggtgctactttcctttgcgcaaacccggttttccattccaggatgaagcacatagccatagactatcactttattcgtggacaagttcagcaaggcattcttcgtgtggctcacgtcaacactagagaccaactcgctgatgcattaacaaaaccgcttcctcgaaatcacttcacggaacttcgagacaagattggagtgtgcatagcccctccatcttgagggggcgtgttaaggatacataggatcatctctctttaatatcataatattcctctgtctcctttatggaacattctatatttgtacaaccctagtgtaacctcctctgtacttgtatatatacttgtgtaaagctattcgtataatataagtcattacattcttaacaagattaactaactaatattttcattttttggttgataatcaatgattccatggcatgcacgcacgaagtcatgtgttgtctctacaatggcagccacttaaaaaacctaccaaaccatttacaaatgcttaactacaattttgtttagcagcccccttatcatatatgtacccacccatttattgtttcattcattcatgtggctcttcagcataactgcaagatactagaggccacaaattgcagtaatttgtattttggagttaatacctttgatttaggacactaattatctcgagcacttgatcagccaatctaaaaggttgtcaaatcaaaataatagaagtgtcgaaatcaaaatcagaccaaaaccatcaatttttttgcaatagcaagaagaattcaaaatttgctggacctggaccagtctaatctttatgtcatatcattagctcttgtcgtcaccatatattataaatcattttgttggtaaataaatgaaaaaaaaaaacttttcgacctttctccatcaaagaccttttacaaaattccaaacccaaaactttaggttaaattcctcgctccagccagtatgtaattacgtaagcaactatcaattaaatatacaactcaattcacaatcatgaagataactcgaatacaacgtgttttagtatcatttatatttcgtaaggaaaataagcttaccgtttattgctcagactgtaacgtcacgtgcccacatgtttgaccttacactccatcacaatctgcatttcgaagaatccgataagattggaaatgatttatataatcgaaccacattgtggaacattcaagaggaatccacattagacaatctaataaactgtttaatattttgaaaagaaagattttacatgcaaatggaaaacaaagatctccgcgtctcaagttatttgaaatctcattttgcatatggtcggttattaccgttgacttttaactttatcgtccatcccaatgaaacaacacttgaaatatgtaaaaaaaatagcaaaattgacccaaaaaaaagaaggacttaacggatcagtgattattttcttcgaggcaaaacaattacatgcaaatggaaacaaaagccaattcacacgcataaaagtcacaatttttaccttataatattcctacaacttaaaataacataaaaaaaaatgtctttatcgaaacatcactaaagaaaaagaaatctctctatagtctttatcttagtatttaatttctccatcttccttatgatccattatgcccaaagtccttcttcttcttctctataattacttccacaaatagaagaagaagaagaagaagaataatatagaaaaaaagagagcttctcttcttatttctttctcacaggaaatggtgtttggttggagaaaagcgttttgcacttccgtttcaagtaatcaagataaacctcaacaacattcatcattacacactactgatcctccaattcccacaccaagattccgatcaaagtttggttttttatccaacccttcaactcctcgtctccgatcacgcggcggaagcggcactggatgccgctcctcagcttccacatcagtcactatcccatctcttccaactagtcccaaactccattgcaggactacgagcaatgctactccaaggactagtaacagctcaagtcccaagtttttctctaacccttcttctcctaaatcatcatcttcttcttcctctcaaggcggcggcggcgtctctctcctccgtgccacgcttcttctcaacaaggtagttacttttgattcaatcaagttcttaatttgaaagacataatctaaagctccgttttgtgtgtgtgtggatgcagagtaatagtagtagatgtgcgatttgtttgcagagagtgaattcaaatcaaagcaactcgacggcggcaattttcacggcggagtgttcacattcgtttcacctttcttgcgtcaatggattagaagacaagcgttgtccgttttgctctgccgcatggaatcacgcgccaaagtcgaattatccggctgttaataataacttcggatccgacccgattagacgacccgagatccgagagatcaaaacggggaagtcactgagagtgtacaacgacgatgagccgttagcttattcgccggtttctcttgctcagatcaacactatacatgaatcagacgaaaacgacgacgttgaagatgacgatgacttccccggattcttccgagattcttcgattacgtctgatatggttccttcaatctcaggaaatctggaggttaagttgctgccggaatctgccgttgtggaaaccgggaaaaagaaggagacacacgtcgtcatcatgaaactaaaagcgtctccgtcgccgtcgtccatcaccgatgcgattaaggcgcgaagaccatcgatagatctggtaacggttctcgatttaagcaacggcggtgctaatttgcaaacggttaaacacgcgatgagatcggtgatctctcttctccgagaaatggatcgtttatcgatcgtcgttttctcgacggggtcaaaacggttaatgccgttacgacgaatgacggcgaaaggaagacgatcggcgcggcgaatggtcgacgcactcggcggaatggaaaccaccggcggagttggaatgagcgttaacgacgcgttgaagaaagcggttaaagtcgttgaagatcggcgggagaagaatccgtcaacgagcatctttgttttatcggacggtcaagatcaaccggaggcagttttgaaagctaaactaaacgcaacgcgcattccgttcgtcgtgtctaccacgcgtttctctcgtccggagatcccggttcattccgtttacattgcttctcctggagcgttgcttcacgcgccgctacgagacgcgttcaccgaaagaatcgcttcgttgctcaacgtgactctccataacgtgaagctaaatctcagtttggtcaacggatctcatttgactgagatttcatcggtttactctttaaccggtcgactcgagaatttcggatccggttctgtcatccaagtcggagatttgtttgcggaggaggagagagagtttctcgttgagctcaaagtgccgacttcgtcgagtggttcccaccaagtaatgtccgtacagtcgtcgatcgttgaccaaatgacacatcagccaatgacatgtcctaaagaaaaacgatttttgatcccacggccacaatccgtcagatatgtatcttcaagcatcgaacggctgagaaatttacactccatgtgccgcgctgtagcggattcacgccggcttatcgagcgtgaggatttatccggagcgtatcaggttctaacgacggctcggtccaatgcgtctcattcggatgatagtttaaggagtttggaggttgagctaaatgaacttagccggattaaaccgagaaatagtatattaaaccgaactgaagataaaccggagcagcttacccctacttcggcttggagagccgccgagaaattagctaaagtggctattatgaggaagcatttaaatcgagtcagcgatatgcacggcttggaaaacgccagattttaattttaatttccctttttttcgaaaattcgatttcaatgatttttgaatatataatggtacataatttatataaggaggataagcaataatttagtaaggtataaataatagaagtatgattattcagaaaaagacccacataggtgcatgatagcgacaagcagtagccgacgggtgtggccttttgtattgcagagagattgagaccctacattagaaggaattaattggtcttttagcatttttatcttcttcttcctttttgtaatcttcaaaaactccaaattaatgactgaatagttaaaaaaagttgtagatcaaataaatgaagtctgctttttttgtgtactatatagaattaaaagttgaggtatagtggattagagagtgtgcttgtaatgctggacttcaaaatcaaaagttaagtttatattatcatatgccgtttaacttaagaggatctataatatattatatctttccaaatgaatgatcatgattagtcatgtgatcatcattatagcctattttgttatagaaggcaccgggtttgaatgatttgaatagtgcgtggggattgtctttgttggttgttggtgaatggtttggtgggtgcaccgtggtagaaaccaggtcatgcgccgttgcaaagctttcttctcgcttaaattcattcattttatatcattaagacatttactaattatatgtagctagcgccaagttgcaatttgttttgaatgcaatgattttgtatacttttaaaatggatgaaatgattaactattgtcaaaggtccacttctcgatgtgattcactaaaatgatcagtggcagaagaatctcgaactatatatatggtcaaatcataactaaaaaaactaagctattattttttcacaaaaaaaaaaactaagctatcattcatcacgcagttacatattgcatatggacaatgttaatgtcaactaatgaaagggaaagaatctcgaactatatatggtcaaacggtttgacgcaccatacttaaaaaaatactaatcaaggtgcattacattcattgatgttacaattacttgtactaatgaactctgtgaaaatcagaataacccggtataacacactatttggagttataatggctgatccaacttttgggagattttgtcacagttgggctacagtttgtgcaatcggcaactgtaaagcccattgagaattccaaaaataatgtaaaccaattaataaagcatttacctttggcgcctgggacgaaaataagataccgaaaacaacctttactctacaaacataggtccatgtaaaataggcttaggcccaaataatgtaactctaaaacaaatctatgaatctattaatcaccaaagttatcttttacataatgtaatgggttatttaaggagagatttaataatttcgaaaatgtttggtcaactccgaaaaggtgaacgtgttaattaaaaagtcctggtactgcggcagagagagagattagcccatatgacgtggttgtgatgtgtccgaaagctgtcaacattgaaaatcaacggtccagatcagtatactgacacttggctttgtaaatttgttaattttcttctctggtcaaaagtgaaagtgttaattataattaaattttatctagttttcaagtaaccatccatttagtacagccaagattggattatctttaagtttttaagttattctaacagtctttattgatgactttgtatttgcaagagttgcaaccaccaatatcttctattacatatttacatcaaattcagagtatatgtcatccatacaaaataatacattatcgtaataaccacacaaactccgttaatccatttgttttcattggcggtggactattttaaagaagaaaaatatatttatttttttgtcagaaagtaaaatattataatggtgttgaaactgttaacaccattataatatatatataaaatctaagtcaaactactgtggggaaatttgattaggaaaacaaaaaacgtgctttaaaaactatgtttgtacgctgtacggataagatatttggaaacgacacactatatttataatccaaacatattttaaaagaattaccggactgtattagttgaaatgttattggaactgtttcttaattacatatattaaaagtattaccggactgtataatctgtattatttgaaatgttattggaattgtttcttaattacaaacgtgaagacatgaatacgacgacaagtattatacaaagttatccacacccatgtgcacgtaaagtatgcttaataagatttccaaatctatctataatcaacgtaatgtctagtcacctaattatcacaatagtggacaaatagttgcattatctacaaaatcaagattatactctctatatgagtataacgtgagtgtcatcatttaattatagaaaaaacacgattatgcaggctaattaaaacgcgttaattactgagtcaatgaacctataaaaccggcttatgctacccctcccaatctcatcacaaccattagtctctctttcagacaattttggttctttttcttttgtatttatacattcttaatcttctacaaaacaaaagaagaaagacacatttcggtactaacattgttcttcatacctctctttaaattcatatacgtgtatatactttgtttatacgtgtgtttgtgttaattgtgttgtttaatcttaatcccaagttagtagaaatggcgggaaacggaaacgaaagtaccggtggagacttcagtttctcggctgcggcggcccgtgatgcgcttccgaggatcacgactgagaagggcggcaaatctccagggccggcagacgtctgccaggatgacatcgcaccgcgggtcaactttcagaccatcgacgagcttcacagtctccagaagaaacgatctgcccctaccactcctcttagagatggcagcgccagcggagtcagcggaactagtggtccgactactcctgtctccagcgagaccatgcttcaatccgtcaggtatatttacatttgaatatagctcaacttccaaaaaacacaatttattttcaataattaatggggaatgtaaaaagttattaggccaatctatgtttactaattttacaaatcacaaaattataaggaatcgtgatttaagcaaaaaaagatctttgatttgaagattaaacatgtgaaatagcgtaatgatatatatagtggtttctcataatcgtatgattgaattttgtttagttttgcatgcaatcataaaaaataaaataaaaaaatgaattttgagaaaacaatgatacgaatgcataatttggtgaaatattggacagtgcatcgttggcttcgttgacgagagagacaggaccgaagttaataagaggagatccgacttcggcagctaaagtagcacacgtgccagtgactcctacgtcacttccggctgctgacgtcagcgacagtggcttgaagttcactcacatccttcacaacctctctcccgccggtaatacatccctaaaacgccaccgttttaactaagagccctatttttaatgttgtttcatgttttgtatcaccttccgaatttttatgattgcagagttgtacgagcaagcgataaagtttgagaagggatcgtttgtgacatcgaccggtgcgttggctacattgtctggagccaaaaccggtcggtctcctaaagacaagcgtgtggttaaggatgataccactgaggccgaactctggtggggaaagtgagtcacttcctatctacatgcatttcacttcacatatatattgaagatcaccaaattatatatgacaacacatgcatcaaaatttagtatttgtttttctagttttgacattaaaaaataataatttcgttttggttacagaggatcaccaaacattgaaatggatgaaaaaacttttttggtgaaccgagagagagctgttgattacttaaactccttggacaaggtaacttgacatagactactatattcaaaatgagattgtaattaaatttcatagactatatattaaagactttgtatgattttattgttaggtgtttgtgaatgatcaatacctaaactgggatccagagaacaaaatcaaagtgagaattgtttcagcaagagcttaccattcactattcatgcacaacatgtgtatccgtccaacacctgaggagttagagaatttcgggacacccgatttcacgatttacaacgcggggaaattcccgtgtaaccgtttcactcattacatgacatcttcgacgagtgtggacataaacctaggaagaagagagatggtgattctaggtacccaatatgctggagaaatgaagaaaggactctttggtgtgatgcattatttgatgcctaagagaaagattttgtctcttcactctggttgtaacatgggcaaagatggagatgttgctctctttttcggactctctggtaccggaaagactacgttgtcgactgaccataaccggtatttgatcggagatgatgaacattgttggagtgaggctggagtttcgaatatcgaaggtggttgttacgcgaaatgcattgatttggctagggacaaagagcctgatatctggaacgctatcaagtttggaaccggtacttaaaaacaaaactcactttacaaatgttagattgtacgtttccataacattttcactttttttgttttggttttggggacagttttggagaatgttgtgtttgatgagcatacacgagaagtggattacactgacaaatcagtgacggagaacacacgtgcggcttatccgatagagtacattccaaactcgaagataccgtgcgttggaccacacccgaagaacgtgatcctattggcttgtgacgccttcggtgtgttgccgccaatcagcaagctcaatcttgctcagactatgtaccatttcatcagtggctacactgctctcgtaagtgccggtttggtttggttcggttcggttctcttttaattaatcgattcgtaatgaataatgtgattttgtaggttgcaggaacagaggaaggagttaaggaacctcgagcgacattctcagcttgttttggtgctgctttcattatgctacacccaaccaagtacgctgctatgttggctgagaaaatgcaggctcaaggagccaccggttggcttgttaacaccggttggtccggtggaaggttaaccatccatctctacttcaattataagtaactagctaaacaaacaagaagagtattaaaattggtgataaaatatgcagctacggaactggaagccgaatcaagttggcgtatacacgaaagataatcgatgctatacattcgggtagtctactgaatgcaagttaccgtaaaacagatatttttggtttggagattccaaatgaagtagaaggagttccttctgagatactggaacctattaatgcagtaagtcagatagacagcagaaaacatatatactttttattaatgaaattaactcctttatttgacatctttggttatgtgtgtcttgtgcagtggcctgataaaatggcttatgaggacacattgttgaaattggctggtttgtttaaaagcaattttgagacattcacaagtcataagattggtgatgatggaaaattgactgaagagattcttgcagctggtcctaacttctaaagtgattgaagatgatgatgaaaaacaaacctttttactaaccaaaataagactactattttttttcacttcccaattttttcccattttttgttaatgacttcagtaagaacggcaattttaaataaaacgaaaaaaacaccaatttgttttggtgtcactttgatttatctgtcatattatttccaattgaaatgagaacaattcttttattttctttcttccatgaatgttcaagtatggagatatttgaacatgttattagctattaacaaaaacagagagtgaacataagtaataaaaaaatccatgaaattaagaaacaattgtaatggttgaatcttttagggaagctcgagaagaaaaattccctctctaaaacatattattccaaaaaattaggtttatgtacacaaaagaaacagagaaatagtatctataaggaaaagaaaatgaatcaaatgaattgttgttcaattaaacaatggagtaggactaaggaattatttggtcgtgtagaagaagaaaaatgataaaaatgtcttcaaaaattaggcgagagtagagttctctgttttgctttccaatttatcttcttcgacctcatcgtcttcacttacttcattagacctatccacactattcataaatatccctacacacaaacaattaaacaaacaaatttactaagctataccaaaagattatgagatgagtgaaaaaaaataaaaacaatttgagtccttaccaattccccatataatagctgcgaggaagaggattgaagtaatgataagtgttgattttctccaattttttaaatgatcctgcaaaacaattgagagggttaataaatctaatcctaaaaagtaaaactaatttgtttcaagtcattaatgatgaatgcaaacctgcattttcccataaagtggagaagaaggaacatcgcctaagatatggatcaaaacagttgaagaagccattgacaatggtctcaagtttggtctcacgcaatggagacacacaaagttaaccggagcctgcacaagaaagcaaaatgacattcggatcaaacaagtcgaaaaaaaagaaacagagattagctttttggcaaaatacttgagatttgattatgttacctgtggtgcaaagattagaatttctcccactgcgaataaagcgatgaaggcatacatattcttcatcaagaaagcagtgaaacaaaacgctgcgccgagtaaagttgatgcagctagtaactgtacaagatcaattaagaggtaatcagaaaaaacggagcactcatagtaactaagaggtgtttagtgagttctttattaccttgaaggtgtttgaaagagtagcgtttatgcgatcaagcacatagcttccacctaatgttccaattattccgcatatgattgtaagtcctccaaaaatcatgtccgcgtttttcattttgtagataccaaaaccggcttttggtccccaatatgagtaagctccaatcacaaagttgtaggtgatgtaaccaagaacatttacaataaatactttctcgctgaaaagagcctttaagtcttttccaaataggacaaccaggttcttggatctgccccaaaaagaagtatattagtatatatagttgtcttttacatagacagtaacaaagaagagaggatagcgaaactcacttgggggttttggttttaatttgtgaagcttctgcatctgtaggagcaaccgtttcaatagatgtagagggtttcttagaatccttatcagcaaaacctatacgcaaagaagagggacattttagtcaaaaattggcaaaacatccagaagggattatgcaatgttgattaaaaagtatctagtatcaccttttagctgctgcggtggtttgatacagaaggacaaaatgacgaagacagccattgcgattgcctctatgtaaaacgcccaacgccatcctaaatggtttccaatctgaacaggtaaagcaaatagattataaaaacattttcctcagaagcaaaaaacttgcacccatagaaagagttaagcaaacttacgtatccaccaaacacatagcctagagcaactcctgctggtatacacatgtagaacagtccaagccagaaatttttctggaaagaaagacaaaaaaaacaatcagaagtaagtaaactagcaaaaaattaagactaataacaacagaattgaaaactaacccttgcaacaggagcactatcatcgatataaggtgctgcaagactaataaaggaagcctcaccaaccccaacaaacctataggcaaagttacaaaagaaaagattgttagttaatatacagaaaccagagtgaaaaaggcgaaaacatggaattttaaataaagcactcacattctgaaaacagcaatcatccagaagttgtaggaaaacccgcaaccgataacagcaatagtccaaacagttaatccaacaccgattagtttaaaagggttgaatctgcaagaaagtatagaaagacagagataatcaaaacattgattcttaagtacacaccaaaaaacaagaacacaaatatatgaaactgttgataaaaattaaacctttttgacaatccagcgaatattggagaagccacaagaagtccaaccataaacgcagatgacaaaagaccatcttcaaagttagttaagttaaactctcccctgtatcaacagacacacacaaagtctaagtctttctcataaaactataaacataattattctcaaaatcaaaattcagaacaaaaaaacttactgaattccagttcctgcagagcaaacccctttggcatcacatacttttgagcttccattaacaccattactcgcgatcactcctcgatcaacgtaatttatcaagttaatgatacacaagattgtcacgaatctacaacataaaaagccctcaagagttagaatcgcttagtcaaaaaaaaaacacaaagctaggcaaatcacttatctaaacatgacacaaccctaaaacacgaaatctttgccttactttttggaaatctaaattcacccaattcatagattttgttttgtcatacaatcacgcttaaatcgttttcacaaaccagagagagagagaaagagatcacaatcgtcatcaacttccaaaacccaccaaagaaataaacaaaagttccgatttttttaccttcccggagtcaaaaatcgttttttagtcgccggcggagcttcttctttagccggagaatctctctggccaactctcgtcattatctctgtctttcgctgtcagattcaataacactctgtctttctttagtaaaaaggaacaaaattttgataaatacagagagagaccttctctgaatccgattcctgttttgatttgggtatatcttttacttctgacgaactgttatttcaatactctgatttatccgaattttaattctattttatcactttaataacaaaaatcaaaacaatatcttcttgttaacaaaaaataaggtgtacaataattttcctttgaccaaaaacaaaaaaaaaagtgtaatttccttttttcttaacaacataaaatctatttttaattaattcaggaatccaaatttgttagttggaaaaacatttaagtagatacaactattctcactaaacacaaggacacaatttttttttttaatgtgaaaatatgataaataatcattcatcttgttcatcattgtgtattttcataggttcttaatggaagtatatgcagagacgtgaaggtcacaacacaagtctttctccattgagttgtccattccaaagggagcaaaaaacaacttgtccctagatttcaagaaaggagatttcaattattatgcagtgattgatggtattgagataacttgaagtgtcagtaacttacttgtggatagctaaagttggttcgagaccagggattgagctatgtgaggatgacattattacaactttgttggagtagacaacaccgccctaagtaaagaaatgtgagaacaagaatatgtaacttggagataattcttgtgtgttattgtcttccacttaccttcaaaatattaacaaaatgtggatttgtgttatcttgtaagcgatcaagacggtgaagttcagctggatcgagcccacatagctccaatttttcaggaggtacaagaccctaaaaagcacaagcacaagaagttctttgtcaattttgccaatgtagactgtagagtgtataaagtagtataaagggaaaaagcaaagtggcatgccttgtcaaagtcttggcatgtcaagagtattctagtaccttcaagtccctacaaagtttgcaaagagatggcaataagaaaactatgaggtgaacaaacgctgaaagtttgaagaggtgttttacctgattaacaaaaacatcccaaaacaacggtccaactattgcagtttgccagttgtgaatgtgtaaaacatcaggctgctttccagattttgcaatgtaatccaatgaagcacgagagaagtatgcaaatctgattttgttctcagataacacatataaaccaaaccagtctgaaaacaaatgtagattcaagctcaactatatcaaattgaagtactgacctatcaaaatcgtcctgatacccgtatactttatcacggctaaacattgacgagtaatacactggttgaataagtgtcactcctattccagagacaactctgcataaacaaggttctctttgccttaaatttaggaagaaatggaatgttttgacaatattttaccaattcttcttttacaaacactgaaaaatatcaacattataagaagaataacttgcaacagctcactcacccgttccatattcggtttgcatgcagctggccatcaaaataagaatatgcatcggcttcgatttcacgaagcccttcaatttcgtccaaatcaagtgtagaatatctgttaatgaatatagttaataagactctacttcacagttgatattataaagtatatttttctgaaggatttgactcatactttggcaatataacttcaaccatgtaaccctcttcttggagtgcacaagacaatcctgttatatatgaggccaaaggtccaacagaaactaatggagccatttcggtgcaaatatgaatcacatggagaccattcctggaatcaattgacaaatacaagtcaaaacataaattaaaaaaatgtgaaataagcttgaagataaagtccactagaattttcaccttttgcctttatttgtgaaccgtctaagttctgctagaatttcggcatctccttgttgcaggacatcaagaggaaatacagagatgttcgcttcatgctctttaaccagctttctcatggatgaagcttcttcaatgttaactagtccattgataaccatagaatcaatacggagaagcaactcccagaatagagacgacttatctgcttataacatggtacaagataagcttcagggttcaaaagactagtatcacatcgctcacttgaatacaaatcatcaaaaactatagagactattcaaaaaaatgagacctttcttgattacaatctgactttctgcctccaattggtttatcctctctaacaattcctctttatctttctttagctgttctaactcgtcaactgcagctaggcgttgtttgtttaagatcattatatctaatcacacaacaaagacgacacaatccaatcgggtgagttaactttcagaatatgaaaccgaaacaaatagcaaccaattttgtttttacttttttgagcttctctaaagaggttccatatgtccttatgttttgcttcttttgtaatagaagattgtccaagacttttctgtgaactaaactagttacattctgctagaaaatcagagaagatagcaaacttcaaaccaaagaagagtaacctgagaattgtcaaactcttcatgcccttctgatctggaatcgaaaagaatccagtttaattacagagaagcaaaatcaattcttgcaacacaaaatattcttctacacaaaccagaaagattgagaaaggttcactctagataagcaatgatttcatgaaattaactaaattctgtaaaatgctacactaatattactatcaacctgaagaattcggatcgaacagagcagaaagagaaatctcacgaaggagacgaaactcaaaacctcaaacaatgaagcgcgtgagactttcgatgcctagggttcactatatggactttagaggatgacccacgaagcgacagattccatatcgtcggaagattcgccgttgcttgcatcgtttggaaaagtttcaatcttcgccggcaaaatttaccgggaacgacaaaatagaaaacagccggtaataataaatggagcttaaataaatagaaaacacgaaaacgccccatcattattagaatctttaacattaaacctagatactatctttactctaaaattgcaccctataaaaggacaaatataagccacacagaaactatatggaaattcggtatttaccactacaatatttttaaaaatataccccaatattattgttactctcaaaactcaccttacaatgttttttttttttggtcgagagagggaagaccccataatttattaaataaaagtaacccaaaaatacataaaaaaaacatagtaagttaattttcttaagtgtttaaagacctcatactatgaaccgaatattatgttcaactagtttacatatatttaaattttaatatttttgttttaaaatattatatatttaaaaatataaaattttacttaaaaaatcaaaaaccttaaaatagtggtataaaatataaattttaaaatatgtttaaataaaattataagtgtttaaaatttatatgtgtaaaacatgttgaacctagaacaccttttaatcaccttttactatgaacctagaacacaatgtgtattaaaaatatacaaatttttaaaaaacaaatcaataaaaatataagtgttacaatatttatttatgtgtaaaacatgttgaacctaaaacacctcttaaggacctcatactatcgacgggatgttatgtccaattagtttacacatacagtatttaaattttaatacttaaaaacataaatataatatatatttaaaatattactttaaaaatcaaaaaccttaaaatagtggtattaaaaaaaatatatatatttttaaataaaatcataagtgttaaaatttatatatgtataaaatttattgaacctagaacacctcttaagtacctcttactatggacaagatgttatgtccaactagtttacacatatttaaattttaacatttaaaagcaaaaatattatatatttaaaaataaaaaatatttttatctaaaatattagttaaaaaatcgaaaaccttaaaatagtagtaatttaatttttaaataaaaacataagtgttaaaaatttatatgtgtaaaacatattgaacctagaacacctctaaaagacctcatactatggacgggatgttgtgtccaattagtttacacatatttaaaatttaacacttaaaaacaaaaatattatgtatattttaaaaaataaaacattttatctaaaatattacttaaaaatcaaaacaaaaattaaatagtgcataaaatacaaatttaaaaacaattttaaataaaaagaataagtgttaaaaatttatatgtgcaaaacatattaaacctaaaacacctcttaaagacctcatattatggacgggataatgtatctaatagtttacacatatttaaaatttaacactaaaaaatctattaaaaacaaaaattaaaacaatttatttaaaaaaatatttgtgaaaaccttgtgattagttttaaatcagaaaaatcagaacggaaaaacataaaatcttttttttctttttaaaatcaaaatcataatctttattaaaaaagaaaaagggtagtaaagtaatatacctaaaagtcgtgatatactcaggcggcgactcgtgcttgttctgaaacttgaaaccacaaacgagagcgtcttcgtgttttctttcgccatcctcttagttcctcgttgtctccggtgaaagcatctcggtggctagatcattatccggtgaactgaaatctattttgttttggacggtagacgacggccgtggattgaaggagattatcattcaatctatgaaacgatgatatgctttaatttcggctccgatcagtctgaaatcttacggatgttgcatcggcttttgcttggatcatcgtcgtcggcttctacttggatcatcatcatcgatcggaatccacagagtttatgtataaagagagagttttgatttgtctctgaaggaagaagatgagaaagaaagaaatagagagagttttgatttgtctctcaaggaagaattagaagaagcgttgttgagactgcgtgagagcgtctctcatctatttatttataaggggagcaaagaggttcaaaagaaacaaggaaattgctaatcacaattaacaacggtcacaatcacataatatttgacaagataaacttaacggtcacataatatttgacaagaaacacttaacggtcacataaagatttccttttttccttggatggcttttcatgagtttgtttcctttgtttgttagttgttactgtgagagaatctgatgagtttaattaaagtgaagaattcactcattgcatgatccgatcctcaaaagtatgtatactaaccacaacaatcatgattgtccatcaaatttgtctttttttaatgttcttttgtcaagcggcccacaaacccaccagcttgccccaataagcatcatcacagggcgggcttgaactctacatatgtccataaaatatcgggcttgcgggttggcccgcgaaacaaatagaatttgatggaaccttctgcttcgtctagaggatctcaaactactacagtactctaattttcaactaaacctaaaactcttcagacttcagaggatttcataccaaaatttcgattctaagttaaattgttaccatcctgttcatacattcatcaatttttcaatgtggtatcatccttttctttctagtgtaaatctgttttgattgattctagctttcattagttgtctattggatgtagaaggtgcgatactgttgtaaaagagacacaaactcaatctgacaccattaggtataagtaaatcctgcaaatggaaagtgacttacgagtggtaataaatataatgttcagaacatgtttcctctctaattctctctgttttcccaatatttaaaatacagtttcgcaagtattgaaagtgttttaaaaagtgatcatacatagtaagagtaactcgtagagagagataagttatgggaactgactgtatcaaattagttggaccatgttttatgtccgtgatggtcggactcagaaacagagtggtgatgtgaagatgacatgtttatggtcccattttcacttttattgggtcgtgtttcacctttcaaatgaaccactagaaaattgaagcaacttttttttttcaaaccaaaggaaaaaagatgactttgttaagacctttgtcttggttttttttgcttcatcaagcgtcgctttcgcaacatgttctctctattattacatgatttcaaaacaagcaaaacatatcactgcctaattcttaactttgtgcttcagtctttccataaataatagttaactttcaaattcctaaatgtactaaaatcaactatggttgttgagctttattattcttccgtttaatcttggttcgaaagaaaaaagatatggtataatcattccattcatatacgtattactaatcatagttatctttttggtgagtaaagagatttgaatcaagattgtgtgttggtaataagaatccttatagagatgtgcatttaaggagacagaaaggaacacagcacgagacgatgcggttagagaataaacaaaacaaaaagaaacttggtaatggatacaacgtgattccatcgttaaacaactttgcttttggctttggattcttctctattttaactcttaacccaatgttatctcattatccttcatctcaatctatttttctatttacttaaatttgagttttcaagacactttttaaaaaaatgaaaaagggttagaaatagagaagagagtaagaaagaagtgtaaaatcaaataaacgaatctcattaagcacctacttcccacatctttcttaaagtttcttacataaagctcccttcacacgtgcttaccaaatcagattgtcaataattcttgctcaataatttttcgaaatttatttgaatttatctaataaaaatacattgtttgagtatgatattttgcttaagaaggttgattattctccctatcaaagtctaaaaagaagattacaaaacaattgtatggttaaattcatataaatttgtgactagtattttaatatttacatatatacaaatacttatagatgaaacgagaatgcagaaatgattatagatagatcagtgacagtgaactgtagcaaccggcaaagaaacctcgttagctggacacacgattacgatcatgcccccagtctcctctgtccagacggctgcattaataacaacgagctagagggtgttttcgtcttttcgatacttatcccaaaaccgacaatctctggtttggactcgaaggctgatttggtcaattcatagcaaccgaacgagcagtccattcaagtccaaagagctccttagtggtaaaagatgtaattacgtagatgttccatggtcaagaatgtattcagtcaaaataaatatttgaccaaaactttcggttaatttcctaccaccagcaaaattataactttttctaataattatcaatcattttcaatctcttttaattttctttttcacttttttttattaattaaagtcaattcacactatacaaaaagaaggaagtctaaatatttttttactttcatgttgcttttctaacttttatattttgctcttctcaacagattttgctggtttttgtattagaaatattattatgtttccagaaatgaattttttatatgtcgtctggattcgtatatatatattggaaagtgaaattaattcatttgatttttttctttgatatatcgaccaaatcaaataaatacgaccccattgtggcattgttaatgcaaaaaggcacaagtacaaaaaaaacataataattcactattttatttacagacacatgggcccaattcatacggcccaattaccataaacctctcttttaaagagtgggttccacagtggtaaactttttgactatccattggaatgattgcatctggaccgttcatctacattaattattgggttttttcgctttaaagcatcaattaacttattacgtataggattagattaccaataacgatctttttagcttttgtcgttttccgataaaaccatacgattaagaatatgacctcttgtatcttttgagggattttagttaatctttctacatttattttgttggatgctcatacaattatcctgtgtctctcaaaataaaacaaaaattactctatttattagtacattacacatgattatttagaaaatgtatattgtggtcatatgaaatgagaaattaaaggaaatttgtcaatacttgagaacatcaccattcaaatgtttcaagaacaacatgactccaaaacaaaataaatgaacctttccctaataatagtatattctccatcgtacaaagttctaaataatacaatattcatttcgtcaaagcatatgatgtgttggaatcagaattatctgcaaatgtttgaatttcaaatgttagtatcaggctatttttactgttttatcaaatatcgtttcttctgcaatctatcacttgattgttttatcaaatcagcactagtattattgattttgtaatttgtgtttgtctacctccaattactttttagtgttatgattagtaatgtaataaaatcacaaatctgacgtggcacctatatacaattccaaaaacaagtggaacgaatataaaacaaattcacaccttcctcatcttcttcttcgtcttcacttaccttctctctacactcacaccatctcacaaccctaatctctcccacacaagagagatagagagaaacaatgaaactttttcttctccttctttttcttctccacatttctcataccttcaccgcaagccgaccaatctccgagttccgtgctctcctctcactcaaaacctctctcaccggcgccggagatgacaaaaactcgcctctctcttcctggaaagtctcaacaagcttctgtacatggattggtgtcacgtgcgatgtatctcgccgtcacgtgacttctcttgatctctccggtctcaacctctccggtactctttccccagatgtttctcatttacgtcttcttcagaatctatcactcgctgaaaatctaatctccggtccgattccgccggaaatctcgagcctttccggtcttcgtcacttaaatctctcgaacaatgtcttcaacggttcgtttcccgatgagatttcttctggattggtgaatctccgagttcttgatgtctacaacaacaatctaaccggagatttaccggtttccgtcaccaatctgactcagctccggcaccttcacctcggtggtaactacttcgctggaaagatcccgccttcgtacggaagctggccagttattgagtatctagcggtttccggcaacgagcttgtcgggaaaatccctccagagatcggaaacctaacgactctccgggagctttacatcggctactacaacgctttcgaagacggtcttcctccagagatcggaaatctatcggagctagtcagattcgacggagctaattgcggattaaccggtgagattccgccggagattgggaagcttcagaaactcgatacgcttttcttgcaagtgaatgtcttctccggtccattaacttgggagctaggaacgctatcgagtttaaaatcaatggatttgtctaacaacatgttcaccggagagattccagcgagtttcgcagagttgaagaatctcacgcttttgaatctcttccgtaacaaacttcacggcgagataccggagttcatcggagatttgccggagcttgaagtgttacagctttgggagaacaatttcaccggaagcatcccgcagaaattaggagaaaacggtaaactaaatctcgtcgatctctcttccaataagctgaccggaactttaccgccgaacatgtgctccggtaacaagttagaaactttaatcactcttggaaactttctctttggttcaatccctgattctcttggtaaatgtgagtctttgacccggatccgaatgggtgagaatttcctgaacgggtcaatcccaaaaggactattcggattacccaaattaactcaagtggagctccaagataattatctctccggagagttaccagtcgccggaggtgtctctgttaatcttggtcagatcagtttatcaaacaaccagctctcaggtccattacctccggcgatcgggaacttcaccggcgttcagaaacttcttcttgatggaaacaagttccaaggtcctattccttcagaggtagggaagcttcagcagctctcgaagattgatttcagccacaacttgttctccggtcgaatcgcgccggagattagtcgttgcaagctcttaacgtttgttgatctgagcagaaacgagctctccggtgaaatcccaaatgagatcactgctatgaagatattgaattacttgaacctgtcgagaaaccatctggttggatcaatccctggttcaatctcgtcaatgcagagcttaacatctcttgatttctcttacaacaacctctccggtttagttccgggaacaggacaattcagttacttcaactacacatcgttcttgggtaatcctgatctctgtggtccttatcttggtccttgtaaagacggtgttgctaaaggaggtcaccagagtcatagtaaaggacctttatcagcttctatgaagttattgcttgttcttggactacttgtttgttcgattgcgttcgcggtagtagccataatcaaagctagatcattgaaaaaggcgagtgagtcacgggcttggaggttaacagctttccagagactagacttcacgtgtgacgatgtcttggattctctcaaagaagacaacattataggcaaaggaggagctggtattgtctataaaggcgtaatgcctaatggtgatctagtcgcggttaaaagactcgctgcaatgtctcgtggatcttcccatgatcacggcttcaacgcagagattcaaaccttaggaaggataagacacagacacatagtgaggcttctcggattttgctcaaaccacgagacgaatctacttgtctatgagtacatgcctaatggtagtctcggtgaggtgcttcacggtaagaaaggaggacacttgcattgggacacacgttacaagattgctcttgaagctgctaaaggactctgttaccttcatcacgattgttctccattgatcgttcacagagatgtcaaatcaaacaacatcctccttgattcaaactttgaagctcatgttgctgactttggtctcgctaaattccttcaagattccggtacttctgaatgtatgtctgcaatcgctggctcttacggctacatagctccaggtactaaaatcttcaaaaaaagtttctaactttacaatctcttgctctgtttttctctttaaagtttctaactttactatcttttgctctgttttggtgtttgtgtagagtatgcgtatacgttgaaggtagatgagaagagcgatgtgtatagtttcggtgtggttcttttggaactcgtcaccggaagaaaacctgtcggagaatttggagacggtgtcgatatagtgcaatgggttcgtaaaatgactgattcgaacaaggattcggttctgaaagtattggatccgagactttcttcgattccgattcatgaagtgacgcacgtcttctatgtagcgatgctctgtgtagaagaacaagctgttgagaggccgactatgagagaagttgttcagattctcactgagatcccgaagttgccaccgtcgaaggatcagccgatgacggaatcagcgccggagagtgagctttcgccgaagtctggtgttcaaagtccgccggatctactcaatctatgagagttttctgattcacggcggttaatttagggtaccggtataaggggtaaatttgtcttttcataaatgttattagcgatgagatttggttgttaatttactttaatccctcttagtacggtttgtgctttggtccggtttagtaggtttttttttgaaagaaggttgtttaaactctttttaagtgtgtttcattttccttttttatgtttttaatcggtattcggctttatttagtttgtaatttgtgttaatgaaaatgtacagttggtttttttttgaaggaatttcaaaatatcttgaaaagagtgaaatgtgtaatgtgaacactcttgcatgtcttgctatagagtcacgcatctgcaactgatatgaacgatcaccttctttattgtttttaggtatttgactttgttacaaagattcaaatgtagctactaacacctgcaataacctgaaagaaatttcatcaaacagaaattatatttgatctccatcaacaagatgtttgagagcggttaaagttgtggttgcgtttgcgtttggtgaaaatgttaacttggaagaataattaaagaggaagcatgtgagaggtcaaaggtataaatgtggtggggagataatgattggttttgagttaatatgagaagcctataaggtgatatttctcccacatgcaaaatatataccaaagtctttaagtctttaatgattttgatgagatctcttctctattccctgctcatgaagcaatttctactctatgtaaagcatttatgatttcatcgatcactcataaatataagccacacccaacttacattaatatggttttcatttggctgtacgtagtttccaatgatgattgtagatctaagtctaggttttaatgagaaaattggaccaaacaaacaaaattgtagctatcttcgtgtttgttcacattttggagataacagcctaactagatcatgggctaagtgttagctttgatagggattctcacgtaactctatgataacatattgcactaaaatgtgatttagttcactcactaagttagtgacatttccaaaaagtgtcatccacttagcaaattccgttgctatgtttatgattctttcattactatactccaagcaagaatttgacgagtgatactgcaattttatctttttcataaacgtaacgtttatttcacaaacaaacaaaaagtgtttttgtaatttccttgatgcacacatcaattgcgtgtgtgttcacgatttcatcacatatacaacaactattttccatttcactgtgcgtccatgggatattcatgttcgatggatcataaaggtaaaagactcaggaaaaacaatagttaatgtcatttcatatcagctttatattctcacattatgcgtaatttccggacaaaagaaagctattaattagaaactttttttatctcaaagaattttcgtctgtgacaactcataagcactgaaaattagactactccaattttctaactcaatttactctgtgtctatgctatagacctatcagttatgtagcacatataaatatcaatccaaacattttaattggtaagttttaggggtgaaaatgccacgtggaatttatgattgtgatgtgacagagacacgtagaaagaagaaggagtgcactgtgttttgaatgggtccgttttgtctttatcttggccttcattgttttccccgacatagttatgtcccatccctcgtagttgctaaagagaatccttacaccaaggtaaattacaataacaaaatttagaaatttaaatttatcaattgatctgatatgtgaaatgcagtttgtatacatttggtattagccgctcaattttcttaaaagatttcagaatttagtgtaggtgattaggtataattagttgctggtcatcataagaagaaaaacacaaaaaccctaattaatattcgtacctgctatcactaacactatataatatacgaaagtgtctagctaattatgtaagatgattatagtggctctaccttttactatgattcacgtactagtgacttgtgttggcccaaatcttactcattccgtttaaattttatagtgtttacatatatatatgtaatggagttggaatgctcttggggacatcaagaatgaccgtttgtttatccgtgacatatgactgaactaagtaaaataaaggacgtaaatagttagtatatgaatttgattcatggatgaacgtccgtgacatatgagaccgtcgtatgtcaagaaaatgtgtgtgagaaaattatatgtcatatacgatgatatcgtaacgtggtgctagctaggtagagattcgctttgtttcgtaaatgctcatcgacgtaaacaaaatcacttttgagttttatagtttcacgagtaatgatgtacttgtatattatgatgattgcagtactctttttttcttaaagaagaaagcaggagatgattgtaaatttgtaaatgtatattcttgtaaccagagaattatcatcagagattaataatggttaaatttagaaagtaataatagtgaggtgacactgaaaggacaaaaagaagaagagacaattggttaagtgccactttttctatttgttgacatacatttttgaaaatcaaacgtgacaaatatttccaaatgcttctgatccttttgaattttaagcacatagctcttttaaaaataattaaattacaattagctgtaaagttcacttgcctcattatttacaagatagagaaatattataatgttttgcatgatcaaaccttcttactatattttaccaggcatgatctaatttctaataatgcattgtctaatacgtaatcattactgccattattataagttatgcacatgcataaacaatatctatcagctttttgaaatctttgttatcttgaaattttagctatgagctgaccaatggatgaataataagatcgatggcgaaccacgccttcacaccaaatgtcagcaaaccaaatgttagtttggactcttgtattttatcgcttacaaattgcaatgaagtaatgatcacatattcgataagttggatttatcatgtaaaactttgtttaaagcatgtagttataattgcgaatcaaaactttagctttgttttgcctttggattccagattccaccaattagtatctccaaaaagggcatacacagtcaactttgacacgtgagttcccacacgtgtatcatagacattcctataaaccgcacgataaaatgtaaagcatcacgagactcataattgggatttcctctcttctttctttgctttaatattcttttcaaaatgagagatcacacgagacacacgagaacgtccacataccgaatcatttgttttttttttgtttggtcaacaatcactatttgttgttatatgatcatctttaactgtataaaacgtccgtgaaagtttttttatgcggagttgggtaaaagatccgtttggcaaaacgtgacaacataaaaatgattcatataatttgggccatgaaataatgggcctatcctcgaatcagatgttattttttaaaaaagctcagattatacatagttggatcctgaaaagccgaatcacaaaaataatatgggctttacttttgaaaactaaaaaagcccaatatcttgaaaaatgatttaacatgcataagcgccaccttgtgtcgaaaggtggagtaggctctgtttagacgacaataaattttattgagtgctgctgattgtgaattttgaatctttaaagttatatttttgttattaacttgtcgaggcctttgagcactaacaaaattggagttccagctcacccactggcccactaggcgttattacgttaacgaaatttccaacggtcaaaaatagttttccttttttcaatggggatagtttggtaatttcgactctctcacagccaagttttcctttttctctaggttttatgtttcctgatacaacgtacataaaattgtttacaagtataactccagcgtcagagatccattcgatagcgacttctctctctctctcttttctgatatcagaaaaactttctttgttttctctcttcccttttctcatatagaaaaacgttcagagattcaaaaaaaaaggtcgaattttgttttttgggtatgacgatcataagcaaaagcaaaggatgtcttcaagagatcaaatcaacttgcgccgactccaacactctgttttcaaaaggtatttttcttccttatctatgtttctcttttatctactgtcttgttggaatttttggccaaatcaacatctttttatatggtttgttaatctttagtatctaattatctggttgatcgcaaaacaaataattctcatgttcaaagtgggtttcttctaatccaatttgaattttagttcttatattattcccctctaaccctaatcatatgtttctcaaacttttgatttttattcaagattcctcctaatcagttatttcttctttgtatgtagatgtagttgcaacttcagagcttttctcatctgtggtgtcgtagcgtgagagagacggatttgcagtcattgaaactctttggacattacaaagcccaataaagatggacaaatgacaagcccatttttaaattttgtctgactctcgcctatcctacatgaattctacagagacaatgcatcatcccattcggctaggtcaattttcatccctatcttgtttataatctataatcttatagataggttacttacaaaaaaggtctttaatactacttttgatttttcaaaacataatatatttctcaaagtttttgatttttaaaggtttttaactctctttatttttctatttttttcttctataaatattaaattaatatgacgttgtgaaatctaaccggattttggatcctgccatgtaaccatggtcattagcgattccacaaatccaacatgttttttcacatcttcatgtatatttagcattttttttttttttttttttttttaaaaagttttcaactcttttgttttttttaaaggttctataaatactaaattcatatgagattcaatatttagaatataaatactaaactaatacatgtggatacccaatacaaatataaacctaacagtattagttatatactaaactaatatatatatatatatttgtaatacctcaagaacctaaaattaaaataataaatccgaatatacagcggcggatccacgttatgggtgatgggggcaactgccaccagtaaaatataaataatttacgttttttaataatacagagtaagtaaagtaacagaatggtatgaaatgctcccactaaaagcaagaagtatcgggttcaaacccatttaaagacattttgcccccattaaatatttctgctgagtccgcccctgcgaatatactagattttgttttttagtaattcatataaattggatatatttgggataaaagtagccaatgttatagttttcttttaggtaatttgagtattttggttatatttgggtaaagagtagtaaccaatgtatttttgggtaatcggatatttcgattagatttagtatatatggtactctttccgtttcacaatataagttgttttagctaaaagcacgcagattaagaatatttatttttaaaaagtttaaccaatcataaaagacactgcataatagaaataattataaaacattaaaataatatataatagaaatttgaaaacaacttatattgtgaaacaaaaaatttggtccaaaataacttatattatgaaacggaagaagtatattatattctctcatccattttaaaaataaaatttgaggattttaaacaaacttgttccccctttttatggagtacttcttataatagtggctaattataagagtctaaaaacgaatttttatatgaatttagaaaaattaggatggggtttttgggaaagataaaatgttgcctataacagtacatatttaatcagacagaagtgtcttcacggcgacgaagagtgtcttccggcaattgcatactccaacgcaaacaaaaaatgaaaataaagcaaatgtcattcccgttaaataatacgtgaatgtcattcccgttgaatgctaattaaagtagagaagcctcaaaatccgatgagtcatacgtgaatgtggttctagtgtctccccaaatggcttccttccatttaattccgaagttaacttttacacttgccatcaaactttagtaatgaagaaaacattgatacaacaaaactgcgagtgtaaaaagtctcatttcactgttaaattattaattttaagagtagacattaactgcgcctaactgatgactaaagaagagttgatcaaacaaagtctacacattacctaacattctctgttctaactaaatacatccatttaagagacacttaccaacctcctactcaaagctactctaactgttgttcaattaaccatcaacataactgcaggagtaattgattaaacaacaatgaactctgacttcatcaaaaacatcgaaagactctgaagtcaagcatgttgtttttatatgtcaaccgcaaacctatgcattaaacaaccaatagaagccaaaaaaacgtacagaatctaggagaatgcaactatgattatgaaaattcacgcacactaataccactagcttacaattagagagtgaaacgttacaatacgtccacgcaaaatacgtcttattattatgataacgtacattaatattcatgttttctgtttgtgctctgcattttgcttatctgtgctaggtgaaaacaaaaaaaagaagagatttggacattttaacacacgctttgctcgcacttcacttttttcacaatcatactgttattttccttcctcttataatgaaaacttaccgataagcaaatttgtaccaaacgtatgaacgaatgatctttctagattagtcgattttaccatacattaattaaattattaggttcatctacccaactacaaaaaaagggagataacgttggcgttttcaaaaaagagtgaacactaataaaagttttctagattccttttctcaacttttctttaagctaaaagactccaaacaaacacttaagaaagaaactgtcactcaaacttaaacctacttcccatgtgaatcaaaagaaagcaaaaaaaaccagcaaatccgtccatctttaaataacaatctcaaactctttaaacgttactcaacttttttcttcttttcaaaaacccattctatgaacacaatctcacctccttcatcgtgtttcatacctctcttcccaacacgatgctcaccaatactaatctcttcttctttctctctttacttcttctttcttgttttctccaagtttcttccaatggagacgctgagatattgagtagagttaaaaagacccgacttttcgaccccgatggaaatttacaagattgggtcataaccggagataatcggagtccatgtaattggacgggaatcacatgccacatcagaaaaggtagctccctcgccgtcactaccattgatctctccggctataatatctccggtggctttccctacggattctgtcgtatccgtacactcatcaacatcactctttctcaaaacaatctcaatggtacgattgattctgctcctctctccctctgttctaaacttcagaatttgattctcaatcaaaacaacttctccggtaaattaccggaattctcaccggagtttcgtaaattacgagtcctcgaattggaatcaaacctcttcaccggtgagattcctcaaagttacgggagactcactgctctgcaagttctgaatcttaatggtaacccgctcagtggaatcgttccggcgtttttgggttatctgactgagttaactcgtcttgatctcgcttacatcagttttgatcctagtccgattccatcaaccttggggaacttgtcgaatctgactgatcttcggctaactcactcgaacctcgtcggagaaattcctgattcgatcatgaatctggtgttgttagagaatcttgatttagctatgaatagtctcaccggagaaatacctgagagtatcggaagactcgaatcggtttaccagattgagctctacgataaccggttatctggaaaattaccggagagtatcggaaatttaaccgaattgaggaattttgatgtctcgcagaataatctaaccggtgaactaccggaaaagatcgctgctctgcaacttatctctttcaatctcaatgataatttcttcaccggaggattaccagatgtcgtagctttgaatcctaatctcgttgaattcaaaatcttcaacaacagtttcacggggacgttaccaaggaatctcgggaaattctcagaaatctctgaattcgatgtctcgacgaacagattctccggtgaattgccgccgtatttgtgctacagaagaaaacttcagaagattatcaccttcagcaatcaattaagcggcgaaattccggaatcttacggcgattgtcattcgcttaattacattcgtatggcggataacaaactctccggcgaagttccggctaggttttgggaacttcctcttactcgtcttgagctagccaacaacaatcaattacaaggttcgattcctccttcgatttccaaagctcgtcatctatctcagcttgaaatctccgctaacaacttctccggtgtgattcccgtcaaactttgtgatctccgtgatctcagagtcatcgatcttagccgcaacagtttcttaggatcaattccgtcttgcatcaacaaattgaagaatctagagagagtagagatgcaggagaacatgctcgacggcgagattccgagttcagtgagttcgtgcaccgagttaaccgaattaaatctctccaacaaccgtttacgaggcgggataccaccggaactcggtgatttaccggttttaaactacctggatctctctaacaaccaactcaccggtgagattccggcggagctgttgaggctcaagcttaatcaattcaacgtctccgataacaaactctatggtaagattccttctggatttcagcaagatatttttcgacccagtttcttaggtaacccgaatctctgtgccccaaatttggatccgattagaccttgccgatccaaacgggaaacccggtacattctcccaatctcaatcctctgcatcgttgcactaaccggagctttggtttggctattcatcaaaaccaaaccgttattcaagagaaaaccgaaacggaccaacaaaataaccatcttccagcgggtcgggttcacggaggaagacatatacccgcaattaacagaagataacataattgggtcgggcgggtcgggtttggtttatagagtgaaactcaaatcaggtcaaacgcttgcggtgaagaaactctggggagaaacgggtcaaaaaacggaatctgaatctgtttttcgatccgaagtagagacgttgggtcgggtcagacatggaaacatcgtgaaacttcttatgtgctgcaacggcgaggagtttcggttcttagtgtacgagttcatggaaaacggcagcttaggtgacgttttgcattcggagaaagaacatcgtgccgtttctccacttgattggacgacacgattttcgatcgcggttggtgctgctcaaggactttcttatctacatcatgactctgttccgcctattgttcaccgtgacgtcaaaagcaataatatattgttggaccatgagatgaagccacgtgtcgccgatttcggtttagctaaaccgttgaagagagaagacaatgatggtgtctccgatgtttcaatgtcttgtgttgctggatcctacggctacattgctccgggttcgaattcttagctctacaatatcaaatcgttaaaaccctatacgcaagcgttttagtaacattactgttcttctgtggatgcagaatatggttatacgtcaaaagtgaatgagaagagcgatgtctatagcttcggggtggttttactcgaactgattacgggaaaaagaccgaacgattcgtcttttggggagaataaggacattgttaagtttgcaatggaagcagctttgtgttacccttctccatcagcagaagacggagccatgaatcaagattcacttggaaactatcgagatcttagcaagcttgttgatccaaagatgaaactttcgacgagagagtatgaagagatagagaaagttcttgacgttgcattgctctgtacgtcgtcttttcctatcaacaggccgaccatgaggaaagtagtagagttgcttaaagagaagaaatcactagagtgatattaatcctaggcttttaattattaggcttctataatgtacaaaatccgactaggattgttactcattattatagccataggttggactttgctttaaagtttgggtttttagaaattaaactacttaaagtttgaaccaaaaaaaaacaaaggaaaactacctgaaaacttttgttttcttgcttcacaagactctacagacttcaaatttcatatataaaaggataattcaaatggttccggatgaaaatttccttttgttgatgttttcagtatagttatagtctcttacttagtaagttaggtttatggtttttatttaattatcaaattcgtcacaactttgctttcttagatccaaaaattcgtctagctatagttcaaattggttaaagctgctgattctcagagtttttttctaaattcctatgtcaggattaggaaatagcttcaagtagtagtttttgttcgtctggcatgtaatttctgattgaattgttatttgttggtatgttgtagatcaaagcggataaggtgtattcgatatgtagacgaactttcacggtttttaattggcgatatggagactctattttcacctttttagtggaccaggttagacaaatatacaagagcctcttaaagaaaaaaataaaaatagtattgggcaacttataggcccattatgtatattaacaggccagtttctcataggcttttgatactttcatggactcgaaaatttagggtttcagagacgaccacgttaccaccgtcatgaaaccgccagtgaccgtaacatattcacctctcgcatcttcttcttcttcacggagaagcaatcgaagagaatcaatcaactagacaaaaatcggaagaagaaacacaaaccgaggttttagaaacatggcgtctaaggtaatctctgccacaatccgcagaaccctaaccaaaccacacggcactttttcccggtgtcgctacttatcaaccgccgctgctgcgacggaggtgaattacgaggatgaatcgattatgatgaaaggagttcgaatttcaggtagacctctttacttagatatgcaagcgacgactccgattgatcctagagtattcgatgcgatgaatgcttcacagatccatgagtatgggaatcctcactcgcgaacgcatctctacggctgggaagctgagaacgccgtcgagaacgcacgaaaccaggtcgcgaaactgatcgaagcttcaccgaaggagatcgtattcgtgtccggtgcaacggaggcgaacaatatggcggtgaaaggagtgatgcacttttacaaggacacgaagaaacatgtgataactacacagactgagcataagtgtgtgcttgattcgtgtaggcatttgcagcaagaaggatttgaggtaacttatttacctgtgaaaactgatggattggttgatttagagatgttgagagaagctattaggccagacacagggctagtttctattatggctgtgaacaatgagattggtgtggttcaacctatggaggagattggtatgatttgcaaagagcataatgttccgtttcatactgatgctgctcaagctattgggaagatacctgttgatgttaagaagtggaatgttgctttgatgtctatgagtgctcacaagatctatggaccgaaaggtgttggtgctttgtatgtgaggaggaggccgagaatcaggcttgagccgttgatgaatggtggaggtcaggagaggggattgcgtagtggtacgggggctacgcagcagattgttgggttcggggctgcttgtgagttggctatgaaggagatggagtatgatgagaagtggattaaggggttacaggagaggttgctgaatggggttagagagaagcttgatggtgttgtggtgaatggttcaatggatagtcgatatgtagggaatttgaatttgtcgtttgcttatgttgaaggagagagtttgttgatgggattgaaggaagttgcagtgtctagtggaagtgcttgtactagtgcgagtttggagccttcttatgtgttgagagctttgggtgtggatgaagacatggctcacacttcgattaggtttgggattggtaggtttaccacgaaggaagagattgataaagcggtcgagcttacggttaaacaagttgagaagttgagggaaatgagcccgctttatgaaatggttaaagaaggtatcgatatcaagaacattcaatggtctcaacactgattcaacagttccactcaaactgtgcgggacaagagggaatctccagtctgtggtcagccggggtatatgagagccatactgagatgtgagtatgaacgatgatatgatcctgtgttcttactatgttctgttggtaagttatctatctatattgctttctagagagaattgcatgtgagagtttcttgtgtggttttgtaataaaacagaaacaaaggttcatttctggttagattgtgatatcctttgaaattgaatgattaatttttaggtgttgtgagcttagcttttttagctacggtaatggtgaagtttgttttgtttttcttcttatttatgaaaataaaatacaattttatgtgaatattttttttattcctcttttctcactctctaaaaatgtcggcgagtctcactaagatgttgaagtaacaaaacatgaaatgagaaatgaaattaatgttcttaccttcatgttaagttgaagtagatcataattatcccatgtgatttggtaccaaagttttttttttcagatctacgtacactcgagtcgacctttgctatgaactcaaatatgatccaataaaattttatattcttctgtgttttttttttttgtattcaaatttggatagaaacaagtatttagtaggtcgtaggtgccataggtggcccttgggaaacatccaatggatacaaacctcatattataaattctctatgccaaaataattaggaccataggttatgttatgtacctcaaccatcctttgattgagacattaaattccttcacgtttgtaaaccacactttcgtatacattttcttccctaacacttcttggcactgtttcttttattaatttgatttttgaaacatatgtcaaaagaaaagaaaagaatcgaaacatttaattaattaatgtttgtaattgcacgttgtacattcattacttttataaagagactgatcaaatgatgattgataatccttttagtgtatattaggcgtgtcaatggtgtatatattatatagtgtctatatgtcataagaaacgtcataaattttatcaaaggaacaacaatttaagtctgattaatctataattctcatccttacattttcattggcatcaaatttaggtaatttttagaatatagcttaataaatgagtaggccaagaggacggctcgcaattagctgtgtggaaagctaaacgatgtctcctaccgtccacgtcagcgtcttaaatcctcaaatcccattggcaacaaaaaaaacattgtgtatataaatacatgcatacttatcactctctactcacttttacaactaactcataagtaaaacacagacagtttttagatggctaagatatattccccttcttttcccggtactctctgtctttgcatttttactctcttgacgctaatgttcattcgggtttccgctcgacccgcgacattcgtcgaggatttcaaagccgcctggtcggaatctcacatccgtcaaatggaagacggaaaagctatccagctcgtccttgatcagagcactggtacaccaacgccacagttatatttttaaacggaaacattttgaaattaatggtgtttttatgtaatatactctcactgtacatgttcatatttgtcttttaaaggatgtggatttgcttccaaaagaaaatatctattcggacgagtgagcatgaagatcaaactcattcccggagactctgccggtacggtcaccgctttctacgtaagtctatcattttactccactagttttgaaattttacacattcacacaataaaaaataacattttcttgaaacactaacggtcaaatcattgatatgtctatagatgaactccgatacggccacggtgagagacgagctagattttgagttcttgggaaacagaagtggtcaaccttactcagtgcaaacaaacatatttgctcatggcaaaggagatagagaacaaagagttaatctttggttcgacccatctatggattaccacacttacactatcttatggtcacacaaacacattgtgtaagcttttctctaattgtactttcaactagaatcaacatttactgtttcaaaacaaaaaatcaccatttactgtttaaaaaaaccttagtttaacgtggggttgttttggttactcagtttttacgtagacgatgtgccaataagagaatacaaaaacaacgaagccaagaacatagcttacccaacatcacaacctatgggagtatactcaacattatgggaagcagatgactgggcaacacgtggtggattagagaaaattgattggagcaaagctccattttatgcttattacaaagatttcgacatcgaaggttgtcctgttcctggaccaaccttttgtccatcgaaccctcataattggtgggaaggttatgcctatcagtctcttaacgccgttgaagctcgacgttaccggtgggttagagtaaaccatatggtttatgattattgtactgaccggtctaggtttcctgtcccaccacccgagtgtcgtgcttgaaaataattgcatacgtacgttgcaatgatcatgtttcgtcttgtacgagattttatatataaattgtgggaaaatgtggattgtattgtcctcttacgcaattgtgcagacgtacgtgagtgtgtatagatataattgtgatttgtggttatttgaaatttttataaacatagatgaattctgtgaagacaatttattatgtgactgtgaccttatggctaggcattgattgtttcgaacacataacttttttttcattaccaagcaaattccgaatctaaatttagtcatctttcccacgatgatagtttaaactcgtaaccttgagacacatgttctttagaagatcattagtacacgcatagagttagaaatgttggattacaaattccaaattgtaaacaaaagatttgataaaccactaaaattttgtaatcttaacataaaaataaccacaaacacaaaataaaatataatcgaagcgtataagatgttacaaggatttgttgcacgaagaggatattattggtttggctatatggtcccattgccaacaaaggcgtcagatttgcattaaaccttagaaggaaaatgtcttatcaagttcagagcttgttgaaataatgtggaactcattaagaaatgccaagaaaacttgaaatcaatgggttgatgttgtacatatctaattttcaacttcagaatcgaactagttctcatttagttttgccctgataagtatttctcccttttcacattattttatgttcttgttgaatgcatactataacactaatcagaaatattaacaagatgacatgatatatatagcatgtaaccaataagtaaatttactagtggccaaattcacataaactcagtggatatatcatatacttgtttttaatagtgaaaactcacctaaaatttgcaaccccaaaaaaattcaccttagttagttttttgcttagtaaatttgtttaaattatagcattcaaatacttttgaggtcttaaacatagagtcatagattggttaagccaccgacagtactattacagctggagagaaaggatgtatccatggagaaaaaggcaaacaatagcattcaaatactctttttcaaaattactaagtaaaagagttattgcttgaaactccacattgattgtgattgatagatcagctttggggaattgagtggccacaaaagaaaaaaacaaggtacattcacatctcttatttgaaagctacatgagtcttatcttaaacgtacagaagaaaaatagtaaaaaggaacttttgtcctcacttactactactactcattactgtactaactcttctctttgtatcacgtttcattacaacattcagatatcagctaattaggatgatggtttgtctaactctatttgttgctggttttgactgcaactgggtctgaacaataagggcagttcccaaacagaacatcaaatgacctgcaagaaattggatcataattgagctttagagcacaaggattgtgtgtgtttggatatgagagcgtgagagattaaggtttccacttactgtcttgttgttgtgatagaccttaaccagtctgtgaggcagaggctatggaaagacttgttgcaactgatgttttcacatgtgtaatctgttcgtgtcccacttctagctccgagctcctcatcttagattaaagtaaatgagaagttagcgaaccatcaaagcaaattactattctgaagcattgctttttcggtttaagaaatcaccggtgggtagaaactgcgcatagcaaatcccacattcaacttgttgttgatcgtcttccacttggagacctagaggctttggaagctcagtacctagaatacattcaaggttctcaggaaatgatctttcatttgacctgtatgattatcattaacccgtcattcctgctttcaacaatccatataactccatgctatataaccaacctctcgaaagagatttaaaatgggagagtagagacaaaataattttaccatcttttgcaatttcttctccataacatatgcaagttgttcatatgcgtagctgaaggcacaggaccaataaaccgggacctgtctaagcacttataactattaaaaaatgtcgacaagtaggttattgagagtgtgtgtttgtctagaaacatactctggtagggatttagggtctttgaagtcgatatgaacaatgatgatacaatcattccctgagaaaaaaatgaaccaagtagagatagataaaagtgaatttcgtcaagacagaaataaaagagtatggagacaaatggaattgaggtaaaggtattaaaccagcatcaatccggcgaatagcagaggcacgagctggttgcttgacatcaacaacacatagagatttatcgatattgtccaagacagaccaaaattcttgaagatagtccaaatgctgttaacaacaaaaacaagctgattagtgattacaaagagagaatgtagcaaagtcttagatctaccttttggaattggtgcattacatccttcaatcttgaacttgttgaccattctagtgtaaacatatatggcacatcctacatcgaagcaaaagttaattcgctacggagaatgaaaaaagcttaaggatttgacattaacaaaccgcagaaacagaaggtggtgaattaggatagtctctgttcagttgaatttctaagttgtgagctcttcccttcttatctctgtacataatcatgatgatggcacaaagctaacatgtcacatgaagatggagctacataggttgcaaagtactaatcacattaagtaagattttgaagacaaccctaaaattatggaacttacagaatgtgaaagctaaaaaacgttaaatctccacctaatctccttattggttcccatccaatttcttctatctaagaaaccaatacaacaatggttcgttgaatatgtgagagcactcgatttcagaagaagggaagggatcgatggttaaccaaacctccgagtaaactttccggtaaaacgaagaagacttggctaattcctcgcatctttcacggcctacacattctccagaaacattcatcatctacgcagatcatcttcaacctctgaaactttctgcatctcgagtaatccgagtgctatgttttgggccgataagcccaatatttgatgaatcttattatggcgcagttaataattaggaacaagtatttgagtgaggacttcgagtgttacgttgggcctaaaagcccaatatttaatgaatcttattgaggcccagtttatataagtattaaaataacaggtatatagttatccttgtagccaaacatggatttttcaaggcggtgcactttcttacttttctttccttctttctctgtctcctagaagccacttcactgggatcgtctccatctttgatccaggttcgtcttcttcgtgaatcttcctgcttaattttttttttcagttactacttttttttggttattgttaattttctctgatggaaattctccgaaattgaaagttgttaaagccaaaatatttgggaattcaaaaacatttcgatgatctgaatgaggtcagatcgctgagaaaatatgggattataggttattttcgttttaaattttctatgttttgtatgtttgcatgatatatatatatatatatatatatatatatatatatataactaagtcgttacttgattagccatttttgacttatctactttctttttatgttgttgagtattttattgtgttgtttaatggatcattttcaggttcagagattaaacaatttgaaaaatcggagactctgggattgtatggttcgttgttactgatagattacttaagctatggtttggtttagaatcggttcttctgtggcaaagcttgccataagaaggacactgtctcagtctcgttgtggttcatatgccactagaacaagggttttgccttgtcaaaccagatgttttcactctacaatactcaaatcaaaggcagagtctgctgcacctgttccacgtcctgtcccactttctaagctaactgatagcttcttagatggaacaagcagtgtgtatctagaggagttacaaagagcttgggaggctgatcccaacagtgttgatgagtcgtgggataacttttttaggaattttgtgggtcaggcttctacatcgcctggtatctcggggcaaaccattcaagaaagcatgcgtttgttgttgctagttagagcttaccaggttaatggccacatgaaggccaagcttgatcctttaggtctagagaagagagagattccagaggatctcacgccaggtctttatgggtttactgaggctgatcttgatcgggaattctttctgggtgtatggaggatgtcgggttttctctctgagaaccgcccggttcaaacactgaggtcgatactgtcgaggcttgagcaagcttactgtgggactatagggtatgagtacatgcacattgctgatagggataaatgtaactggttgagagacaagatcgagaccccaactcctcgacagtacaatagtgagcgtcggatggttatttatgataggcttacctggagcacacagtttgagaatttcttggctactaagtggaccacggctaaaaggtttggactggaaggtgctgaatctttgattcctggcatgaaggagatgttcgataggtctgcagatctcggggtagagaacatagttatcggtatgccccataggggtcgacttaatgttttgggtaatgttgttagaaaacctctacgccaaatattcagcgagtttagcggtggtactaggccagtagatgaagttgggctttacaccggaacaggtgatgtgaaataccacttgggtacatcttatgatcgtccaactagaggaggcaaacatctccacttgtctttggtagcaaatcccagtcacttggaagcagtagatcctgttgtgataggtaaaaccagagcgaaacaatattacacgaaagacgagaacagaacaaagaacatgggtattttgatccatggggatggtagctttgccggacaaggagtggtgtatgaaactctccatcttagtgcacttcctaactactgtaccggtggaacagtgcacattgtggtgaataatcaagtggctttcacaaccgatcccagggaaggaaggtcttcacagtattgcactgatgttgcaaaggctttgagcgccccaattttccatgtcaatgcagatgacattgaagcagtagtgcatgcttgtgagcttgctgctgagtggcgccagacgttccattctgatgttgttgttgatttagtatgctaccgtcgctttgggcataacgagatagacgaaccgtcattcacacaaccaaaaatgtacaaggtctggctattatatcatccatctctgtgaaataatctaataaccaattcaagtttccatttcatacttttcttgtactttttttttgtttaaaaacggatgttacttgttggtgataggtgatacgcagtcatccctcgtcacttcaaatctaccaggagaagctcttgcaatctggacaggtaacccaagaagatattgataagattcaaaagaaagtaagctctatcctcaatgaagaatatgaggcaagtaaagattatattccacaaaaacgtgactggctggcaagtcactggactggattcaagtctccggagcagatttctaggattcgaaacaccgggtaaaaaacatttttatttcatttagtttgtcaatgccttttggccttttttcttttctttttcaatgtaacattttgctggaaaactattcccttgttcttttgcagagtgaagccagagattttgaagaatgtgggaaaggcaatctcaaccttccctgagaactttaagccacacagaggagttaaaagagtttatgaacaacgtgctcaaatgattgaatcgggagaaggcattgactggggacttggagaagcacttgcttttgctacactggttgtggaagggaaccatgttcggctaagtggtcaagatgttgaaagaggaactttcagtcatagacactcagtgcttcatgatcaagaaaccggggaggaatattgtcccctcgatcacctaatcaaaaaccaagaccctgaaatgttcactgtcagcaacaggtatgcatttttttttaatctctagagatgataaccactcttcaattgtttttacatgatctttacgttgtttgtgtatgcagctccctttcagaatttggtgttctcggtttcgaactgggttattcgatggaaaatcccaattctctggtgatatgggaagctcagtttggagactttgctaatggcgcacaagttatgtttgatcagttcataagcagtggggaagccaaatggctccgtcaaactggtctagtagttttacttcctcatggatatgatggtcagggtcctgaacattccagtggaagattggaacgtttccttcaggtatattatatgaccgatacttaccgttaagattctctccactttttgtatttgtttccctctcatttgaaaattttaactgcagatgagtgatgacaatccttacgttatccctgagatggacccaactcttcgaaagcagattcaagaatgtaattggcaagttgttaatgttactacacctgccaactatttccatgttctgcgtcggcaggtaaaatatctatttatcccaagttcgtaaaatgttgttacttaattttcgtattcttcacactcacatgcttgatatcatccatttgcagatacacagggactttcgcaagcctcttatagtgatggcccccaaaaacttgcttcgtcacaaacagtgtgtatctaatctctcggaattcgatgatgttaaaggacatcctggatttgacaagcaaggaactcgatttaaacggttgatcaaagatcaaagtggccactctgatcttgaagaaggtatcagacgtctagtcctctgctctgggaaggtataaaaaaaaagatccactttttccgtcattaactaacaaagttcccacattctgaaatttaatactttaaatgtcaatgaatcaggtctactatgagcttgacgaagagcgaaagaagtctgaaacaaaggatgtagccatttgcagagtagagcagctttgcccatttccatatgatctcatccaaagagaactaaagcgatatccaagtaggcgtcgaaaactcaagtttgtgttcaatagttttggttgattatggaattctttgaaacttttgttcttgtgtttaacagatgcagagatcgtgtggtgtcaagaagagccgatgaacatgggaggataccaatacatagccctaaggctttgcaccgcgatgaaagcactgcaaagaggaaacttcaacgacatcaaatacgttggtcgtcttccctcagctgctacagccacaggattttaccagcttcatgttaaggagcagactgatcttgtgaagaaagctcttcaacctgaccccatcacccccgtcatcccttaaaaaaacacagcttgagaggcttgagcctgtataaaaaagacacaacacaaaaataaaagattcatgagagaatctttggttaccaaagagtgtcactggaaaataaacagatgtttgctagacttacaaatttaagtttattcgatttgtttggtttgttataggatttaatcgagataaaaggaaaaaagatttaaaccgtttggtttagtatgataattcattaatttggttcaactttggattgattttggttcggtttggttttatcagtgactgtatcagcttgaggcagttgcaatcttgtaactggagagaaaaagctatcaaagttaaaagttatggcgagccatttttgcttgcttctgatcttcactttcttcactctagtgtttccgtcaaacggatcttcactgtcttcttccaagcttttacctcgtttccctcgctacactttccagaaccgagaagccagaatccagcagttccggggagatcgaaacgagtatcgatacgagactaagttcttctcacagcagctggaccacttcagcttcgccgatcttcccaaattctctcaacgctacctcatcaattccgatcactggcttggtgcttctgcgcttggacctatcttcctttactgcggcaacgaaggtgatattgaatggtttgctacaaactctggattcatttgggatatcgctcccaagttcggtgccttgcttgttttccccgaggttcgttggtgttgttttatttttcctgttggaaattggaaaaagaagaagcaatttgttactgattttagggatttggtatagcataggtattatggagagtctatgccttatggaagcagggaagaagcttacaagaacgctaccactttatcatatctcactactgagcaagctcttgctgattttgctgtttttgtcactgatttgaaacgcaacttgtctgcggaagcttgcccagttgtgttgtttggtggatcatatggtggaagtaagtgagcaacttttgtgttagtggaattctttttaaatgagattgtggagtaattgtgtttttgtgtttgttgttattgatgcaacagtgttagcagcatggatgaggctcaagtatcctcacattgcaataggagctttagcttcctcagctccaattcttcagtttgaagatgttgtacctcctgagacgttctatgacattgcatcaaatgatttcaaggtaatacatacttttgcttcccttagtcgattgactttatcttgtctttctttaatcatatagggaccgtgtttttgtttgtagcgtgagagtagcagctgcttcaataccattaaggactcgtgggatgcaataatagcagagggtcagaaggaaaatggccttctgcagttgacgaaaacttttcacttttgccggtaaacaaataaattggagttagtgtgcgcttgttaagtgtattgattagtaatagttcaatggattgtttctcgatttgcagggtgttgaacagtactgatgacctttcagactggctggactctgcctatagttatttggcaatggtggattatccgtatcctgctgacttcatgatgcctttgcctggacatcccattagagaggtatatttgggaagtaacactttatgagtttatacgaatattgtagaagaaatctgagaatgcattcgctagatcatttggattttcatctttacatcaacgatccggggaggctatgctttaaagatttgcttgttgcgtcaggctattgttcaaccacgtccgttaaagtctttgttcaatgtggtgtatctttctataggtctgcagaaaaattgacggtgctggtagtaatgctagcatcctagatcgcatatatgcagggataagtgtgtactacaactatactggaaatgttgactgcttcaagttggatgatgaccctcatgggttggatggatggaattggcaggtatgaaaaagtcaactgctttgtttatctttcctttttctgataatatttcagtgacgccattattcactttcaccatccgtttacaataggcatgcacggagatggtaatgcccatgtctagcaaccaagaaaacagcatgtttccaggttatggttttaattactcttcatacaaagaggaatgctggaatacattccgagttaatccaagacccaaatgggtcacaacagagttcggtggacatgtaagacatcttttgataaactcaagattctttcaatgctgtgttctgaatctttactatgtctctgtaatgtaaaaggatatagcgaccaccttgaagtcatttggaagtaacatcattttctcaaatggtctgttagatccttggagtggtggcaggtaagaatattgttccctttactcaaatcccaagagctattttacaaaacgaatctcgtaatcgtgacaaatgcttgagtttgactcgtaatatgcagtgttctcaagaacttatctgataccattgttgctctcgtcacaaaagaaggtataactaaaagcctcatcaatctctctcgtaactaatctgttttttttttttttttttttttcatttgcatagacttaaaaacgtttgatcatagtagcagtagtctacattttattgacttgatgaattatttttggtatatctatcttacaacatcatgatcataatcataatcatcatctattctctttgaaactcacaaactaagttgattctggctttttcttctttttttctcaggtgcacatcacttggatctacgaccttcaacaccagaagacccgaaatggcttgtggaccagcgggaagccgagatacggttgattcaaggatggatcgaaacttatcgagtagaaaaagaagctaaggtttctctgttaaaacgttcttggtaagagaacaatgaaaagaatcgtctcagtgtgtaactcggaatctgcaaactttgtattgcgaacacatgctttgaataaatccatgtaactatgtaaactctcaatgatcactaatcttttctactagcttaactttttcgtttttgggtaattatatatgaatacacgcaaacaaaagaagtacagaataagatttatgagtctggctgatacacccaaacacatctgtcaaggatcttaaagaatcatatcttctaaatattaattttcatcacattgtgtttttatggcagaagaaagtatgaaacatttaatggttatgagtagaaaatctaaaatttaattaccatacagtcgtgactcttgagaaaatcggaaattttaattaccatatataatcacctcgtttaaactaaattgaaaattttggtattggccgctaaaaacgaggaggaaaaggcataaaacgccgtcgtttgggcattttgactggtcgaataaaaactcttttgactaaaacgtcgacctaaaaaaagaagagagagactagacctctctacaacgcactgtcacagaactcttctttgttgtgcgagagagaaatagaaaaagtgaagagacaagcaccgtgcttttgatcggagatcggaggaatttaggttcgattctccgtaattgtgatattgggagagactatggcaacttcttctcgttcggagcgatttccgataacgccgagtacggcggctactaatagattgacgattacgcctaattctagggttttgaaaagccctctcactgaagaaatcatgtggaagcggctcaaagatgctgggtttgatgaacaatcgatcaagaatagggataaagctgccttaatcgcttacatcgccaagctagaatctgaggtttgcttctcgatttttcgttgattttctctttctctagtgttatgagcagagtactctaggcgggaacacaatgaaactaactaatgagagtgttataattactgggattagcttgtgcccttgaagtttgatttttcagttcatatgaatttaattcgtttttgtgactgcccttaattgtttcagtcatctccgttacgctcgtgggtcaatcctgacaattttataggatgtaattggtttactgcagttattgctttgctttgggacctttaaagtttcgattttgtttcctcttaggttgagattgttgtatgggctagtttattctcttgcatgttttatcagtaaaatctattggcagtgctatattgatcttaactttcatgtaggtttatgattaccaacacaacatgggtcttctccttttggagaaaaacgaattgtcttcgcagtatgaagagattaaggcctctgtggatgagtctgacctaacacatatgcgagagaaatcagcatatgtctcggctctagctgaagcaaagaaacgagaagagagtttgaagaaggatgtagggattgcgaaggagtgcatttctagtgtaagttcttaactttgagagctagcaaaagcatgttgtttccagtctgtttattgattttgttttgttctttttctctcagttggagaagactctgcatgagatgcgcgcagaatgtgccgaaacaaaagtttctgctgggagtactatgtcggaagcacatgttatgatcgaggatgcgctgaagaaacttgcagatgctgaagcaaaaatgcgcgcagcagaggctttacaagcagaagctaaccggtatcaccgaattgcagagagaaagttgaaagaagttgaaagtcgtgaagatgatcttactcggcgtcttgcatctttcaagtctgagtaagtcttttctctcggtttactgggcttttggacttgtactattaatgtgtgggattaagttgttgtgttggttctttctttacatggtttaggtgtgaaacgaaagagaacgaaatggttattgagcgacagactttaaatgagaggcggaagagcttgcagcaagagcatgaaagattattggatgcacaagtttcactaaatcaaagagaagatcacatttttgctagatcccaagaattagctgaacttgaaaaggggttagatactgcaaagaccacatttgaggaggaacgcaaagccttcgaagacaaaaaatccaacttggagattgcgttagccttgtgtgctaaaagagaagaggtttgtttttattcacacaattctctgttatttttggttttgcattataggtcatcaaaaaaatttctgggagacaagatagtaatgttttcatgttttttttttttttttgcaaaaaacaggctgtctctgaaagggaatcttcgctacttaagaaggagcaagaactgcttgttgctgaagaaaaaattgccagcaaggaatctgtgagttaccattcatacttagttaccattcaaccaaccttgtagttaccattcatactttaagttttgtgttcatttgtttgctagatttaatgaaaatgctttttaactttcaatacaggaactaattcagaacgtcttagcgaatcaagaagttatcctgaggaaaagaaaatctgatgtggaagctgaattggaatgtaagagcaaatcggtggaagttgaaattgagagcaagagacgggcttgggaattaagggaggttgatatcaagcagagggaagacctagttggtgaaaaagaacatgacttggaagttcaatcaagagcattggcagagaaagaaaaagatataacagagaagtcttttaaccttgatgagaaagagaagaatttggttgctacagaggaagatattaaccgtaagactactatgctggaggatgagaaggaacggcttagaaaattggacctggagctgcagcagtctttgacgtcattagaagacaagagaaaacgggttgattctgcaacacaaaaacttgaagccttgaagagtgagacaagcgaattatctactctggagatgaaacttaaggaggaattagatgatttgagggcccaaaagcttgaaatgctggctgaagctgatagattgaaggtggagaaagctaaatttgaggctgagtgggaacacattgatgtgaaaagggaagagttaagaaaagaagcagagtatataactcggcaaagagaggctttttcaatgtatctcaaggacgagcgtgataacatcaaagaggaaagagatgcattgagaaatcagcacaaaaacgatgtggagtcgctaaaccgagagcgtgaagaattcatgaataagatggtggaggaacattctgaatggcttagcaagatacagcgtgagcgtgctgacttcttgttgggcattgagatgcagaaacgagagttggagtattgcatcgaaaacaaacgagaagaattggaaaattcttcaagggatagagaaaaggcttttgagcaagagaagaagttagaagaggagcgtatacagtcgcttaaggaaatggcagagaaagagttagaacatgtccaagtggaactaaagaggttggatgctgagaggttggagatcaaattggatcgtgaaagaagagagagggagtgggcagagttaaaggattcggttgaggagctaaaggtgcaacgagaaaaactagagacgcaaaggcatatgcttcgtgctgaaagagatgaaatccgacatgagattgaagaactgaagaaattagagaatctgaaagttgcattagatgatatgtccatggctaaaatgcagctgtccaatttagagcgtagctgggaaaaggtttctgctttgaagcagaaggttgtgtctcgggatgatgaacttgacctgcaaaatggagtcagcactgtgagtaatagcgaagatggctacaactcttcaatggaaagacagaacggcttaaccccttcatctgccactccattttcatggataaaacgatgtactaatctgattttcaagacttctccagagaaatccaccctaatgcatcattatgaagaagaaggaggagtgccttcagaaaagttgaagctagaatcgtcgagaagagaagaaaaggcttacactgagggactgtctattgcggttgaaagacttgaagcaggaaggaaaagaagaggtaacacatctggagatgagactagcgaaccaagcaataacaaaaagaggaaacatgatgttacccaaaaatattctgatgaagctgatacccagaggtaaagtctgatcattcaatattaaattttacacatttgttttcttgtttttacatcaattttaaaatctgaatcttacatcttctttttctcagtgtcatatcaagcccgcaaaatgtgcctgaggacaaacatgaactaccatcaagccaaacccagacgccaagtggtatggtagtcatcagtgaaaccgttaagatcacaagagtaacgtgtgagacagaggtgaccaacaaagtcacaacccttgactgctcagaaagtccttcggaagcagggagaaagatgggagaggagacagaagatggtgattgcaatcaggtagttttcatgaactctttaaagaagaattgcctgcaaactttacaacagatgaataataccctttggctatttctgtagactgggataaacgcgtctgaaacagtgattcataatgaagctgcaacagaagatatatgcacataaggtacgtctcagtcttcaccagataactaacccccacatatgttgtcaaagtcactaacaagagtagttgtttcttgtctgttgatgcagaaactctatgaatccttttgggcttggtttctagagaagataagggtatgtaaatggatttgattgattttaaaactcgatcggtcgatgtgataatcatagtcagttttttttttttcttccagatttcgagtgagtagtgttggttagttaaggtagggtagggaaaaatcgttggcttctagtgtgttgcagtgtgtgtatttgagaatatatgatttgtgagactaaaaagccgaaatcattatcggggtttattgtttcttctacttgtaatgatgttgatgattgatgtcttttagctcatcggttagtaagtgtcaacagcaagagtgttcggctggactaccgtggcccattctgtagatttctttctagcccggcccacaacttccattgggctagatatgtttttctcacgtaaaagatatctgactgtcgatattgaagtaacttcttaaaacatttagatttaattgataatttaaatgtcacttttggttttttagatgacgattaaaatccttttcataacccaaaatattagttttgccgatattagaaatccgaagaaaatgacagaaaataggattaatcaatttagggtttaataaaaaatagtgagtgagagagaggctacagtgctccacattgacatcaacaaggttgaagaagaacaacatcattcaacatcagcatcacgaatattttcgagtcatggagagaagcgccgttgcctcaggttttcatagaaattacatcctctgtgcttcacgcgccgccacttccacgacgcgcctccactctttgtcctccctcagaaactttccctcttcctctctcagggtaattaaaaaaaatatcacttcttccgaaaactcatgttttatgaacaaaatctgattcgaatattctgattcttgtagattcgtcactgtccttctcccatctcttccaatttcatcgttagtgaagtttcccgaaaccgacgatgcgacgccgtttcttccaggtttgacttcttcgatctcaatggaaacaacgacagaatcagttttagttgacttgaattcgtacttgcgttgtgtttacaattctgtgattttgtgacttttgggtgcagcaccaccgatgtgactgaattagccgaaattgattgggacaagattgattttgggcttaaaccaacggattacatgtacgccatgaaatgtagccgtgatggtgaattctctcaaggtcaattgcaaccttttggtaacattgacattaacccagcagctggtgttctcaactatggacaagtaagtatatttctctaagtcatcacctttataactgatctatggaagtttgactatacctaacttgatctatacaagttgaattgtagaagttctgatactttgttttgttattatagtgatgccttgtatttgtgtgtgtagggtttgtttgaaggtctaaaagcttacagaaaacaagatgggaatattctactcttccgtcctgaggagaatgcgatccgaatgagaaatggcgctgaaagaatgtgtatgccttctccaaccgttgaacagtttgttgaggctgtgaaaactactgtattagctaacaaacgctgggtaatttggataaggcttttgaatttgtttcttttatgtgtttgtgttacatcattctacgattgatcgtcttttgtttgttacagattccacctccaggtaaaggatcattatacataaggccattgctaatgggaactggagctgttcttggtcttgctcctgctcctgaatacactttccttatctttgtttcacctgtcgggaactacttcaaggttttttttttttttttgtagttggtctgatgcgatatctgtaatcatcatttcgttttctgagtctgatatatcttttacaggaaggtgttgcgccgatcaacttaattgttgaaactgaattccatcgtgcaactcccggcggtactggaggtgttaaaaccatcggtaattatgctgcagtaagtacaaagctgaaagcttgtttcaaattttattctcctctgttctcaaaagcttaactaatcatcaataattttaggtcttgaaggctcagtcgattgcgaaagctaaagggtattctgatgttttataccttgattgccttcacaaaagatatcttgaggaggtttcatcgtgcaatattttcattgtgaaggtaaaatcaaagatcatcttttcgttggaacatctaaagtttcttgctggaaacgaaattctttgtttacttggattgggctcttcttgtgcaggataatgtgatatctactcctgaaattaaaggaaccatcttgcctggaattacccggaagagtatcatcgaagtagctcgtagccaaggtttcaaggtaaaatccaaattcccttcttcaaatttttggcaacagtcttgatcaagtatgtcagaaaactgaggaacttgagttacggactgcaaatacttcatggttttgtaagtttaacaaaatttcggtttaagagtccttaattctgattttcaggtggaggaacgaaatgtgacagttgatgaattggtagaagcagacgaggttttctgcacaggaaccgccgttgttttatctccggttggaagcatcacttacaaaagccaaaggtacaagaccttttcttttaccagttaacaactatagctaatgaatcacaaagtttacactaagaatcttttccgaaaaatcttgataggttttcttatggagaagatggctttggaacagtctcgaaacaactctacacttccttgacgagcctgcaaatgggtctgagcgaagataacatgaactggactgttcaattgagttaaaaccagtcacgaacatatcaatattatacatatggatgtgttagtagatacagaagatatattagaattccatgcttctgatgcttcaagattctgatacttgaaactataaacaataatctgtctttaaaataactaaaacggggaataaaaagctagttctagcacgaatgctattcaagtacatgtacgcaactttttttttaataggctttgcaaaactcatacacaaactaccaaaaacctctattcagattgagttcagattctagtcagactaaagtgtgtaaaaatagttctgtctttatcacatctttggtattgttttgtgaatgaattttgctagcatcagaaagctacggcgaagaattggaaacaatattgcgtgtgaaatgagaaaaagaactcggcactgatttgtggctttttatttgcttaatgagtgacagcttcttctacatgcaacttgacgtgtacttattttaatcatatactaattattatttggttacccaaaatctaatctaaaaatcccactatctttgtttttggaccgacacatttccctcctatcctccttcaaaaccttatttctgaaaaataatctccaaggaatccaatccaattgtgtttctgtgtgttttccgatattttaaaaaactatgctttatactatttttgagaggatattattgaactcattaagcttccagcgacaagaggagacgtggagctttttcttgtaaaaagatgtaatgattatctcatgattacgatataataacatattttaggttaaactatttcaaagtttagtgtaactaaaggattgtgtacatttgtcacgagattcatatcatgaactcactttttttttttttttttatctttagaatacttccaaaaagaaaaagtaaatggatcctaaaaaagtatgagatgaatatagaatcatagaagagagcatagatgccttgagatgcatattacaatgaccttcctcttctctgcctttaccttttgacttactattctttttctcgctttttgcactcattttcgtttttaagttgtttgtttatgaataattggattttagtcaatcatgtgtcttttcatctaaaagattttacaaactgatatcatttatttacagataatatatgattcgaattcgaatccatatgattttatctcggatagatttccaaagtcattgggttaataattgaattaaaaattttaaacatgattttcttggtatcaaacccaatataacataacttttaagatgactatgttatattaattcaatacgtcctaagtaaattacaaactacaaacacaagtcttggttattactgagatataaagacaagcagaagaaaaagagttatatattgagaaaaaatgaatgtattaattaacgtaaatgcatgtatatgcatggtaaataggcgataacattataataagttcaataatacaaactttataagagtttattgaatttttgttgggaaaattgaaaaagaagggatggcctacgatgcaaagaccaattcctgtttcctactagtgttgttgaaatctgaatacacattttgtcatgttgattagtgattacccttagcttcaaagttcaaattaactttacactaacttttccataagtaaagatattttattcatgacgatacatattttattctacaaaaacatataaacagtgcattgtacctcaataatttgaagactttatatttttccaagtgctttgacttttaactctttattaaccatcaggagacaagtcaacctttatttccctctagaagcctttggctaatttattaaacttaaaaacgaaccaattaaaagttacaattcataattatttttgtttatgattttttcactattattaataggctattcgcatgtatattcaatcgtatttcacttgttttgcaaggaactaaattataataaacaatacacccaaattgaccaacttatcttacacaaaagattaagagcatacgtttatagaagaaggtccaaaaaattgtgacgccatttaataagaggtatagtgggttttcttgttccttaatctcagctgccgtggaaaataagtgttagtagtaaatttattgaattaaattataatagttagatttgtaacatccctatcaaatctttgattaaaatttgattttgggtccatgggacaggcgtcattaggttcaattttaatactgcatgattattaagtggctacatttataaatgaattaaacaaacccatctatcaattcagtattgtcaccgtgagtttgaaactttgtcattttataagttataatccgttatattttattacaattttttctcttaaggagattaataatagataaaatcgtacctgatccagaaaagttttaatatccataaatttgttagtggtaaattttctccgagggttggcaaaattttgttcaccaaccgtaacggaatttacactcacaaatttcaatatctctaccttcttttcatctcttttggtacatatcattaactcctttccttttcaaaagacaaatgtatattaaatagcaagtgattcaccatccaccaaatgtgatcttctgattagtgatatttctttagacaatttaattgatggatttgaaaggaaaaaaactttgatatatatagtatgaagaagtttctttgtatttatccaagaactgttagttcaatcacttgcgctttgtttacgaatgattaatgacgttaactattcaaatacgatgctactctgttgttgaattcatgcgctttgttttcgtctttgatttttaataaatttacatgttcaatacaaatatcttttttattggtataacaaagaaccatgataagactgatacataaaataagatgttgtcatgttcttatttaactactatatacttatattgatcatgctcaatgggagtttgtgtatataaaaataaatttagaatttttctttgtttttttttttttgggcaaaagaatttttctttgttaattcacacatttccatcaccaaacattcgaagtatttgtctctatctcgacaacatttatatatatttttttcttttttttgaacacgactcgacaacatataatacactcctttgtactgtatactacaaaataaactactaaacaatattgactctataatatataatttatatatacatacaatacaagtctaattcaatcacttttggttcaaattggaaaaacattgaattcttctattattcttgatgaccaagtctatatcacatgtaataaaagtacacataaccggtctttctttcttattcgtaagctgccatgcaagtggggcttcaagctttcgtaaaatctctcatgtattccacattattaatcgaatttaaagtattttgcatgttatttagattagaaatgtcgttttcttaatcacactcctaaactgcggatcagatataatcaccaagattaaataatataaaaatataatcactacttgccaagacatgaatcatgaggaaagttctatagcgtgtactaacatacaataaatcatatttatgcgtatacatttactagaaccataggatcgatgaatcagatgcaactcatgcagtcatattacaatatatatttagatatgttcatcttgatctttcaacttaaaactcgttcatattcatcatttaaaaaaatatatatatgaatgtaaaaaaatggtaatttaaaattagatgagaatggggaacaaattaatcaccaaacaaaaaaaacggaatagagtaaggaagagagaaagagtcaatgagtgggggcggctaagaaaacattataagtttataacttatgagttttatgattaggaaaattataataaaacttgttgtcgaatagtaaaattataagaaaactaagatattatttctcagtcaaattataaatgatattgaatatctagattctgatgtaggagcaaagacaaaggagaaaaacattagtctccccccttctctgtcatttcttaactctactaatattttatcacataatttatcatccaattttccaattccataaagtcactttttgattcaattttattttaattccctatactttattgacatcttccatcacatgaaggactatctcctccagctattatatactctctctctctctcctttattttttctcaattcacatataattttcacctttacacacatttccatgtaagtatatataaacctcacacacgcattatcatacaccatcctcctcattctcttcatcatcaacataagagagagagaagaaaaaaagaattacaattaataagaacaagatcaagaatcaagaatcaagaaaatgggaagagcaccgtgttgtgataaggccaacgtgaagaaagggccttggtctcctgaggaagacgccaaactcaaagattacatcgagaatagtggcacaggaggcaactggattgctttgcctcagaaaattggtatgtattacttaaaactcacttttgatttaaaattggcactgagagtttccaaatagtactttgagaccgtggtcgtgttaaatttgtgtgttgatgatatttatttacatggtataggtttaaggagatgtgggaagagttgcaggctaaggtggctcaactatttgagaccaaacatcaaacatggtggcttctccgaggaagaagacaacatcatttgtaacctctatgttactattggtagcaggtactatatacttacatatatatcatcatatgcatggatgaatattattaattgacacacttattcttgacttagagactcactatgtatctttgtttaattctaggtggtctataattgctgcacaattgccgggaagaaccgacaacgatatcaaaaactattggaacacgaggctgaagaagaagcttctgaacaaacaaaggaaagagttccaagaagcgcgaatgaagcaagagatggtgatgatgaaaaggcaacaacaaggacaaggacaaggtcaaagtaatggtagtacggatctttatcttaacaacatgtttggatcatcaccatggccattactaccacaacttcctcctccacatcatcaaatacctcttggaatgatggaaccaacaagctgtaactactaccaaacgacaccgtcttgtaacctagaacaaaagccattgatcacactcaagaacatggtcaagattgaagaagaacaggaaaggacaaaccctgatcatcatcatcaagattctgtcacaaacccttttgatttctctttctctcagcttttgttagatcccaattactatctgggatcaggagggggaggagaaggagattttgctatcatgagcagcagcacaaactcaccattaccaaacacaagtagtgatcaacatccaagtcaacagcaagagattcttcaatggtttgggagcagtaactttcagacagaagcaatcaacgatatgttcataaacaacaacaacaacatagtgaatcttgagaccatcgagaacacaaaagtctatggagacgcctcagtagccggagccgctgtccgagcagctttgggcggagggacaacgagtacatcggcggatcaaagtacaataagttgggaggatataacttctctagttaattccgaagatgcaagttacttcaatgcgccaaatcatgtgtaacattttgtttaaaactttatttgtacttaaatacataaagaggggttttctattttgtataaatctgtgtctttagggagtggtagaaaagttttatggattgagattagtattcatgcagaaatttgtttattttagtttcaacttagctttattcgaacaacttatatgatattttttcgagtttttccttcattgttcttgcttttataaatgtgaagagattctatcattctaccttttagcttcttcttttgtcccttaattaattaggtctttatatattttataatctttgcaaatttacatctgacacataaaaagaaggaaacgactatgaatctaaatttaagagcctaaaagaggatcgtcttttaaacgcacaaacatcgatcaccaattacattaagggaactaaataatttataatccttcaatttcttattgaaaagttcgtttattttaatgttaacagtattatttttttacatatatatatataagacatagttctctaaatatactattaaacagtaattgttaggtgcctatagtaatggagaatccaaggatgattttctgccctgtttcttattcaactccacttgagtatatgtatatgcgttaatcttcagtcaaattttgccaaaccaagaaatacataatcagctctctttattttccttttttttaaaaacaaaatttaactattaactgacttgggagacttcagttaaatttgtagttgaattatcatagaaataagttataattgtcgaccaacaaaaagaattcataaattaagtaaaaagaatggtgcaatatggacacgtacatggtcggatctatatggcttcgtctgatcagagatactccgacaaacactcgaatacacatatgtgtgtgtatgcacaactatataggttaattatcaattatttttcttacataattagtattaaattaatttaaagatatcttttcccggttcaataggactaatactacttggatctctccgggtggctatgcacaatgtcgctggaaaccattaatgtcttaacaataattaatatatgaaaccatttctcatgtacgtatagattgttaatcaataattagaaataaataaataaatacctaacaaaatgaagaagagttgtcttaccaattcaacgaaggtgtacgtagagcttcgaaactctctctagtcagtttgggaatttgaagatcacagaatcaaatgatgtcactcaaatttctctttttcctgtttgagtttggcacatatctttgcccattcaaacctccaaataaaatcatttcatttctaccatttttatttggagtgacaaaaatcatgcttatcgttcatcattgtttgattaatttaccaaatttaaaagcaaaaatatcatcatcattgtttgattaaaaatgttctacgtactatatcgtctagtgacgataaacctacaaacgaaaagataaagctccgattcttatcgttccgaggcaaagccttacatatatacctcttggagaaaacgcaaccgtgcattaggcacatctcattcaaatagaaatagttccatcattttcaagactttgttagttcaattgttcaaagttttcgtagaggatttttaattttaattttggttcgaattgttacagttctctatctttgttttctgttgtacttcttgttttcttcgttaggaattttttcgtttctatttatggttttacttttacgatagttatgtttcttttatagttcaaaaaaattagccagacaaataatttaatttcaatattttacgtttggagacggcgcaacattcgtattctaacattgactttaaaaaggctacatatataaaagatgggtttatcaaacccacttagagaaatacaataatactatactataaatatacggagatgtaaatttcaatagttcacatgatctaacgtatttgacactaacatggtgttcacattgtatacttacgtaactatgtaatcttttctgtgacatattatcaattcacgatcgttaaaaatttgtgtacatgttagagtataaagaagattttatgttgttcaaatttatgtagacatgatggactaattgcacacatataaaaaaaaaaaggtaatgatataagctaaggacccgttaaccaaacaaataatgtctaacagtccaatatatatgtaaaactcttatatctttttggatttttatttccagaaaatgacattatatttttggttttgttagacgtgctttgattgatagtaggctactatacacaaatatataatataaatataattaagaagaagaatgttttttgttaatctcagttttgtacgtacatacgcttaaggacaatagaagaaaagggtgttatcaaaagaataattgaaaaactagctagtctctgaatgacaagtcattttgtatgttccaaacattctctacaaacagaaaaacgacaaatcttatggaattatcctcctctaataaatatataaattaaatccacaattaggataaaagataattaattaacaaaatcgtaatctagggaggaaaattaggagattctagagttagtgatatgaagattatgtatgtaagcacttgcatcagtggatggcaggacgtgtcttgaccatggacttacatgctatacttagtttagccgtataacttttatagtttttattaaagcatttctcatctacctacctaaataccctatcatctaaactttgttaaagatttaagagctctagtaatacaacctaaaaaaaaagaatcatgtatagaattttagtttccacattggccactatttataagtttaagtgaaaagaatgagtttcatattttatggattgaaaatttagaaaactttataacttcttgggtcaaggtaaagcattatatgaaaagaaggaaaaaggaataactatcgctgagaagaaatcaaggaacaaaacgatatatgaacgagagactataatagatatgcgaataatatggattcacttgtgattaataatataatgcattgattaatggtacattctgtcaaacctctagacgataagtaaaacaacaccatataaaaccttgattagcctcgcgacaattcgccccgcgacgacatttttgtaatatttaatgatataatttctttgtttaaccattaaaattggaccattgtcaaaaaggaaccaacgtacttaataattatatttttttatataatgcagctgatgctgacactcactaacacgttaatattattaaccttgattttttttttttgttcttttataataatagttatctttttcaactttgtgattcagttttctgtccgtttaaaagttaggaaatttgtttttatcataaaataatgaaaatgtttgattgtggaaatgggagtaatgtcgcgtccgtctgattttctttttgtttttgtgttttaactttttacatatttaaatttataatactgcttgcttccgttacgtagatgatttggcaatttcttgttatctgcttatgggaaaaagatagatacaggaatatgtccgctactttatatttgtcaactttaaaaataatatttatatatatatatatatatatatatatttatatatcactgattattttcgcaatatcggttttgattatttagtttttgtttttttttgggtcaaaggtaattagattccaactctttctttgcttcaaaaagacttgtaaggcccaataaagcccatttttgagggaaacatatggcaatggcacgtctagtaaggccccgtaaaagcccatttgttacgatttagaaaggaaaattattaatttaccaatcttggttcttggctttgaattagataactaagcattatatgacactaattacttaggctgaaaggcaggacgagccgactaaaattattatctttgaaaaaggaactatatttaaaagtcaaataataataataattaaaaagagagattaatttgggtaaacaatgttcgaaaagatgggaagaagaggatgaacattgataaactccatgagaattaataaatcgactttatattataattgaagacggtgcatctaagccaaagaaacaaatctttgcgtgatttgataattgtctcttacgtaacatatgtgcgatgaatcttcttaatcgtgcacatattaagtggatgtatgtacgaagcacatcattaatttaagttctatcgttctaattatagttataaagatatattcgtatatatatataaatagctagtgacttctcgattcataagctatgcatcaagtacgagaaaaactaacgtgacccacatggtatattagagaatactataatatatgaaaaaatttaattctgaaaatttccccataatgttatgttatgtatggatcaagtatgtatgtgtaacgtaagtagcaatgccatgcgtagatgacccctcatgcatacatgaagaacatcaaaggggtcctggcatataattgatgtaatttgaattccaaattatatgtccaatcggtcgaagtcaaatatggagtaaaaaacaaatcgttacaattcatttgtttgttatgcatatataaatatgattactataggtgtatgcataagagatgttatatgtttctgtgtcatggcatgtgcagttatatggcctcactcgtgaagcccacgtgactgaaattttggttcaaacttgacatgcatatgtacataacttccataatctatatctactttacaatacgttgataaagataaacttccataatctatatctacttttagaactgggtaaaacaatattttaaacatttttacaagaaaacgtattcttacattaccaactatatgattagtatgtggcaccagttgacgtaacaatttatggaatgataatatcaaatatcattccaatgtcgcttattatagtagcaagtagactacgaccatgacaatgacgaaaattttctggtacaacgacttcataatgtcagtttgtatagttatggtcggtcatatgcaataaagacttttaagtagaatattacttaatcagtattactcattcacggattctcaaatccaaccaaattctcaatctcttatttttcaaagtacgtactgctactacatatctctgttaagtttttataatcgaattgttaattaattgagacagatttttggggactcaaccaccacattaatgctgttcacatgtaaggatcatttgccgttacggccggtatagccgcgtatcatgctaaaattaaaacaaaatcggttactaaagttgtattatatatttcgtagtctactcttcgtagtaccaacaaagctcatggcacttttttagttttttttttatgtgataggcttagcataataacatttgaccggtatcttatatcttatactataatgattagcctatgatgatatgacactttatcctctactttatccctcgggaaataatttcacaagaaaaaaaaaatggttataaagacttttctctttaaatgattggagccttttcatcctcaaatttttgaaaattattgatttcgatgattggaattgtaatgtataaatctataatcattgtaatcattgggacatatcctccttaacatatatatcaatcaaccatggctctcgatatacagatttcggtttctcataagttgctcatttttttcttataattacgttaatcctgatagagtaagttttgattatacaaaaaaaaaatgtggatttcgttgtaaacttgtaattttagttcaaatatgtgacgtgaacattcttacgcaatgcaacgtacctattcaaagctcaaaactttactgccgtagaacgctagaagctacctttaccccgaaattgttaatgggttttagtcgatttttaactaaattatttaggcttcatcgaatattttcgacaagtagatcataccttctctcttgattcacctaagtggaaaacctttgactttccccttttgctttctcagttgaccaattcgacaattcccgccatattaccatataatgattaattaattagttaattgacattaaattaagcctccttttgatatgcctcaactaacgtccttaaccaacaacgttaacacgatctttatagccttatagtcagaggagaattctcacaacaaactcaaaaactataccaaatgatagagcataaaattaaagaaacccatatttataaaacaaaatatatataaactaaaaagagtgaattacatttttatatatgggtacaatacacacaaacgtttcactaaaattacaacgggatatatatttatttatatatatagccactgcaaatccacattcggattgagtgcattaaaaacatataataacacatagtaacaattttacacccgaaaaattgcataaattaaagactcacccaaacattaaaaaaaatattacatatataatgatatgattatagatatcttggaaaattaaaaatactttcccaaaatataaaaaatgaaggaaataaagaagaagaaaaaaccgtgaagttttcttttgttcgtcgtctcaaacttagggagatgaataatttcatcgttcatcaggtacacgatcggtccatgaaacccggaaaacccagttagagactgtcttcttcctcaaactcttgagcctttcatggctgcttcttgatatcattcgtccacagtctgtggattctacgaaagttttgagcctcttcaaggccaaatcgagtgtgtcctcgctcatattagcgaaacaaaccctaaaccaacccggttcggtgcagtgacatgaagaaccgggtgatatgtttagtttcacgttgtaaacaatctttttccagaggtcaagctctgcttcaaatgtgtttgtgtccaaaaggtgtctcatgtcgacccaacagaacaaacccgcgttgcttctcaggcaagtaatccctgcagactcaagaccagacacgaggcgtctctgtctggacttgagtcgtttctggttctcttcgaggtattggctagtgaacttcttgtcggagagcaatgcagagagaaggtattgtgtctgagaagaaacaagaccaaaacttgacatttttgtagctgctgaaacgatcatttcgtcgttggagtagatcgctcccacacggaaaccaggaagtcccagatctttagaaaggctataaacgacgtggactcgttttgaaacctccgtgtcttcgagtttcttgtctttcaagacatccattacgcttatgaactgttcaaacccgaacatagtgcctgaatagatctcgtcgctaatgagatgaatgttcttggaagtgatgaagtcaacgagaaggttaagttcacgtctggtcaacgcagtgccaagtgggttagatggattcgtgacaagaactcctttgactttgagatcaagtttctgggcttgttggtaagcttgttgcagagctgattccgtgatttggaagccattagagcttgagcagtgaatgggtactatctctgctccggttctccatttaagatc

SEQ ID NO: 969 - DNA, 118086 bp, Arabidopsis thaliana
gaattcattgcctatcaatagccattgataacatactctataaattaaaaatactaagaattcaaaaataaactagcaattaattgtagaactaaaactagttgagtgaatcatacttttgttaataacacataattaagattgaatccgtgtgatatttgaaaacttggttggaatatcaaaattctgcatttctggcagagtactcaactccaacaaaaacaacacatgggtctcagatctctctgctgacactcccatcaattttcgcttattaaaatttatcttcatttagttaaatttgtagtattaataaaagttaacaacattcattaataccgaagattaggaacgaaaagagagacgtggaaggatataagtggtgacagagcagtcaaagacaaccgagacacgatcgaggcgtacagtcaaagcaacacacactgtcatatggtcaaacgtctagctggatcttttgcatgtagtggaccccatacttctttatttacactttttcttttttctttttcgtgccaatctaggaaataaacttactaaaaattgaaaaatatgttcttacagagaaaaaattgttgttattcttctaattaagtgggagtaatactacggatttgtttaagcaaatatgttccatttcaatagtatgaaacgagaaagagtaatgcttttgtttttccatgtatttactcattactgcaattattcttcatagtttctagaatatatagactgtaaagaaaagtgtttataaaaaacgagatttttagatttttgtttgaaaaaatagagaattgtttatagcaatgataatgatgattcaaataaaaggttaatgaagtaattaggccttgaaatgaacgtcgcacgtgaccctaacctgtcctcgtgggtatttgtagtttacttagcagctttttttacttacgtgcgggattttctttgctcatcgtctaaaagaccataatacccccttcatctatttttcttcttaatttactgagataatactttattgtttttgacaacacatcgatttcagtagcaaaaattaaagggaagacccaagagagtgctcttttaagcaacatgatatttcaatggaacacaaaatcaatatgaagatttattatttggtctaaaaatatttaaaaaaaaaacacctcaattttttttttagctaaagatgggtacatatgggtcaagccaaggacaaaatgggtatttaacctcaggatctgagcttgcacgtgtggcgcatgggtcgagagatgagttgataaccggctatagcctgtaaaaatctcggtcaacataatctgtgtttttttttgggtttttgtctgctttttagttttttcccagcaaaaagagtgaaaaagagaaaatctttggtccaaaccaaaagaaacgttccctttttttaatttgtctctttgctttaataatttccttctcaccgaaacacacaccacaaccaattctcttctccttcttcctctttcacaaattcgtcatctgggtattcttaaatttctcacaaattcatttacttttttgttctgttccgagatttcaaggttcactatcgattctgaaactcttggaacaatccagattcttggttagcaggtggggaagcattaatcatgtatttatgatacactgctccattattattacgagagagttgaaagtttcctttttgactcgtttttaaaggcaaggaagaagaaagactttgtttttaaaatgccaatgtttcagccttctaagaacggtgggtttgatgggcatatcttagatctacactcggcggttaaagacggtgttcttggcggcggagatgggaaatttctggtggttgttaccgatgagaagaagaaattggatttgaaggagatgatttctgagctggaattacctgaaataccctctgttttcatctgtcctatctctctagagccgatgcaagatccagtgaccttgtgtactggtcaaacctacgagaggtccaacattctcaaatggttcaatatagggcattgtacttgcccaacgacgatgcaagagctttgggatgatttggtcactcctaacaagactcttcaccaattgatctacacttggttttcacagaagtatgttttgatgaagaaacgatctgaagatgtgcaaggacgtgctattgagattctgggtacgttgagaaaggctaaagggaaagcaaaggttcatgctttaagcgagcttaagcaagttgtgatggctcacgctattgctaagaagactgttgttgatgaaggtggagtctttgtgatctcttctcttttaagtccttttacttctcacgctgttggatctgaggctatagctattcttgttaatcttgagcttgactctgattccaaagctggattgatgcaaccagctagggtctcgttgatggttgatatgttgaatgatggttcgattgaaactaagatcaattgtgctagattgattggaaggttggtggaggagaaaggttttagagcagagcttgtttctagtcatagtttgcttgttggattaatgagattggttaaagataggagacgaagaaacggcgtttcgcctgcgttaacgctgctcaaatcggtttctgttcataaacaagttaggaacttgttggttaggattggtgcagttcctcaattggttgatgttttgccatgtttggatgtggagtgtttagagtcagctcttttcgtgttggattcgttatgtttagaaagcgaaggcagaattgctttgaaagattcggttaacacgattccgcataccgttaggttactgatgaaggtatcagagaaatgcacaaactatgcgatatcgattctttggtcagtttgcaaattagcttctgaagaatgttcatctcttgctgttgaagttggtttggctgcaaagcttttgcttgtgatacaaagtggatgtgatccagctttgaagcaacgttcagctgagctattgaagttatgtagtctacattattcagactcaatgtttatctccaaatgtaaactcacaagaactatccaataaaagactgatcaagttttcacctttcgggtcaaaatcacacaacggatctgccccatcttgttgatgtatatagaaatgaagaagctcaaggagtatgagagtaagaaacgagtttcgatgtgttgaattctattttgcaatgttatttgaataataatagttaagtagaagtaaactgtataaatctttttgttgtggttggttcattattcagtagaagaatagattgaagaaaggaatcatttttttggcctcttgtaagttactagctgtttgtgagtcataataattggagaaattattgatctatgaatcgttttatttgacactcttataacccttagtgattcttgatagaacagtaggattagaaaacagatatgggtgggtttcagatttgtggaggggaataaaagtcttattttttgaacatgcattggtctgatttgtatgcactgtgtaaatgaatgaacaattgaaaagaaaggatgatttgacttatgaatcgtttcaacagttcactgtttgtttatctctgttttttatttaattggctatgagaatctgaacatatctcttggaaacattgtatcagtgagtgtgatgtcactgatgtgagagctcttgtctggaaataaaatctaaacacagttaccaaatctggaaaacaatttgtctcaagttagaaaaaataaaatataaataatttcccgaataggagctatcttaagatgggccttagttgaactatatgggctattatccaggtccagtaatattttgacagtcaatacaaaatgtcgtctttggctctaaattggattaagctattaagtaagataaagattacaatatttaaattagatattgatttagacggagatttcattatctatctctcaagtttgatttgcttctgctgtaacaaaaagatcacgatcgcaacttgtgtgtatgtgtgtgtgagagagagattcagatatggcttggttagctagatccatagcgaactcactcaagctcgatgaggaagatgaagatgatgataagcatctgaatcaacagccgtcggaatctgtatcggattcacagtctccacgaggcgttaaggaagacattagcgaacttaccaagaccttgagaacccaattttggggtgtagcttcgttcctctcgcaaccttcttcatctccggatcttcaggagagaaatcaaactcccgatcatccggaggaagatgaggatctaatcgctgggattaagaacgatttcgctgagattggtgggagattcaggactgggatttcgaaactatctgggaacttacctgtgtctgagttcacaaagatcgcttcgaatttcttacaattgagttcagaagatgtggatccgaaagattacgacgtaatcggagttacagaggaattagttgcgtttgtgaaggatcttgcgatgcatcctgagacttggttggattttcctttacctgatgacgacgatagctttgatggtaagttttagtttcagatctttccttatatatctgaaattgtttctgtgaatagtgaagttcaagtttgattttgttttcagtttatatgctttcatgattggggtattgggtgtttcagttattctcaattgtctgtttttaaatcaattttcagactttgaattggccgatgctcaatacgagcacgctttagctgtagaaaggctagcaccgagcttggcttctttgaggattgagctttgccctgaatatatgactgagaattgcttctggaggatttactttgttcttgtgcatcctaaactcagtaaagaccatgccttgcttctctccactcctcaggtaagtttggattctcaactccattgcttacaaatgtctacctatttccttgttttcaagtttatgcctttcacattgtatatagttgtaaccctatgcctgatgctaatcatactcttctagaaagttatatggtaatccaaaacagtgatcctcataagtgaagagttgtagcatgtcaatcaggtttgctagatttgtaagcttctaggtggtgctacttcaggtttcctgcgataaagttagatcatttattgttcctgtcactaattttttttgcctttgcttatgaaggtactcgaagcaagatcaatgttatctcaggaactacagaaacgaagcaaattacctgtagaagcagggagttctgaagctaatactgtcattgtggaacctcttactgtgcctccttcaccagaaacagcagctgttaaaatcgtaaatccagtcgagtcatctgacgttgaaacagacaagcaccctattgagagcaaagagatacaaattgttgacaaatctgtcattgaagaaagaagcacatccactgcttcttcatctagatttattaatgtgcaagtggatgatgaagacgacgacgatgcagatgattggttgaatgatgaagagacttcatcagttagcgccattggaggaagatcaaccacaaatcatccttttggtgaagacgaagaagatgtatcattcagtgatctagaagaagaagacgataacgaaggagacgtgaaagtgagttacaagaaccttactaactctggttctgattcttcagacaaaaaatcaccagattgggttcagctaaaagaggtaaaagagaagaaaaaatcaaacgactggcttgatgttgatgcagtgtgatgtgatctccaatgtttcttttggcaatatataacatttaaatctacgtcttgcaaatatctgatgctaccgaaatttgttgtgaataatttttatattccattttatcaaaacctatatagccgtagtaaaaaaaactgcaatgtttatatataagaccaagtttattcgcaaaacaaaatgatcaatatttctaagtaacggggacaaaactggtatctcgtctgatatctctggaaacagcttaagacaacacaatcgtaaatgaatccaaaaataagatacaacattcgttaaaaggcatgtgccatactactaagtatgacgttgtttgtgcaactgtatttttagtacctctcgaacttgcttttaccgccgggtctaccaccaccacgacctctcttaaacttattaaccggttctctcttacttctgtaccctcctcgatctatcttcagagcaactttgggaggatctgagaaaccaaacgaagtcgcaacctcctgcacataaacaaagaccttcggttaacgtttaaattgcagaaaacaaaaacaaattgtattcctgatttcatgacgtttcgtattgttatatgtatgctgcagatttggttaccgtgagattgagttggtgaacattaaagacatctttcatagagtgagaatcatatcctgaaatgtatgtcttgtatgcttcttttgctgactccttcaatgcatagttttcagatatcaaattctcctgcaataacattttaaataaatctctcaacttttgtttcttcagtgtagtaaaacttatttgaaagagcaagaatgttttaccacaaaaggtttcacatcgagcaatttcttttcttcaaattcatgttcctcaacaggaattttcgccgcctgcaaattatacagttggaaacagattcttttatcaaaatttctataatttgaaaaattatcaaagtttttattgaatgaaaataatttaccttgagatactgtataaacttcaactcctgtggagttaggacaagcagagcctttccttttgctccttcaccacgagctgttctaccaactcgatgaatataatcctaaatcaaaagtaacattcaagaatttgagtgatttcttatcccttattcttccgcgtgtttgcataaaaaccctaaattataagcaacataccgttgggttatcaggaggatcatactgcacaatccagtcctaaacaagcagacaataatttgattaaagaccaaccaatccagattattaaaacattaaagttgttaagaaagcataccacatgaggaaaatcaagacctcgggcagcgacattagtacacaacaaaataccggtttccgcctttatgaattgcaaaaatgttggagttcttttgttctggtctatccctccacggatttcaaggcaatcgaatttgatatatcgaaagagctcggcgtggaactttgtcgacttgcatgtagagaaaaacaccataattttctttttcccttggaatctcttcaagaaggtaagtaaaaaaagtaaccgcatcgcacttggcacaacgcaataaccttgctccaagccttcatttgtaacctgcactttccagttttcttataattgaaaaaggcctgttttggtcacaaagtaaattgcgagaaaagataatagaaattgtgttaatagctacctcttttcgtccttcatccacatcaatataaacaggtgaggtaagtgacacccgagcaagatcctcaacctgatggtttaatcaagttccagtaattttaataaactgacactaataaagaattaagtgaaaactatactgattggtaagcagacctttgcgctctgtgtggctgaaaatagtgacgtctgtctagtctgcagcaatacaaaaagacggtttaccattatcaacaacacattgacatgaaacgaaatttacatctctatgattcagaatgttgaggtgacttcactatgcaagccacgagaatacctttggtagaaggttcaaaatcttcttgaggtcttcttcaaagttctgttccaatatcctatcagcctcatccattacaagaaactgcaaattaacgaataaaaaatgttgcattaaatcaataccagtatacccaaaactgaaatcagaaatttgtgtttacctttaagttcttgaaaataaaaccattagtattttcaaggtggtcgagaagtcttccaggggtagctactaataaattaacacctttcgcaagaatctcagcttctgtctttcttttctcaccgccaataacttttcccacagtctgtgaatgatacttaagaagttcttttgccactccataagactgaaacattaatgatgtatagtaagtatcacttttagcatattctacagactatatagaaaattgtgagagaattagaacctgaatagcaagctctcttgttgggcaaataacaagaacaccagttccattgcgaggagtaaacttaacacggtaaagaagctcaacagcaggaataagaaaagctaaggttttaccagaaccggtcctggcagctccaagtacatcttctcccatcatcaatggtggaattgctttagcttgtatctgcaaaagtgttgaaatccaaccaaattccaaactgtaaaaggttgaatctttgctatacaaaaacataaagcttcaattccaaaaacattacctgagtcatgcgtgcaaaacccatctccttgatagatttataagtgttatcagataatgacaatgactcaaacgttttattagtcattatgctagtttcttccaattttttttcttcttccttatcttctacttcttcttcttcagacttcgcttccgtgtccttcctctgtttcttcttcttcttcttcggctcttcttcttctgctatcacttcgtcctcttcgtcattagtatctccacgctgctgtagctttttatttttcttcttcttcttcttcggctcttcttctgctaccgcttcgtcctctccatcatcagtatctccacgcttcttatttttcttcttcttcttcttcttcggttcttcgtcaattaacgcattgttctctttggcatcaccatcttcatgatcgggttcttcttccattgctggctgctttagtttcttagcttcgtctctcgctcttttcttatgcttcttcttcttaatctcttcgttttcggatgaatgttgctccatatccaaattcgccatgttttcttattcgccgccaaatccaaagctcttatcggatttttgattaagaaatcggaattcgtctgaaattcaaaaataagggttttgctacgtattttcttcgaattcgagagtgttctaatgtattactgtttaccgtcacattagggtttataaagatctctctattttcatttcaatatttaaatttcccgtaatgcccttttattgacttgttaattactgtaaagtaattgttctttatccatgccagctgtcaaattcaatagctaaaccaaaccgaaattgggtctacaatttacaatctctcacaacttgaataaaacggtatataatgtttggtctctcatatttgtaaaaaccgaacaaattccagttcaattaagacggtataatgtttggtttgtgagattaagattcattcgaacaaattaagacgataagtaacggttttgattgatagaatcttatctcattagatcacatctaaaaccaataattatacgaatttcaattgaatctgcaaatagtcctagttcatctatatatacaacgatcgataatcacgagaaccagagaggcaaaaaccactaatcaaacacttcacaacgatcttatagacgttgacaacctctctaatttagaccaaaacattctcccaatagacgacttagctttgtcctgctccacactatcactcgtcgaaccaatcctcctcggcatcattccaacccctttaaccgctgacacaaccgctcctcccaattctcgtacaaccgcttcaacctcactaggacccgtctcaccaccattcacatccgtaacataaaacgagccaaccgcaatctcaccttgcgtgcacatctcagctctcgttatcgataaaccgttttctctcacaactctagtcacatccgacaacaaacccatcttgttctctgtccgaatctcgagtttcaatccttgtgaagcacgtctcgaaatcgcagcaaccaaacaatgccttagtctctctctttgcccttccgtttctaacgtgcccccgttcttctttcttatgaaatattcttgctctgcagtggagcctttagctccggcgacggcgtgaaacacaacgaattgtaactctttcaaagcacacaccgtgtcgaaaagtagttttggtctgtctctacacttaacattcaccattgaatagccattacatgcttcgattgtcacgtgtatcctctcgcatcttcctctccacaaagcatcgcacctgtcacatgtatcgaacgaagctaaacaacatttttattttgccattgatgattaattcgtataaattcaagcgcacctgtctccgaaacaatcgcagtcgaagcaattctcgtaatctccttctccgtacattagctcgtgaagtcgtcgctcagtgtgagcccacccgaccggaactcctttagcctcgacgaccctcacgacgacatgagacacatcgccaactatgtgatgggcctccatgactgtatccagatgatcctttacttgggcctttcttattgggtcgataatgggcccaccgttaaacccgtcttctagataaatcaccatagccgctcgctcgtggtgggtccatgcaacagcagccgtcacgtgacatccaatgtcggaaagtacggcagatatttcggatagtagacccggtctattgattccggttatctcaaaggccgtgtgttctgttgacacgtggcgctgttgcacctcccgttttagattactctgcatctcctttgttatacctcccgttctactagaacatattgcctgaatttgtaaaaaccaaaaatcattaaaaatgaaatgtattaatttcacaagtaaactcaagaagctaattagatacgtccaaaagtacccaaaaagaaacataaataaacgaagctgtcacattataagagttggtcatcttagttaatgattttttcggttacttggtaattttatactattttccttaaaaatgattaggtgattattgtactaatgattttaatctcacacctgttgaatgtagagaataaggcttcggtcggtgagcttattcccgagttggtctgtcacgtgaaacactaacaaagagaaatttcaggtgtcatgtgatatatggtccaccatgatgacatgtgaatgatgatgacgatgacgacttaccatccatgaaccattcgccatcagatgagatgtaacatttggagataacgagatcaagatcggctaacacttgaaccatgtccagtaatatcccgtacttgttcgcgctatctacctacatatatcaaccacatgtttaattaaggctaattagtcattatctatgaacttataattaaaaagcatattatcaagagctttttataaccttaataagtgtgcactctgggtcagagtcgttgtctacacaaaccctaattagcgcacaaaaccagtaatatcaagaataatactactttattaaaaaaaaaatatccaacataatgataaaaatattaataaggtactaaccttggaggattgattctctcgacgagtgattcaatctcggaatcaatccgaggctgataagctatttccatcatcttaactatttaattagctctcaaaatccaacctacgtaccaacatgtgtttttttagtcaaagaagaagagagcaacgtatcaaaatttgtttgttataacaaaattgaataataacacgaagtaaacgaggttttaaagatacttaaagagcaatacaacgtttaatattaaacttaacgataaataagaagccgcctatttcttcggttcagaatcaaatctgaaaccacttttaatcaggatgtcagaaatcaaaatcagatgcagattgctcaagatattcaaattctcagctgttttttaaaaccaaaattcgtagttcaaaattcaagagaactatggttgtttatgttagattaatattactctcaacttggaagaatagttgttcgtatagaatcaagaagtcgcattgggaaaagaaaaaaaacactttgattatgaatagagcaattaaaaagcaataaagattcagttcggtctttgaccacacgattaccatagatgagaatctgaatccaaatccgaatcgtcttgaaaaaaccagagagagagtttgtagttttctcaagaatttcaagacgaaaaaggaaaaaagaagacgaaaagagatttacctgagagttgagattctgattcaatagagactaatggaagaagaagaagaatcctaaaaatggagagagagattctatgcaagaaaaatattgtaaatttttattttttacttttgctagaaaagaggagaaatagttatgttggtggacgagaaaaagagaagccgaaactgatgcgaaatcgtatctatctatcaagtacttatcatatctacgcagaaaataattaatacttatacatacactgatacacatgacatatacacgtatgattcattgtctttttttttttttttgggtcaactgtatctcatattttgttttcccatcttttaatacaaatctttactacagtatttgggaaaatcttttaatctctgacacacttaccttataactattaaatgttatgagattttatgataaaagagatataattaatcaaaattaagaaaaattaataaaaaaaggagtattttcctatatatggttgtttccagttctttgtggtattaataggaaatgtaaaatatagaagtccacccttaggatcatggaactacattaccaaaataattattagaaaaagaaaaaaatatataagggaaaagaaaaaagaattgtactttaaccccaaaaaaagactttgtaaattttggaagatgatgatgatgaggtgtattagcgaccaacacgagatttgccacatgtaacggtttaaagccacgtggcaatatgggtggactctagagagacgcgaaggctcgcctcttccgaatcgcaagaatcgagctgtccacgtgtcttacttccatttcaggtgaatttttgttgacaaaacataagtagtattttcacactcgttttttgaaatttcagcaagaacagtaatttgtaggaacccaataatattacatttgatgtataacaatattttaatgtggaccgaccacacacaatagaggcccactactggcatggaagagatcttaacttcacagcctctcatggtgatgatgatgagttttctaagccaacaagaccagctcttaatcccattttttttttttttttgacaaactctaaatgaaatatcctaacaacaagatactatcctaagtcgcagtgatacttgaaatgaaatatcataagtcaccaaagtggcatcaaaatctgctcaacacttcaatgaagttgggatttatcaaaattcaaatttgtttttgactttgctccgaggaagatgaagtgagaataagaagagtgctgcttagggattattattctccaacaatttgcaaaaccgtgaaatgcaaggcacttactacatttgttacactgttttgcctttctgtaagtatcacaccttgtacaataaattaacaatgcttccgtgcaaacattttgtccaagctcttcgttgtaatccgtaattaaatcacggtatgatttacatcactctgctcataaaatagtacaaacatgtttaggttgacgatgaatctgagctcttttcaatgacttcttccttggcaacaacagcttcttctcgttcgagcttctctttccagtactgatcaagcggaggcccgaaaatagctttccctgaaaccacaccaatcctgcaaccaaaacaaacctattcagattgcttcactctactaacgaatgaatcagacatttgacaaatttcaggagattataccatttgtgctaaagtaatgatctttttctacttacttttcagaaaaattcaattccaatcctcaaaaaatctacactgtttaaaatcaagttggatacagagtaatctaccattttctatttcaatatcatccaataagaaaaagaatctaccagatcttggggaaaccataatcgtagtattcaagattcagactttgggcctaattaagataaaacgactacttacacaactgcaccgatcaccattggcaaagacagaaacctgttccttcgaaacattttgcaagattaataactatctctgccgatcaatctcaatctccggtcgccgtcgctctagctcttcttccgggcacgacgaattttagaccttataagtaagggttttccagaacagagtaaactattatatgggcttggcccaaagtaacattttgtcccatcaaaaagcctttcttctttttgtcaacggccttgcacacgaggaaaaagaaaagagaaacggaccataaataatagttgtcaccgacttctctctcaccgtctttttatttttctccatttaaatcttgtgatctgattttgaccatttccaaaactctatggcaatagttaggtttctcctaattttgttattaatttgaaattattattggataaattggtaagacaagtataatgcgtatgaatgatgtaaatttttattattcatactaattctttattgatgttgagtagtatttcatggtaaactatttgtgtgtatgttattgaacgaggaagttattgagaagtttgtagttatacttttaacatccacacataaatcgcgaagcatatatgtctctatatacatttatagatgtgggtgtgtcattatttgataggtgtatgtttttattatctttaacgcgtgtgtggtatgatgagaaactgatgctgtcaaatgagggatttaatttacacaaaacaaataaagtcagcttctttcatttaagactaaaatgagatgagaggttgtttgtttgacaaaaaaaaaaataaaaaattagaggagattaattagcttgtgtggtctgcaagaagacattaaaacttagttcaataattgaataatcttatacgcgtatgtatattcagattaagtgataagtatataaatgtgtagtacttttggttaataattaagaaagtacaaagtgcaacaatattaagaagctaaatatatggatataagaaaaacatcatatatatatgtggatatatatactgattactaatccaagtatccaacaataataagaagctaattgatcatttagggattgtggttttgagtgtagatgtaatcagtgtgagcaactaaagttcttcgtatcaagaagcattcttcttctccaacaccttcacagattacctctccctgttctagtttctgcgcataagaaaagattatacgcacgtgactcaattgttaatctcgataatgattctttttcttttatggtaatcagacaatctttagctgaaaccatatatatttactagtctttaatttcaggaaaattgtacatccttgttatttaaacgattaaagccttttcgatcatgtttcctatgtacacatatactgatgatatacaccatgagcatgaggttaataccttgaaggagttttcttctggataaacggatgttggattgagccgagctgatgcgtgtgttagcgtggagcagagaagaagagcgatgatgcagaggaaagttgtgaacttaaccattcttttatatgactacttatgatacaattctttttataactatgagacagagatcaattatattgagaaatatcaataaagatgaagaggaagttatgaaatagaggcgtatttatagagaaaaggagagatgagatgagataaaagtttctgcagaaacgtgagccatataatcttgagtttgagtaagtgaacatcatgaagccattaccataccgaacacgcacatgcatattattatttataaaattcgctaattgagtttttgtatatacttatttaatgtcgacaagaaaaaaaaaatatccaatgagtgttcttcgttggttaatcagtctgttttggtgaaattaattgatcaatatggagtcaactatatttttaacgtttttgctacttgcattcatagatcttgttcatataataaatttttatcttaatgttgaaaagaaagttggtgacggatgtatccgtatactgagattcacccaattattctctcgtgaagttaactgcagaattttgatgttatacactctattgtaaccaaaatatatattttatttttctcagttctctggttaagtgaattaatatatgtgactttttatgttgttcactatttttttcgtttattaagtttatgattatatatgtatactgtgaaaggagatagataaagtactgtttctatttgacgttttcatctctgtctgtattatttcatcatatacagtttatagtgttatgcaatcatgttcactttttaaaagatggttgatatgataattaagaagggtccatcgtaatgaaaataacattctgcagaaaaagaaacaaaaagtctggtcaataaaagagggaaaaagggctccgcaagcaagattcgtttcaaacatggaaattatttagttctatctactacacacatacggcatttcatatgcttcaatttcaattgttttgttttctatttgtatcttggaagtcaagatcaagattaatcatcagtggactctatacaacttgggcctatattctactctattatctgatttagggtttggcccattactgaacagcttggggtttcattttctgtgtgggtgttcaagttcttgttattcactgtaatgtcacgagcaacttggaaagttctaattattttgaaatcatgaaaaatgttgatagcaggaaagatttagtctttcaactaggttttacttacaaattcgaatccaatactggtcgaaagagctgtgatatcatagtgatatcaaaggaaatcaagtgaaaaacgtaatcagtgatcgaccataatcatttacagtgttagtgtccagtttttttttttttttttttttttttttttttgtcacatgtcaaagtgtccagtttattatattgttttggagaagaatcaagaaaaagactagaggataaaacgtagagtgagccttccacagtatattacaactctgaactaataaaggcccaataatacaggcccatttatgtaacaggtcgaataattataagcccataaaaagttcaatgaaaccctagctctagactaccaccgtcgggtatatattgacgctaaacacatgttcttacaaacctacactaaacactgcaacacagatattcaaagcaacgcctcttttactctttttcatcgagttattataaaaatttcttccttggttcgttttaattttcttcttgatttacgttattgtatttgccaaaatttgatgggagaagagagcgatgattataaaaaaacaagattaaaattctgatctgctctattactgggcatgatagactcatatacacccatagaatatgagctctcttctcaatcatctatttttgttttccaaaagactttatcaataagcattgtctggattaattgaacaacttgtaattttatcaaattagtttcgtaattgaacatctcaagaatttcaattggattaataaattttaggttttgttgatgataaaaacaacttaagacaagtggtaaaattttccgtaaccagaacaaggctaataaataagtggacatatctctgtgacggtttgacctatcatatgaataacctgtaacttatttttcttgcaatggacttttaaataagaactagaataagaccaagactatgttcacttggttgcgttgttaataagatgttaaaacgaagtttatgtataaaaaaattgacagaacataactacatttcaaactccaaacttacgaaaacacacaagttttttctggaatctttcaagttttatttgatgtttcggaagaactaaattggggttttatctagtggtagacaaaaaggaaaaagatgagtacattttattgggcaatgtgttaactaataaagtttctagatataggcccatagaaaaaccaacttatataaactgtaagcccataaaggcccaaataaaccctaattttaaatccaccgacacatgtataaatgccaagccgtttcatatacgtctccactctgcaactcaggtaaaagactcttgctcctattatctcatgttccattgtttgttgatttcaatttgaaatattagtttctttcttcttcccttcattccttcaacttttataccattttcctgttatctattgatttgaaagttttaatttttaagaggcggtgatgacaaaaaacatttctcgatgctgaaacttactcgagagaccaaatcactcttgtaatctttcgtgatgcttgtttttatgcgtgtctgagcctaaaccaaaaaatctttcatttatgctttgattatcatagatcccaatttatgcgtttcttttattgcttttcaatttgtaatgcgagttttgctttattttgtccagccatggaagaagcagatcagttatgtttagctgctaaatccggcgacttgaaaaaggttcaaactttaatttactccggcgccgacgttactcactttgataacgacggtttaacgccgttaatgcacgccgctaaaatcggaaacgcagagatagtaacggcgttactcgaatccggagctccatggaacgcattatctccatcaaatctctcagcaggagatttcgccatggaagcaggacatcaagaaactttcgatcttcttctcaaaaccgggatccaatcagagctaatcttaggaacaatcgcaagaaaccaaacaaagaacgaatattctaatcaagaatatcttcaagacagagttagtttcagtgaagacaagttaatggatagtgaaagcaaaggtgtgatgatggcttgggaaaaaccattaatggaagctcacgctaaagctatttgtctcaacggtggtcacattcttaacgttggtttcggtatgggacttgtcgatacagcgattcaacgatacaatccggttaaacacacgatcattgaagctcatcctgaagtttataagcgtatgattgaatctggttggggagagaaagagaatgtgaagattgtttttggaagatggcaagatgttcttgataagcttgatgataattcttttgatgggatcttttttgatacttatggtgagtattatgaagatttaagagagtttcatcagcatcttccgaggctgttgaagcctgatggtgtttattcgtatttcaatgggttttgtggaagcaacgcgttttttcatgttgtgtattgcaatttggtgactttggagattgagaatttagggtttagcactcagttgattccattgccggttaaggattgtcttggggatgaagtttgggaaggtgtcaagcaaaagtattggcagcttgatacttattatctccctgtttgtcagtttagtgactgaagaagttttatgataccagcaattttgcgatattgtaatttttcttactcataaaaagtagattttttatccatttgaaaatagtcatagtcatccaataagaagaaaagaacagtaataagtgtataacataagatcccatagtcatgtgataggaaccaagagccagactaattctgttacaaatatcttaagaaacaaaagtactaattaaaacatgttatgcagaagcttcacgttttctacatggtctaaatatgtgaagactaagtgaccctgaaacgcttccattccttgtattgcaacgctcatcatcgtctttctctcaatattgaagtagtagacgtcgaaaggcactgtttgatagcacggcgacaacataatctcatttgtacgagtcactccaacaaagcgtaaattcagggttccaatcctatgctgccaccaagcgggtaatacgtacgtatgcttcgaccattccttcttttcagcatcttgtagaacccacaactcaatactcttactacgtccatcaacaaagcaatatctttcagaaacaagtgaagctaatttaccattgtagtttataagagttccatcatgcgctgctttaatgaactcttccatgactgtaataaatctaaacttctctgacctaacatcgaagcaaacgataatgtaatcccctgaagacaaattgatcgctggataatacaacacaccattgatgcatatctcagacattccaagaatgtgaggcatggaacattcgatgattctccatgacagttctccagttcctagtgtcagaacttgatgctcatcacttttatatgacaacaataccttgaactgtttctgaatcggttcatacacgaaaaatcttgacggcccaatactcgtcttcattggtttaggtaagcttaaggtatgtccagtgctgggattacatatcactgtcactgtttcgttcatttccttgcgtttaaaacagatcaagccattgacaggacgcgaaattttatagcataaggagaaattctttagagaaatggcggacgagttctcatatggattttgaagctgaggagacgagaagaagaacaagttaccatcttttttgcagcagaataagagttgcggtcgatgcaaagatcgggtcaagaacagctctgtgaaatcttgacggcaaattacggagatccagagtttcgacacgcaacgacatgtcgctatagattttgccggtaatctcaggagtatctcgatgatgatatcaactgggatctggactgacttttctgttttattcggtgaggtcttcttctccgttctacgccgggagatggtaagacgattctccgtaacatttctccgcagtgttctcatggcggatacgccgacggttaaaaccctagagagtgagagtttatggggaagacgaaccaatttggatgagaaaatcgaaagcaattttcgtaattttgttttaatggacttggatttgaattgggctttcaaaataaatatgggctttaaactaaaaacgacgccggatacattctcggtccattattcgccacgtgtttaatttctagatgctcttgttcttattcttctcgtcttctccataagccaaattgagtttatgattttggtttctgaatcaccaatggcgattctctctctacgatcttcgagctcattgccgcttatttgttccacaatttctcctctgtgctcgaaacccatgttgtctcagttaccatcgaatttctcatcgtcgattgcttctgttcctgtcaccaaattaaaatccagttacagttcctccgtttcaccgattagtaggcctcgtgtggtttccgcgagagctgccactgagtccttcactgattacagagaagatatcggtgagatactcggcgatgtctctatctttactgcttcaggccaacgcgtgcaattcagtgatctctgggatcagaaagatgtatgttaggatgcttatgaagaacgaattcttttcattattttgggatattattgtttgaatagtgtttttttttggacacagggaattgctgccgttgtactcttgaggcatttcggatgcgtttgctggtaaattgattcattcataaacacttggaattgttgcaaaatcaaggattgttgtaaaacgtttttgataatgaattattttttttatatgaaagttgggaacttgctactgctttgaaagaggctaaaccgagatttgatgcggctggtgttaaattgatagctgttggagttggaactcctgacaaggctcgtatacttgcaactcgggtataagatttctccattttcttcgatatatataccaacttactgagctcatggatatgttttctttggatgtacgttatgtttgcttgttcattgggttgaactttttaagagaagaacttgcttttgattgttatgctatgctctagtggttttcctctctgatgataagtgcatttagtagtactctggtttctagccatgagtcgaggatgagatcagaccgagtcttctccatatctctgagtgtctagctccctcttctcaccttaacattgcatgtttacgaagaccaaccgttagttagttgtatcactaatgggcgttttgagcatgtttggtgtcattgtgaattaaaaaatcagaccaagattgggttgagttttgtgagattattctcaagctctttagtgatacaatttagtaagatttgttaattgcttggtctttgcaaaatctgcaactcgaacatgagaagagggtgagagatatagggaagatttagcttgatttcatcctccattcaagcgcattttcatggctttatatagtgtacttttggatagaatcagaaataccaacaggcgcagcataaatcaaaatagcaagttccaacttcccagagaagtccttgtattatgggagctttattgtttaaccaagatactgagtctagattgtttccttgttttagttaccttttcccatggaatgtctttatgcggatcctgaacgcaaggtaacacaaacaaacatataccttgtttttaagatatcttttatgttgaaatggtgattgaagttttgagagggctcttcttaaatgcaggcatatgatgttcttggtttatacttcggtttgggccgcactttcttcaacccagctagcgtatgaacctactcacctcaaacattgttaccgtctcattgtatacactattttcacctcgaaacatgagaaaacctcgattattgcagaccaaggtcttctcaagatttagcgagattcgagaagcaacaaaaaattacaccatagaagccactcctgaagacagaagcagtgtgttgcaacaggttctttcttgttaagttctccacaagacaagatatctgcttttatttttggtttgatcatttgttctgtcttcttctcagggaggtacgtttgtgttcagaggcaagaaattattgtacggtcgaaaagacgaaggcacgggagatcatccatctctggatgatgtcattaatgtctgctgcaaagccactgttgcttgaaacatatgggatcaaagtctctctggtttgtcctcatacttaaaaatcactgtatatttgtagctatgaaataatgtctatatttctttaagctttggaaaaagtatcaacactaagaagttagagcaacatatgtccaagtccagtctctctcaccgctcatgtagatttttgtaagatgtcgacaattcattgaaaccacacaagtcttttctaatgtaatgcaagacaagtgtttggtttgttattaggataaaatttgtctttttcactagtgcatagaaaatgtgtttgtatttatttgaactctgcactaacataactggtggatatcatcacatttttataatataaagtttattatatcaaacatatctctatgttcatcttagacatttgtgatatgaatcttccttctaatagtatttatgttggaaaaacaagaaaagagagaatgaacgaatcatacgattataataatacggaattcaatacccttagtcaaaaaattataataaaattacgaatgcggtgtgacatgactaagcataaaaatcttggtctattccatataaactattttaaaggctgaaaacgataaaaacgcaaatcttgaaagtgactattgtatcgtataatcaaaatttattaacaaaatcaattttaatcccaaatggacaaatacttatctatgaaagctctataatgcgcgcagcccaagacgctactaacgtgcgcattaaaacccggccgaaagaagaagacgatcactctcacaagcaaaaaaaattcactttttgtttttgttaacactcacgtgaaagcttcgttcttcttcaaaccttttgaacaatttctccgatgccggtaaatcaccggtttacgtttagctaccggttactcttcctcatcttccttttgagtttcgaaacggcacagcgtttggtcaccggtgacccaaacgacgaagcatgcttgacgaatctccgtcagagtttagaagatccagctaataatctccgtaactggacaaaatccttcttcataaatccttgctccggcttctcttcttatcttcatggagtcatttgcaacaatggcagaatttacaaactctccttaacaaatctctctctccgtggctcaatctctccgtttctctctaattgcacaaatctccaatccctagatctatcttccaaccagatctccggcgagatcccgccgcaattacagtttttcgttaacctagccgttcttaatctctcttctaatcgtctctccggtcaaatctcaccacaaatcgctctctgcgcttacttaaacgtcatcgatcttcacgataaccaactctccggtcaaattccgtttcagttcgggcttctcgctagattaacggcgtttgatgtctctaataacaaattatccggtcagattccctcgaatctggcgatgcgtaacggaaacttgccgagatttaatgcgagctcgtttatagggaacaagaaattgtttgggtatccgttggaggagatgaagaacaaaggattgtcgataatggcgattgttgggattggacttggaagtggaatcgcgagcttagtgattagcttcactggagtttgtatatggttgaagattacagagaaaaagatggaggaagaagaaggaaagataagtcactccatgcctgtttactaaacacaaacatttcgttttttttcttcttaagtataattaacggtttcttttatcacataattagttttttttttccattttgatcaaaagcatacagcaatagggagggttcattaagcgaatttagggttaattaatgctttgatcatatatacatgtttctttggttatctttggatacatattaacaaaaatcacaaggtttaagcatgaggtactaagttattgttgtatagtttttgtagttatgaaagtgtaatttataatgacatcatttatgtaagggcaatatagaaatttgaagaacggtcgcgccgaaagttagtcaaagtgtcaaaccctgcttcgagaacttaaaaatttatagtaagtacgattaatgaccccacattattatggatcgatccctaacttctcacgttatttgtccagaatttgtttgcttattgcgcaaattacattaacaggcccaaacaaacgcttgataaagcccattaaacatctggcctaggtccgaattattcgttaatctaaacgactgcgttgtaactgtcgttaattgtggcggacaagaaaatgcgagaagccgatgacaacaattcataaatgctaccgtttacgagagagatgcatagattctctcccatagtcgagtttcttcttagcaaacgccaaattttcttacattattctcaatttaagtctcgctttgacttgattcaccgaagttttcacgtttctagagctctcgaagataatttccggagaagtaacgggattggcttagtttgtctcgagaagagccacaacgatcgcacgaaaaactccaagtatgatgaattcgcgagtgatgtcgagaaatcatacagaattctgcggaaatttcattctagggttccgaagttggaactcgcgcttaacgaatccggtgttgaactccgacccgggttaatcgaacgggttttgaatcgttgtggagatgctgggaatctaggttacagattcttcgtctgggcggcgaagcaacctcgttattgtcacagtatcgaagtgtataagtcaatggtgaagattcttagtaaaatgcgtcaatttggagctgtttggggtttaattgaagaaatgaggaaggagaatccgcagttgattgaaccggaattgtttgtggttttggttcagagatttgcgtctgcggatatggtgaagaaagccattgaggtgctcgacgaaatgcctaagttcggttttgagccagatgagtatgtattcgggtgtttgctagatgcattgtgtaagcacggtagtgttaaggatgctgcaaagctttttgaggatatgagaatgcggtttccggtgaatttgcggtattttacttcgttgttgtatggttggtgcagggtagggaagatgatggaagctaaatatgttttggttcaaatgaacgaagctgggtttgagccagacattgttgattacactaacttgctaagtggatatgctaatgctggtaaaatggcagatgcttatgatcttttgagagatatgagaagaagaggctttgaaccgaatgcgaactgttacacggttttgattcaagcattgtgtaaggtagatagaatggaggaggcaatgaaggtatttgttgagatggagaggtatgaatgtgaggctgatgttgtgacttacactgcattagttagtgggttttgcaaatggggaaagatcgataaatgttatattgttttagacgatatgataaaaaaagggctcatgccgtctgaactcacctatatgcatataatggtggctcatgagaagaaggaaagttttgaagagtgtttggagctgatggagaagatgaggcaaatagagtatcatcctgatattggcatttacaatgtcgtcatcagattggcttgtaagttgggagaagtaaaggaagctgttagattatggaacgaaatggaagaaaacggtttgagtcctggagtagatacgtttgtcataatgatcaatggattagcaagccaaggttgtttactcgaagcgagtgatcacttcaaagaaatggtaactcgaggactgttctctgtttctcaatatggaactctgaagttattgctaaataccgttttaaaagacaagaagcttgaaatggcgaaagatgtttggagttgtatcacaagtaaaggtgcttgcgagctgaatgtattatcttggacaatatggatacatgccttgttctcaaaaggctatgaaaaggaagcgtgttcttattgtattgaaatgatagagatggacttcatgccacaaccagacacatttgctaaacttatgaagggtttgaagaaattgtataatagagaatttgctggagagattacagagaaggtgaggaatatggcagctgagagagagatgagttttaagatgtataagagaagaggagtgcaagatttgactgagaaagctaaatctaaacaagatagagaagggaagaagaaacagaggagtcgataaaggctttagttttttttttggctgagtcatcgtacagtgcatgttgtttttttaagcttgcaacttgcaagtgtcggcaaaacggcaagaagtcttattgttagttaaatgcgcagaactaaaacggccgcgtttgagagcagagcactcgataattaacactagggacgaagaagctctcgtttagtaaattttagcttagaacacagaagaagcattttttcggatctgagatctttagatccgaacatcgtttatttcaaatcgtttattcaaggtatgtacatttttaatcttcctcttcgaattcttcaggattgattttgtgtttttttatcttccgcttatcggattttttgtagcgtgaatcctctgtttcatggatctatccattggtagtgatttgtttctgtgcatttatgttctgcttggtaatttcttgctattatgttactgaaatggtacaatgggtttgagcgaaatctgttttggtaattttgtataccagattcatggatctattattttaaattgattctatatctggtaattcttttatgcattaatgattattgcatcactgaacgaaggaagtagcttgaaatcaaaattttgaattttgtgggtaatgcagagagtgttttaggttataagaaaaagttttgaatgaatctattctaatgtctattttggtttgaaggtctaaaaaaaagttttgaagaatcatagccatgtcaagaaggcaagtaaggcgtgtaggggatagtggaagcttcccatttgtaggagctctgcattcaaaatcacgttcgtctcctctgttatcagtttgccttgttctcgtggtatgatgatctttgcgtggtttgtaatctttaagtaatacgtttcataggatacaaattgatgtaatcctttttatttacagggagcatgccttctcattggttatgcttacagtggtccaggtgtgtattctcttcaactaagtatatataataagattcatttgtttttgcttgaggtttcgattcaaaagccctaatggtgacaatgcatgtgtattactacaggtatgttcaaaagtatcagagaagtcagcaagattacaggtaattcttgtttctcatcttcaatataagtgtttatgatgataatgtttaaacagtgatgactttctaaatttacctgcaagaatgtgtgacacttcacattaacattttgtttaacaaccctctctacaggtgactattcttgcacagcagaagttcaaagagccattcctattcttaagagtgcgtatggagatagcatgcgcaaagtcctgcacgtgggtcctgaaacatgctcagtggtctcgagtctgttgaatgaagaagagacagaagcatggggtgttgaaccatatgatgtggaggatgcagactctaactgcaaaagtcttttgcacaagggccttgtacgtgtggctgacatcaaattccctcttccttaccggtcaaagtcgttttctcttgtgatcgtctcagacgctttggattacctctcacccaggtacctgaacaaaactgtgcctgaacttgctcgcgtcgcttcagatggtgtcgttcttttagcaggtaactaaaaccaaacccgttagaaaaaagctgagactaagagattgtaaatccggtctgattacacttaatcttcatctactatataggtaaccctggtcaacaaaaggctaaaggtggggaattgtcgaaatttggacggcctgtaagttcgctaaaaccatgttctcgtcatgaatgaaaccacacattacattcatcaattcagagatgtgggttaggttcgtacttgtcctgtttgctaacttgttgcaattccaatgtcttgcaggctaaaatgcgtagctcgtcgtggtggatccgtttcttctcacagacgaacttagaggaaaacgaagcagcaagcaagaaattcgaacaagcagcttccaagagttcatacaaaccagcttgtcaagttttccacctcaagccattacattagtacacactattattactggtcttaagacatcaaaccagatatctctcctctctgtttaataccctttttttccgctatagaaagaaactaaactcccacaaattgtaattcattctcaacgatttgattcataatttaactatttaataaatttgcctcttctctacagtccgctagatgaatagtcggttaatcaaattgagattaaaatgtagtatgttaacgcaaatagtagaataaaagctaaaatataattttggaagcctccccggcgatggtgatactcggagaattttgaagcggctctatgaatagatccggaagatttcgacgtctcttgaacatgggtttgagatcggcagaagagtggaggtttctcaacaatccggtgaattccagtggttccgacgaattcaacggcggtgctcatcgtctcggcacgtgttagggcgattctcgcctagggttttgctctagtccaaattaccttaagtttctggttgattcaagctgtttgatggtgttctcttagacatggtgttgagcattaggggagattagtcgccaatgggttaaatgaaagatgttgcagatttgctatagtaaataacccagatagatctatcaaaagcttgattttgtggtaatgcactcatttgacttttttgccgttattgtttatctgcactacaaaattctgattgctcatgggattcttttttgacaggtttacacaaagatggatggtaacttatatgatgagtttggtaactatattggacctgatattgattctgacatagatagtgctgatgaagtagaagatgaaaatctccaagataagcatcttgaagaaaatggattacacgctcgaggtgaagagaattcaatcccatgactaagttcttttgagtctcttatgcaacggcctgttctagtgcctccacatggtagctatccggttcctaatcaagaacatcaaatgcgagaaatagtagaataacatcatttgatgtttttgtctaaggttggagaaggctcgatgcaactttacaagtcgagaagaggccctttttatttgatttggttgaatacgggcccaagcctaataaaaaatttcatcgtttgatattgatacacttttttttggtcgaatacactcttttatttcaaccaaaacaaaatcactggtttgttagtaatcttatgatatatatatgtgtctagttgtaacctatatagctgctagatgagtcgttttccaatctataattggttacaaaatttgggaaccatttgccagaaaagaaaaaacattcaatcaaaatacagcatagatttataaacatggaaaaggatagggagggagacaaatacaaagtggtatcaagacataaacataagttgaccatactgtttgttaacttggtatccaatgcaggtgggattttttgttttcatttttttttggtcgagattgcttggatatgacctacccatttgtcatataacaccaacttgtatctatgtacaacatcctttattttggatttaagtctcttccatgatattaagcctttcaattcttcatttcttgtgtaaccgtgaaattctccaaccgaaacataaacttattatttcttatgcatatagaaaaccacattttactactcatcactccaatatatcagtggtactcatatatttattgtacaatctcattcagacatatcagccggaatgaaagttcaaccatctaataggctaacacactagcattgcttcaaatttcttaaacacgctaacattgtaacaacataataataatgacacaaaaatatacatttgaggttttgagagagtgctaaaatgggacctacgttttcatttcttggaacatgaatagtgggaattaagaaaaacaaaaaaaatcgaaaaagagaaagatcacgatggttgtcacaaaatgttgttgatgatgtagggaattggtagggtcttataacctatacttttcacatgcattcttaaaccctatttctactgcatctccatgtgcctcccctcacgtctctaccttctctctctatctgtttttttttttcaatcaataacaaaagaaatattacatcattttccctttcatcatatctttaaccagctaaaacaagtttgaagcgaattttgcatatatacagtcccaacttcgtcaattatattgaagttcgttatctttttttttttttttttttttttttttttttttttttgtatgtgtgtgtgtgtgtgtgtgaaatatcgcgattaatagtttaagaaaattcttcatcagaataatagattataatattttcaaagatttacttgttttttgattattttgattttattaaaatcatattgttgagacaatggtattatggtcatgaagaacctcaagtgttttatgtatcaattggcaaatttcagcacaagtgaatttttttcttgattattttctactgtctatacatataaaatagagaatataatataacaactttgagctataattagaatctgttggaaaaaaatgaaaaaatataacaaatatattctatcttgatttttcaaagtatagaatctaaaaaaagctatatgatattaattatccaattatatgattgcatttatgagttgatatgatatcttttggttgtttcataaaacagaatcaagaataagatgatcaataccgaaatatatggcttcatcatcaaatattatttcacatgtgattctccaatgtatcattattaagagttgttatacgaggacccatttttttcgcagcaatcaaatcaatttgagctttttaattaaaatcttcaaaaataatctgagaaaatcacagcgtctcattaattattaaaaaagtacttcaaaaaagtggatatacgattttgaaatgataacgatttcctgacgtcagaaaaaatcctataacaaacattaatgtttttttttggttagttaagagacaataatatgttacatctaccaaagaatattccagttaagttagttaatagttggagtcaaacttaaacgaacaacgtcgcctacaaatctgggggtataagttataaccaacggccaccaacatgggttttgatatcgtccacctgatttttatgttaatataactcaatttgattgattaaatattatgctcttatactaatcattctaggtccaaaactgaatcactcattgcacatcatttttatgatttttattttgaaaatctcatgtttcaagaaatatttgtgcattctactagtagcttattttaaataaagtttcgagtttatataataaacaatatgtttatttctttgatttgtatacattttaaaaaaaaaaacaggatgaagatatatacaactaaagctcaattcaactagtaggaaaattgtattctacaaaaaatttgtgtttatgtttttattatgataaccatccaaactcattatttcacccatgatcaaagtaactatatcaatatatctgcaacaatatctgactcaacatttatttttacataaactgcggaccaacacaattatgctaaactatcatcatttattctattggtattggagatcagtctacgtcagtgaataccgcataattcacatgaaactaactccaaaaccctttaaccaaaaaaaaaaaaaaactaattacaactccggttaacctgtcgataattacaagactgaaaacatcctagtcagtaaaaaacatatttgtatgtatccgatcccaccaaataaataagttgttgtcaatgatagaggaagagaaaacgaaaaaaaattgcggaccaagacatttgggactactagagtttagggagcataaatggtcctatttgacttaccctctaccgtataaataaatgtattttagccgtataaatgtatacatacgtagatgcataggtatacaggattactttagacgatttgatgtcggtatgacattacatttgactcccctagctccacttgtctctgttcatttttcttgtatgtcatttccttgttttccaattttacgtttaccaccctattttattttgttaatattttctaagtcaacgtgttgacacttaattacagaatctgataactaaagttacataaaatgctcacagtttttttcagcaaaatactcacattatacgacatataaaattttagcagtctataaatagtaattatttggcattagtattggacaagaagtagaatataaattaatgttggttcttttttctatccaacttcacacagccaattttgtagctgacatcgtgaatggacgactaaactaatcataagcatagtgattcagtttatacaacaacaacaaaaagttaattacatttgaggtttctttttaaattgctatgtttggtccctaaatgatggtcataataaggacggtccggcggtgacggaaacgcgtaaagactaatcattttagtactattaatttgtagaattattattaaatatgcttgaatcctagaaaacgatcaaataaattttggaaagaagctcaaaatgtgttatttaattttgtccctatgtagagctggtttttttatttttatttaaacataatcctaagatttattgctgtatgtgtgaatgcaataataaatagaaactcaataatagatcattcttattttcaaaaagaaacaagaactactgcaatgttttaattgtttattttgtattaaataatatagcttgttaattattggagatcgcattaaataataaaagaagttgtctcacatgtcttggagaatatttactaaaaactatggtaatgtctggacggtcaaaaaagtctctctagtttctgattctgttgtcacattttatttttgaaattaaatgtcgttagattattattatctatatatatatatatcccaacagacccattgcttctccaaccacatctcactcttcaccaacttaaaccctaattcaagatctcttcttttcgttctctccttcacccacattagtcttctctacgaccaaaatctcttgactttaaaaacagagaatgaaacagctttcgacaaaagtgacaagcaatggtcatggacaagactcatcctacttcttgggatgggaagagtacgagaagaatccttatgatgagatcaagaaccctaatgggatgatccagatgggtctagccgaaaaccagctatgtttcgatctaatcgagtcatggttaactaagaacccagacgcggcaagtctcaagaggaacggtcaatccattttcagagagcttgctctatttcaagactatcatggcatgcctgaattcaaaaaagtaagcttctttcatttttctcaaattcaataaagagagtaacctgacgtgtatcacaagtaatgaatccatttctcatgaacattttctgtcattttttacaggctatggctgagtttatggaagagataagaggaaaccgtgtcacgttcgatccaaaaaagattgttttagcggctggttcgacatctgcgaatgagactctcatgttttgccttgcagagcctggcgatgctttccttttgcctactccttactatcctgggtaaattacacttctcctctttacttggattccaagtaaacccaatagaaatatatgcttacgtctaggcttttttatgattacagatttgatagagatcttaaatggagaaccggagcagagatagtacccattcactgctcaagctctaatggcttccaaatcacggaatcagctctgcaacaagcttaccaacaagcccagaaacttgatctcaaagtcaaaggagttcttgtcacgaatccatctaacccacttggcactgcgttgaccagacgtgaacttaaccttctcgttgacttcatcacttccaagaacattcatctcattagcgacgagatctattcaggcactatgttcgggtttgaacagttcataagcgtaatggatgtcttgaaagacaagaaactcgaagacacggaggtttcaaaacgagtccacgtcgtttatagcctttctaaagatctgggacttcctggtttccgtgtgggagcgatctactccaacgacgaaatgatcgtttcagcagctacaaaaatgtcaagttttggtcttgtttcttctcagacacaataccttctctctgcattgctctccgacaagaagttcactagccaatacctcgaagagaaccagaaacgactcaagtccagacagagacgcctcgtgtctggtcttgagtctgcagggattacttgcctgagaagcaacgcgggtttgttctgttgggtcgacatgagacaccttttggacacaaacacatttgaagcagagcttgacctctggaaaaagattgtttacaacgtgaaactaaacatatcacccggttcttcatgtcactgcaccgaaccgggttggtttagggtttgtttcgctaatatgagcgaggacacactcgatttggccttgaagaggctcaaaactttcgtagaatccacagactgtggacgaatgatatcaagaagcagccatgaaaggctcaagagtttgaggaagaagacagtctctaactgggttttccgggtttcatggaccgatcgtgtacctgatgaacgatgaaattattcatctccctaagtttgagacgacgaacaaaagaaaacttcacggttttttcttcttctttatttccttcattttttatattttgggaaagtatttttaattttccaagatatctataatcatatcattatatatgtaatattttttttaatgtttgggtgagtctttaatttatgcaatttttcgggtgtaaaattgttactatgtgttattatatgtttttaatgcactcaatccgaatgtggatttgcagtggctatatatataaataaatatatatcccgttgtaattttagtgaaacgtttgtgtgtattgtacccatatataaaaatgtaattcactctttttagtttatatatattttgttttataaatatgggtttctttaattttatgctctatcatttggtatagtttttgagtttgttgtgagaattctcctctgactataaggctataaagatcgtgttaacgttgttggttaaggacgttagttgaggcatatcaaaaggaggcttaatttaatgtcaattaactaattaattaatcattatatggtaatatggcgggaattgtcgaattggtcaactgagaaagcaaaaggggaaagtcaaaggttttccacttaggtgaatcaagagagaaggtatgatctacttgtcgaaaatattcgatgaagcctaaataatttagttaaaaatcgactaaaacccattaacaatttcggggtaaaggtagcttctagcgttctacggcagtaaagttttgagctttgaataggtacgttgcattgcgtaagaatgttcacgtcacatatttgaactaaaattacaagtttacaacgaaatccacattttttttttgtataatcaaaacttactctatcaggattaacgtaattataagaaaaaaatgagcaacttatgagaaaccgaaatctgtatatcgagagccatggttgattgatatatatgttaaggaggatatgtcccaatgattacaatgattatagatttatacattacaattccaatcatcgaaatcaataattttcaaaaatttgaggatgaaaaggctccaatcatttaaagagaaaagtctttataaccattttttttttcttgtgaaattatttcccgagggataaagtagaggataaagtgtcatatcatcataggctaatcattatagtataagatataagataccggtcaaatgttattatgctaagcctatcacataaaaaaaaaactaaaaaagtgccatgagctttgttggtactacgaagagtagactacgaaatatataatacaactttagtaaccgattttgttttaattttagcatgatacgcggctataccggccgtaacggcaaatgatccttacatgtgaacagcattaatgtggtggttgagtccccaaaaatctgtctcaattaattaacaattcgattataaaaacttaacagagatatgtagtagcagtacgtactttgaaaaataagagattgagaatttggttggatttgagaatccgtgaatgagtaatactgattaagtaatattctacttaaaagtctttattgcatatgaccgaccataactatacaaactgacattatgaagtcgttgtaccagaaaattttcgtcattgtcatggtcgtagtctacttgctactataataagcgacattggaatgatatttgatattatcattccataaattgttacgtcaactggtgccacatactaatcatatagttggtaatgtaagaatacgttttcttgtaaaaatgtttaaaatattgttttacccagttctaaaagtagatatagattatggaagtttatctttatcaacgtattgtaaagtagatatagattatggaagttatgtacatatgcatgtcaagtttgaaccaaaatttcagtcacgtgggcttcacgagtgaggccatataactgcacatgccatgacacagaaacatataacatctcttatgcatacacctatagtaatcatatttatatatgcataacaaacaaatgaattgtaacgatttgttttttactccatatttgacttcgaccgattggacatataatttggaattcaaattacatcaattatatgccaggacccctttgatgttcttcatgtatgcatgaggggtcatctacgcatggcattgctacttacgttacacatacatacttgatccatacataacataacattatggggaaattttcagaattaaattttttcatatattatagtattctctaatataccatgtgggtcacgttagtttttctcgtacttgatgcatagcttatgaatcgagaagtcactagctatttatatatatatacgaatatatctttataactataattagaacgatagaacttaaattaatgatgtgcttcgtacatacatccacttaatatgtgcacgattaagaagattcatcgcacatatgttacgtaagagacaattatcaaatcacgcaaagatttgtttctttggcttagatgcaccgtcttcaattataatataaagtcgatttattaattctcatggagtttatcaatgttcatcctcttcttcccatcttttcgaacattgtttacccaaattaatctctctttttaattattattattatttgacttttaaatatagttcctttttcaaagataataattttagtcggctcgtcctgcctttcagcctaagtaattagtgtcatataatgcttagttatctaattcaaagccaagaaccaagattggtaaattaataattttcctttctaaatcgtaacaaatgggcttttacggggccttactagacgtgccattgccatatgtttccctcaaaaatgggctttattgggccttacaagtctttttgaagcaaagaaagagttggaatctaattacctttgacccaaaaaaaaacaaaaactaaataatcaaaaccgatattgcgaaaataatcagtgatatataaatatatatatatatatatatatataaatattatttttaaagttgacaaatataaagtagcggacatattcctgtatctatctttttcccataagcagataacaagaaattgccaaatcatctacgtaacggaagcaagcagtattataaatttaaatatgtaaaaagttaaaacacaaaaacaaaaagaaaatcagacggacgcgacattactcccatttccacaatcaaacattttcattattttatgataaaaacaaatttcctaacttttaaacggacagaaaactgaatcacaaagttgaaaaagataactattattataaaagaacaaaaaaaaaaaatcaaggttaataatattaacgtgttagtgagtgtcagcatcagctgcattatataaaaaaatataattattaagtacgttggttcctttttgacaatggtccaattttaatggttaaacaaagaaattatatcattaaatattacaaaaatgtcgtcgcggggcgaattgtcgcgaggctaatcaaggttttatatggtgttgttttacttatcgtctagaggtttgacagaatgtaccattaatcaatgcattatattattaatcacaagtgaatccatattattcgcatatctattatagtctctcgttcatatatcgttttgttccttgatttcttctcagcgatagttattcctttttccttcttttcatataatgctttaccttgacccaagaagttataaagttttctaaattttcaatccataaaatatgaaactcattcttttcacttaaacttataaatagtggccaatgtggaaactaaaattctatacatgattctttttttttaggttgtattactagagctcttaaatctttaacaaagtttagatgatagggtatttaggtaggtagatgagaaatgctttaataaaaactataaaagttatacggctaaactaagtatagcatgtaagtccatggtcaagacacgtcctgccatccactgatgcaagtgcttacatacataatcttcatatcactaactctagaatctcctaattttcctccctagattacgattttgttaattaattatcttttatcctaattgtggatttaatttatatatttattagaggaggataattccataagatttgtcgtttttctgtttgtagagaatgtttggaacatacaaaatgacttgtcattcagagactagctagtttttcaattattcttttgataacacccttttcttctattgtccttaagcgtatgtacgtacaaaactgagattaacaaaaaacattcttcttcttaattatatttatattatatatttgtgtatagtagcctactatcaatcaaagcacgtctaacaaaaccaaaaatataatgtcattttctggaaataaaaatccaaaaagatataagagttttacatatatattggactgttagacattatttgtttggttaacgggtccttagcttatatcattacctttttttttttatatgtgtgcaattagtccatcatgtctacataaatttgaacaacataaaatcttctttatactctaacatgtacacaaatttttaacgatcgtgaattgataatatgtcacagaaaagattacatagttacgtaagtatacaatgtgaacaccatgttagtgtcaaatacgttagatcatgtgaactattgaaatttacatctccgtatatttatagtatagtattattgtatttctctaagtgggtttgataaacccatcttttatatatgtagcctttttaaagtcaatgttagaatacgaatgttgcgccgtctccaaacgtaaaatattgaaattaaattatttgtctggctaatttttttgaactataaaagaaacataactatcgtaaaagtaaaaccataaatagaaacgaaaaaattcctaacgaagaaaacaagaagtacaacagaaaacaaagatagagaactgtaacaattcgaaccaaaattaaaattaaaaatcctctacgaaaactttgaacaattgaactaacaaagtcttgaaaatgatggaactatttctatttgaatgagatgtgcctaatgcacggttgcgttttctccaagaggtatatatgtaaggctttgcctcggaacgataagaatcggagctttatcttttcgtttgtaggtttatcgtcactagacgatatagtacgtagaacatttttaatcaaacaatgatgatgatatttttgcttttaaatttggtaaattaatcaaacaatgatgaacgataagcatgatttttgtcactccaaataaaaatggtagaaatgaaatgattttatttggaggtttgaatgggcaaagatatgtgccaaactcaaacaggaaaaagagaaatttgagtgacatcatttgattctgtgatcttcaaattcccaaactgactagagagagtttcgaagctctacgtacaccttcgttgaattggtaagacaactcttcttcattttgttaggtatttatttatttatttctaattattgattaacaatctatacgtacatgagaaatggtttcatatattaattattgttaagacattaatggtttccagcgacattgtgcatagccacccggagagatccaagtagtattagtcctattgaaccgggaaaagatatctttaaattaatttaatactaattatgtaagaaaaataattgataattaacctatatagttgtgcatacacacacatatgtgtattcgagtgtttgtcggagtatctctgatcagacgaagccatatagatccgaccatgtacgtgtccatattgcaccattctttttacttaatttatgaattctttttgttggtcgacaattataacttatttctatgataattcaactacaaatttaactgaagtctcccaagtcagttaatagttaaattttgtttttaaaaaaaaggaaaataaagagagctgattatgtatttcttggtttggcaaaatttgactgaagattaacgcatatacatatactcaagtggagttgaataagaaacagggcagaaaatcatccttggattctccattactataggcacctaacaattactgtttaatagtatatttagagaactatgtcttatatatatatatgtaaaaaaataatactgttaacattaaaataaacgaacttttcaataagaaattgaaggattataaattatttagttcccttaatgtaattggtgatcgatgtttgtgcgtttaaaagacgatcctcttttaggctcttaaatttagattcatagtcgtttccttctttttatgtgtcagatgtaaatttgcaaagattataaaatatataaagacctaattaattaagggacaaaagaagaagctaaaaggtagaatgatagaatctcttcacatttataaaagcaagaacaatgaaggaaaaactcgaaaaaatatcatataagttgttcgaataaagctaagttgaaactaaaataaacaaatttctgcatgaatactaatctcaatccataaaacttttctaccactccctaaagacacagatttatacaaaatagaaaacccctctttatgtatttaagtacaaataaagttttaaacaaaatgttacacatgatttggcgcattgaagtaacttgcatcttcggaattaactagagaagttatatcctcccaacttattgtactttgatccgccgatgtactcgttgtccctccgcccaaagctgctcggacagcggctccggctactgaggcgtctccatagacttttgtgttctcgatggtctcaagattcactatgttgttgttgttgtttatgaacatatcgttgattgcttctgtctgaaagttactgctcccaaaccattgaagaatctcttgctgttgacttggatgttgatcactacttgtgtttggtaatggtgagtttgtgctgctgctcatgatagcaaaatctccttctcctccccctcctgatcccagatagtaattgggatctaacaaaagctgagagaaagagaaatcaaaagggtttgtgacagaatcttgatgatgatgatcagggtttgtcctttcctgttcttcttcaatcttgaccatgttcttgagtgtgatcaatggcttttgttctaggttacaagacggtgtcgtttggtagtagttacagcttgttggttccatcattccaagaggtatttgatgatgtggaggaggaagttgtggtagtaatggccatggtgatgatccaaacatgttgttaagataaagatccgtactaccattactttgaccttgtccttgtccttgttgttgccttttcatcatcaccatctcttgcttcattcgcgcttcttggaactctttcctttgtttgttcagaagcttcttcttcagcctcgtgttccaatagtttttgatatcgttgtcggttcttcccggcaattgtgcagcaattatagaccacctagaattaaacaaagatacatagtgagtctctaagtcaagaataagtgtgtcaattaataatattcatccatgcatatgatgatatatatgtaagtatatagtacctgctaccaatagtaacatagaggttacaaatgatgttgtcttcttcctcggagaagccaccatgtttgatgtttggtctcaaatagttgagccaccttagcctgcaactcttcccacatctccttaaacctataccatgtaaataaatatcatcaacacacaaatttaacacgaccacggtctcaaagtactatttggaaactctcagtgccaattttaaatcaaaagtgagttttaagtaatacataccaattttctgaggcaaagcaatccagttgcctcctgtgccactattctcgatgtaatctttgagtttggcgtcttcctcaggagaccaaggccctttcttcacgttggccttatcacaacacggtgctcttcccattttcttgattcttgattcttgatcttgttcttattaattgtaattctttttttcttctctctctcttatgttgatgatgaagagaatgaggaggatggtgtatgataatgcgtgtgtgaggtttatatatacttacatggaaatgtgtgtaaaggtgaaaattatatgtgaattgagaaaaaataaaggagagagagagagagtatataatagctggaggagatagtccttcatgtgatggaagatgtcaataaagtatagggaattaaaataaaattgaatcaaaaagtgactttatggaattggaaaattggatgataaattatgtgataaaatattagtagagttaagaaatgacagagaaggggggagactaatgtttttctcctttgtctttgctcctacatcagaatctagatattcaatatcatttataatttgactgagaaataatatcttagttttcttataattttactattcgacaacaagttttattataattttcctaatcataaaactcataagttataaacttataatgttttcttagccgcccccactcattgactctttctctcttccttactctattccgttttttttgtttggtgattaatttgttccccattctcatctaattttaaattaccatttttttacattcatatatatatttttttaaatgatgaatatgaacgagttttaagttgaaagatcaagatgaacatatctaaatatatattgtaatatgactgcatgagttgcatctgattcatcgatcctatggttctagtaaatgtatacgcataaatatgatttattgtatgttagtacacgctatagaactttcctcatgattcatgtcttggcaagtagtgattatatttttatattatttaatcttggtgattatatctgatccgcagtttaggagtgtgattaagaaaacgacatttctaatctaaataacatgcaaaatactttaaattcgattaataatgtggaatacatgagagattttacgaaagcttgaagccccacttgcatggcagcttacgaataagaaagaaagaccggttatgtgtacttttattacatgtgatatagacttggtcatcaagaataatagaagaattcaatgtttttccaatttgaaccaaaagtgattgaattagacttgtattgtatgtatatataaattatatattatagagtcaatattgtttagtagtttattttgtagtatacagtacaaaggagtgtattatatgttgtcgagtcgtgttcaaaaaaaagaaaaaaatatatataaatgttgtcgagatagagacaaatacttcgaatgtttggtgatggaaatgtgtgaattaacaaagaaaaattcttttgcccaaaaaaaaaaaaacaaagaaaaattctaaatttatttttatatacacaaactcccattgagcatgatcaatataagtatatagtagttaaataagaacatgacaacatcttattttatgtatcagtcttatcatggttctttgttataccaataaaaaagatatttgtattgaacatgtaaatttattaaaaatcaaagacgaaaacaaagcgcatgaattcaacaacagagtagcatcgtatttgaatagttaacgtcattaatcattcgtaaacaaagcgcaagtgattgaactaacagttcttggataaatacaaagaaacttcttcatactatatatatcaaagtttttttcctttcaaatccatcaattaaattgtctaaagaaatatcactaatcagaagatcacatttggtggatggtgaatcacttgctatttaatatacatttgtcttttgaaaaggaaaggagttaatgatatgtaccaaaagagatgaaaagaaggtagagatattgaaatttgtgagtgtaaattccgttacggttggtgaacaaaattttgccaaccctcggagaaaatttaccactaacaaatttatggatattaaaacttttctggatcaggtacgattttatctattattaatctccttaagagaaaaaattgtaataaaatataacggattataacttataaaatgacaaagtttcaaactcacggtgacaatactgaattgatagatgggtttgtttaattcatttataaatgtagccacttaataatcatgcagtattaaaattgaacctaatgacgcctgtcccatggacccaaaatcaaattttaatcaaagatttgatagggatgttacaaatctaactattataatttaattcaataaatttactactaacacttattttccacggcagctgagattaaggaacaagaaaacccactatacctcttattaaatggcgtcacaattttttggaccttcttctataaacgtatgctcttaatcttttgtgtaagataagttggtcaatttgggtgtattgtttattataatttagttccttgcaaaacaagtgaaatacgattgaatatacatgcgaatagcctattaataatagtgaaaaaatcataaacaaaaataattatgaattgtaacttttaattggttcgtttttaagtttaataaattagccaaaggcttctagagggaaataaaggttgacttgtctcctgatggttaataaagagttaaaagtcaaagcacttggaaaaatataaagtcttcaaattattgaggtacaatgcactgtttatatgtttttgtagaataaaatatgtatcgtcatgaataaaatatctttacttatggaaaagttagtgtaaagttaatttgaactttgaagctaagggtaatcactaatcaacatgacaaaatgtgtattcagatttcaacaacactagtaggaaacaggaattggtctttgcatcgtaggccatcccttctttttcaattttcccaacaaaaattcaataaactcttataaagtttgtattattgaacttattataatgttatcgcctatttaccatgcatatacatgcatttacgttaattaatacattcattttttctcaatatataactctttttcttctgcttgtctttatatctcagtaataaccaagacttgtgtttgtagtttgtaatttacttaggacgtattgaattaatataacatagtcatcttaaaagttatgttatattgggtttgataccaagaaaatcatgtttaaaatttttaattcaattattaacccaatgactttggaaatctatccgagataaaatcatatggattcgaattcgaatcatatattatctgtaaataaatgatatcagtttgtaaaatcttttagatgaaaagacacatgattgactaaaatccaattattcataaacaaacaacttaaaaacgaaaatgagtgcaaaaagcgagaaaaagaatagtaagtcaaaaggtaaaggcagagaagaggaaggtcattgtaatatgcatctcaaggcatctatgctctcttctatgattctatattcatctcatacttttttaggatccatttactttttctttttggaagtattctaaagataaaaaaaaaaaaaaaaagtgagttcatgatatgaatctcgtgacaaatgtacacaatcctttagttacactaaactttgaaatagtttaacctaaaatatgttattatatcgtaatcatgagataatcattacatctttttacaagaaaaagctccacgtctcctcttgtcgctggaagcttaatgagttcaataatatcctctcaaaaatagtataaagcatagttttttaaaatatcggaaaacacacagaaacacaattggattggattccttggagattatttttcagaaataaggttttgaaggaggataggagggaaatgtgtcggtccaaaaacaaagatagtgggatttttagattagattttgggtaaccaaataataattagtatatgattaaaataagtacacgtcaagttgcatgtagaagaagctgtcactcattaagcaaataaaaagccacaaatcagtgccgagttctttttctcatttcacacgcaatattgtttccaattcttcgccgtagctttctgatgctagcaaaattcattcacaaaacaataccaaagatgtgataaagacagaactatttttacacactttagtctgactagaatctgaactcaatctgaatagaggtttttggtagtttgtgtatgagttttgcaaagcctattaaaaaaaaagttgcgtacatgtacttgaatagcattcgtgctagaactagctttttattccccgttttagttattttaaagacagattattgtttatagtttcaagtatcagaatcttgaagcatcagaagcatggaattctaatatatcttctgtatctactaacacatccatatgtataatattgatatgttcgtgactggttttaactcaattgaacagtccagttcatgttatcttcgctcagacccatttgcaggctcgtcaaggaagtgtagagttgtttcgagactgttccaaagccatcttctccataagaaaacctatcaagatttttcggaaaagattcttagtgtaaactttgtgattcattagctatagttgttaactggtaaaagaaaaggtcttgtacctttggcttttgtaagtgatgcttccaaccggagataaaacaacggcggttcctgtgcagaaaacctcgtctgcttctaccaattcatcaactgtcacatttcgttcctccacctgaaaatcagaattaaggactcttaaaccgaaattttgttaaacttacaaaaccatgaagtatttgcagtccgtaactcaagttcctcagttttctgacatacttgatcaagactgttgccaaaaatttgaagaagggaatttggattttaccttgaaaccttggctacgagctacttcgatgatactcttccgggtaattccaggcaagatggttcctttaatttcaggagtagatatcacattatcctgcacaagaagagcccaatccaagtaaacaaagaatttcgtttccagcaagaaactttagatgttccaacgaaaagatgatctttgattttaccttcacaatgaaaatattgcacgatgaaacctcctcaagatatcttttgtgaaggcaatcaaggtataaaacatcagaataccctttagctttcgcaatcgactgagccttcaagacctaaaattattgatgattagttaagcttttgagaacagaggagaataaaatttgaaacaagctttcagctttgtacttactgcagcataattaccgatggttttaacacctccagtaccgccgggagttgcacgatggaattcagtttcaacaattaagttgatcggcgcaacaccttcctgtaaaagatatatcagactcagaaaacgaaatgatgattacagatatcgcatcagaccaactacaaaaaaaaaaaaaaaaccttgaagtagttcccgacaggtgaaacaaagataaggaaagtgtattcaggagcaggagcaagaccaagaacagctccagttcccattagcaatggccttatgtataatgatcctttacctggaggtggaatctgtaacaaacaaaagacgatcaatcgtagaatgatgtaacacaaacacataaaagaaacaaattcaaaagccttatccaaattacccagcgtttgttagctaatacagtagttttcacagcctcaacaaactgttcaacggttggagaaggcatacacattctttcagcgccatttctcattcggatcgcattctcctcaggacggaagagtagaatattcccatcttgttttctgtaagcttttagaccttcaaacaaaccctacacacacaaatacaaggcatcactataataacaaaacaaagtatcagaacttctacaattcaacttgtatagatcaagttaggtatagtcaaacttccatagatcagttataaaggtgatgacttagagaaatatacttacttgtccatagttgagaacaccagctgctgggttaatgtcaatgttaccaaaaggttgcaattgaccttgagagaattcaccatcacggctacatttcatggcgtacatgtaatccgttggtttaagcccaaaatcaatcttgtcccaatcaatttcggctaattcagtcacatcggtggtgctgcacccaaaagtcacaaaatcacagaattgtaaacacaacgcaagtacgaattcaagtcaactaaaactgattctgtcgttgtttccattgagatcgaagaagtcaaacctggaagaaacggcgtcgcatcgtcggtttcgggaaacttcactaacgatgaaattggaagagatgggagaaggacagtgacgaatctacaagaatcagaatattcgaatcagattttgttcataaaacatgagttttcggaagaagtgatattttttttaattaccctgagagaggaagagggaaagtttctgagggaggacaaagagtggaggcgcgtcgtggaagtggcggcgcgtgaagcacagaggatgtaatttctatgaaaacctgaggcaacggcgcttctctccatgactcgaaaatattcgtgatgctgatgttgaatgatgttgttcttcttcaaccttgttgatgtcaatgtggagcactgtagcctctctctcactcactattttttattaaaccctaaattgattaatcctattttctgtcattttcttcggatttctaatatcggcaaaactaatattttgggttatgaaaaggattttaatcgtcatctaaaaaaccaaaagtgacatttaaattatcaattaaatctaaatgttttaagaagttacttcaatatcgacagtcagatatcttttacgtgagaaaaacatatctagcccaatggaagttgtgggccgggctagaaagaaatctacagaatgggccacggtagtccagccgaacactcttgctgttgacacttactaaccgatgagctaaaagacatcaatcatcaacatcattacaagtagaagaaacaataaaccccgataatgatttcggctttttagtctcacaaatcatatattctcaaatacacacactgcaacacactagaagccaacgatttttccctaccctaccttaactaaccaacactactcactcgaaatctggaagaaaaaaaaaaaactgactatgattatcacatcgaccgatcgagttttaaaatcaatcaaatccatttacatacccttatcttctctagaaaccaagcccaaaaggattcatagagtttctgcatcaacagacaagaaacaactactcttgttagtgactttgacaacatatgtgggggttagttatctggtgaagactgagacgtaccttatgtgatatatcttctgttgcagcttcattatgaatcactgtttcagacgcgtttatcccagtctacagaaatagccaaagggtattattcatctgttgtaaagtttgcaggcaattcttctttaaagagttcatgaaaactacctgattgcaatcaccatcttctgtctcctctcccatctttctccctgcttccgaaggactttctgagcagtcaagggttgtgactttgttggtcacctctgtctcacacgttactcttgtgatcttaacggtttcactgatgactaccataccacttggcgtctgggtttggcttgatggtagttcatgtttgtcctcaggcacattttgcgggcttgatatgacactgagaaaaagaagatgtaagattcagattttaaaattgatgtaaaaacaagaaaacaaatgtgtaaaatttaatattgaatgatcagactttacctctgggtatcagcttcatcagaatatttttgggtaacatcatgtttcctctttttgttattgcttggttcgctagtctcatctccagatgtgttacctcttcttttccttcctgcttcaagtctttcaaccgcaatagacagtccctcagtgtaagccttttcttctcttctcgacgattctagcttcaacttttctgaaggcactcctccttcttcttcataatgatgcattagggtggatttctctggagaagtcttgaaaatcagattagtacatcgttttatccatgaaaatggagtggcagatgaaggggttaagccgttctgtctttccattgaagagttgtagccatcttcgctattactcacagtgctgactccattttgcaggtcaagttcatcatcccgagacacaaccttctgcttcaaagcagaaaccttttcccagctacgctctaaattggacagctgcattttagccatggacatatcatctaatgcaactttcagattctctaatttcttcagttcttcaatctcatgtcggatttcatctctttcagcacgaagcatatgcctttgcgtctctagtttttctcgttgcacctttagctcctcaaccgaatcctttaactctgcccactccctctctcttctttcacgatccaatttgatctccaacctctcagcatccaacctctttagttccacttggacatgttctaactctttctctgccatttccttaagcgactgtatacgctcctcttctaacttcttctcttgctcaaaagccttttctctatcccttgaagaattttccaattcttctcgtttgttttcgatgcaatactccaactctcgtttctgcatctcaatgcccaacaagaagtcagcacgctcacgctgtatcttgctaagccattcagaatgttcctccaccatcttattcatgaattcttcacgctctcggtttagcgactccacatcgtttttgtgctgatttctcaatgcatctctttcctctttgatgttatcacgctcgtccttgagatacattgaaaaagcctctctttgccgagttatatactctgcttcttttcttaactcttcccttttcacatcaatgtgttcccactcagcctcaaatttagctttctccaccttcaatctatcagcttcagccagcatttcaagcttttgggccctcaaatcatctaattcctccttaagtttcatctccagagtagataattcgcttgtctcactcttcaaggcttcaagtttttgtgttgcagaatcaacccgttttctcttgtcttctaatgacgtcaaagactgctgcagctccaggtccaattttctaagccgttccttctcatcctccagcatagtagtcttacggttaatatcttcctctgtagcaaccaaattcttctctttctcatcaaggttaaaagacttctctgttatatctttttctttctctgccaatgctcttgattgaacttccaagtcatgttctttttcaccaactaggtcttccctctgcttgatatcaacctcccttaattcccaagcccgtctcttgctctcaatttcaacttccaccgatttgctcttacattccaattcagcttccacatcagattttcttttcctcaggataacttcttgattcgctaagacgttctgaattagttcctgtattgaaagttaaaaagcattttcattaaatctagcaaacaaatgaacacaaaacttaaagtatgaatggtaactacaaggttggttgaatggtaactaagtatgaatggtaactcacagattccttgctggcaattttttcttcagcaacaagcagttcttgctccttcttaagtagcgaagattccctttcagagacagcctgttttttgcaaaaaaaaaaaaaaaacatgaaaacattactatcttgtctcccagaaatttttttgatgacctataatgcaaaaccaaaaataacagagaattgtgtgaataaaaacaaacctcttctcttttagcacacaaggctaacgcaatctccaagttggattttttgtcttcgaaggctttgcgttcctcctcaaatgtggtctttgcagtatctaaccccttttcaagttcagctaattcttgggatctagcaaaaatgtgatcttctctttgatttagtgaaacttgtgcatccaataatctttcatgctcttgctgcaagctcttccgcctctcatttaaagtctgtcgctcaataaccatttcgttctctttcgtttcacacctaaaccatgtaaagaaagaaccaacacaacaacttaatcccacacattaatagtacaagtccaaaagcccagtaaaccgagagaaaagacttactcagacttgaaagatgcaagacgccgagtaagatcatcttcacgactttcaacttctttcaactttctctctgcaattcggtgataccggttagcttctgcttgtaaagcctctgctgcgcgcatttttgcttcagcatctgcaagtttcttcagcgcatcctcgatcataacatgtgcttccgacatagtactcccagcagaaacttttgtttcggcacattctgcgcgcatctcatgcagagtcttctccaactgagagaaaaagaacaaaacaaaatcaataaacagactggaaacaacatgcttttgctagctctcaaagttaagaacttacactagaaatgcactccttcgcaatccctacatccttcttcaaactctcttctcgtttctttgcttcagctagagccgagacatatgctgatttctctcgcatatgtgttaggtcagactcatccacagaggccttaatctcttcatactgcgaagacaattcgtttttctccaaaaggagaagacccatgttgtgttggtaatcataaacctacatgaaagttaagatcaatatagcactgccaatagattttactgataaaacatgcaagagaataaactagcccatacaacaatctcaacctaagaggaaacaaaatcgaaactttaaaggtcccaaagcaaagcaataactgcagtaaaccaattacatcctataaaattgtcaggattgacccacgagcgtaacggagatgactgaaacaattaagggcagtcacaaaaacgaattaaattcatatgaactgaaaaatcaaacttcaagggcacaagctaatcccagtaattataacactctcattagttagtttcattgtgttcccgcctagagtactctgctcataacactagagaaagagaaaatcaacgaaaaatcgagaagcaaacctcagattctagcttggcgatgtaagcgattaaggcagctttatccctattcttgatcgattgttcatcaaacccagcatctttgagccgcttccacatgatttcttcagtgagagggcttttcaaaaccctagaattaggcgtaatcgtcaatctattagtagccgccgtactcggcgttatcggaaatcgctccgaacgagaagaagttgccatagtctctcccaatatcacaattacggagaatcgaacctaaattcctccgatctccgatcaaaagcacggtgcttgtctcttcactttttctatttctctctcgcacaacaaagaagagttctgtgacagtgcgttgtagagaggtctagtctctctcttctttttttaggtcgacgttttagtcaaaagagtttttattcgaccagtcaaaatgcccaaacgacggcgttttatgccttttcctcctcgtttttagcggccaataccaaaattttcaatttagtttaaacgaggtgattatatatggtaattaaaatttccgattttctcaagagtcacgactgtatggtaattaaattttagattttctactcataaccattaaatgtttcatactttcttctgccataaaaacacaatgtgatgaaaattaatatttagaagatatgattctttaagatccttgacagatgtgtttgggtgtatcagccagactcataaatcttattctgtacttcttttgtttgcgtgtattcatatataattacccaaaaacgaaaaagttaagctagtagaaaagattagtgatcattgagagtttacatagttacatggatttattcaaagcatgtgttcgcaatacaaagtttgcagattccgagttacacactgagacgattcttttcattgttctcttaccaagaacgttttaacagagaaaccttagcttctttttctactcgataagtttcgatccatccttgaatcaaccgtatctcggcttcccgctggtccacaagccatttcgggtcttctggtgttgaaggtcgtagatccaagtgatgtgcacctgagaaaaaaagaagaaaaagccagaatcaacttagtttgtgagtttcaaagagaatagatgatgattatgattatgatcatgatgttgtaagatagatataccaaaaataattcatcaagtcaataaaatgtagactactgctactatgatcaaacgtttttaagtctatgcaaatgaaaaaaaaaaaaaaaaaaaaaacagattagttacgagagagattgatgaggcttttagttataccttcttttgtgacgagagcaacaatggtatcagataagttcttgagaacactgcatattacgagtcaaactcaagcatttgtcacgattacgagattcgttttgtaaaatagctcttgggatttgagtaaagggaacaatattcttacctgccaccactccaaggatctaacagaccatttgagaaaatgatgttacttccaaatgacttcaaggtggtcgctatatccttttacattacagagacatagtaaagattcagaacacagcattgaaagaatcttgagtttatcaaaagatgtcttacatgtccaccgaactctgttgtgacccatttgggtcttggattaactcggaatgtattccagcattcctctttgtatgaagagtaattaaaaccataacctggaaacatgctgttttcttggttgctagacatgggcattaccatctccgtgcatgcctattgtaaacggatggtgaaagtgaataatggcgtcactgaaatattatcagaaaaaggaaagataaacaaagcagttgactttttcatacctgccaattccatccatccaacccatgagggtcatcatccaacttgaagcagtcaacatttccagtatagttgtagtacacacttatccctgcatatatgcgatctaggatgctagcattactaccagcaccgtcaatttttctgcagacctatagaaagatacaccacattgaacaaagactttaacggacgtggttgaacaatagcctgacgcaacaagcaaatctttaaagcatagcctccccggatcgttgatgtaaagatgaaaatccaaatgatctagcgaatgcattctcagatttcttctacaatattcgtataaactcataaagtgttacttcccaaatatacctctctaatgggatgtccaggcaaaggcatcatgaagtcagcaggatacggataatccaccattgccaaataactataggcagagtccagccagtctgaaaggtcatcagtactgttcaacaccctgcaaatcgagaaacaatccattgaactattactaatcaatacacttaacaagcgcacactaactccaatttatttgtttaccggcaaaagtgaaaagttttcgtcaactgcagaaggccattttccttctgaccctctgctattattgcatcccacgagtccttaatggtattgaagcagctgctactctcacgctacaaacaaaaacacggtccctatatgattaaagaaagacaagataaagtcaatcgactaagggaagcaaaagtatgtattaccttgaaatcatttgatgcaatgtcatagaacgtctcaggaggtacaacatcttcaaactgaagaattggagctgaggaagctaaagctcctattgcaatgtgaggatacttgagcctcatccatgctgctaacactgttgcatcaataacaacaaacacaaaaacacaattactccacaatctcatttaaaaagaattccactaacacaaaagttgctcacttacttccaccatatgatccaccaaacaacacaactgggcaagcttccgcagacaagttgcgtttcaaatcagtgacaaaaacagcaaaatcagcaagagcttgctcagtagtgagatatgataaagtggtagcgttcttgtaagcttcttccctgcttccataaggcatagactctccataatacctatgctataccaaatccctaaaatcagtaacaaattgcttcttctttttccaatttccaacaggaaaaataaaacaacaccaacgaacctcggggaaaacaagcaaggcaccgaacttgggagcgatatcccaaatgaatccagagtttgtagcaaaccattcaatatcaccttcgttgccgcagtaaaggaagataggtccaagcgcagaagcaccaagccagtgatcggaattgatgaggtagcgttgagagaatttgggaagatcggcgaagctgaagtggtccagctgctgtgagaagaacttagtctcgtatcgatactcgtttcgatctccccggaactgctggattctggcttctcggttctggaaagtgtagcgagggaaacgaggtaaaagcttggaagaagacagtgaagatccgtttgacggaaacactagagtgaagaaagtgaagatcagaagcaagcaaaaatggctcgccataacttttaactttgatagctttttctctccagttacaagattgcaactgcctcaagctgatacagtcactgataaaaccaaaccgaaccaaaatcaatccaaagttgaaccaaattaatgaattatcatactaaaccaaacggtttaaatcttttttccttttatctcgattaaatcctataacaaaccaaacaaatcgaataaacttaaatttgtaagtctagcaaacatctgtttattttccagtgacactctttggtaaccaaagattctctcatgaatcttttatttttgtgttgtgtcttttttatacaggctcaagcctctcaagctgtgtttttttaagggatgacgggggtgatggggtcaggttgaagagctttcttcacaagatcagtctgctccttaacatgaagctggtaaaatcctgtggctgtagcagctgagggaagacgaccaacgtatttgatgtcgttgaagtttcctctttgcagtgctttcatcgcggtgcaaagccttagggctatgtattggtatcctcccatgttcatcggctcttcttgacaccacacgatctctgcatctgttaaacacaagaacaaaagtttcaaagaattccataatcaaccaaaactattgaacacaaacttgagttttcgacgcctacttggatatcgctttagttctctttggatgagatcatatggaaatgggcaaagctgctctactctgcaaatggctacatcctttgtttcagacttctttcgctcttcgtcaagctcatagtagacctgattcattgacatttaaagtattaaatttcagaatgtgggaactttgttagttaatgacggaaaaagtggatctttttttttataccttcccagagcagaggactagacgtctgataccttcttcaagatcagagtggccactttgatctttgatcaaccgtttaaatcgagttccttgcttgtcaaatccaggatgtcctttaacatcatcgaattccgagagattagatacacactgtttgtgacgaagcaagtttttgggggccatcactataagaggcttgcgaaagtccctgtgtatctgcaaatggatgatatcaagcatgtgagtgtgaagaatacgaaaattaagtaacaacattttacgaacttgggataaatagatattttacctgccgacgcagaacatggaaatagttggcaggtgtagtaacattaacaacttgccaattacattcttgaatctgctttcgaagagttgggtccatctcagggataacgtaaggattgtcatcactcatctgcagttaaaattttcaaatgagagggaaacaaatacaaaaagtggagagaatcttaacggtaagtatcggtcatataatatacctgaaggaaacgttccaatcttccactggaatgttcaggaccctgaccatcatatccatgaggaagtaaaactactagaccagtttgacggagccatttggcttccccactgcttatgaactgatcaaacataacttgtgcgccattagcaaagtctccaaactgagcttcccatatcaccagagaattgggattttccatcgaataacccagttcgaaaccgagaacaccaaattctgaaagggagctgcatacacaaacaacgtaaagatcatgtaaaaacaattgaagagtggttatcatctctagagattaaaaaaaaatgcatacctgttgctgacagtgaacatttcagggtcttggtttttgattaggtgatcgaggggacaatattcctccccggtttcttgatcatgaagcactgagtgtctatgactgaaagttcctctttcaacatcttgaccacttagccgaacatggttcccttccacaaccagtgtagcaaaagcaagtgcttctccaagtccccagtcaatgccttctcccgattcaatcatttgagcacgttgttcataaactcttttaactcctctgtgtggcttaaagttctcagggaaggttgagattgcctttcccacattcttcaaaatctctggcttcactctgcaaaagaacaagggaatagttttccagcaaaatgttacattgaaaaagaaaagaaaaaaggccaaaaggcattgacaaactaaatgaaataaaaatgttttttacccggtgtttcgaatcctagaaatctgctccggagacttgaatccagtccagtgacttgccagccagtcacgtttttgtggaatataatctttacttgcctcatattcttcattgaggatagagcttactttcttttgaatcttatcaatatcttcttgggttacctgtccagattgcaagagcttctcctggtagatttgaagtgacgagggatgactgcgtatcacctatcaccaacaagtaacatccgtttttaaacaaaaaaaaagtacaagaaaagtatgaaatggaaacttgaattggttattagattatttcacagagatggatgatataatagccagaccttgtacatttttggttgtgtgaatgacggttcgtctatctcgttatgcccaaagcgacggtagcatactaaatcaacaacaacatcagaatggaacgtctggcgccactcagcagcaagctcacaagcatgcactactgcttcaatgtcatctgcattgacatggaaaattggggcgctcaaagcctttgcaacatcagtgcaatactgtgaagaccttccttccctgggatcggttgtgaaagccacttgattattcaccacaatgtgcactgttccaccggtacagtagttaggaagtgcactaagatggagagtttcatacaccactccttgtccggcaaagctaccatccccatggatcaaaatacccatgttctttgttctgttctcgtctttcgtgtaatattgtttcgctctggttttacctatcacaacaggatctactgcttccaagtgactgggatttgctaccaaagacaagtggagatgtttgcctcctctagttggacgatcataagatgtacccaagtggtatttcacatcacctgttccggtgtaaagcccaacttcatctactggcctagtaccaccgctaaactcgctgaatatttggcgtagaggttttctaacaacattacccaaaacattaagtcgacccctatggggcataccgataactatgttctctaccccgagatctgcagacctatcgaacatctccttcatgccaggaatcaaagattcagcaccttccagtccaaaccttttagccgtggtccacttagtagccaagaaattctcaaactgtgtgctccaggtaagcctatcataaataaccatccgacgctcactattgtactgtcgaggagttggggtctcgatcttgtctctcaaccagttacatttatccctatcagcaatgtgcatgtactcataccctatagtcccacagtaagcttgctcaagcctcgacagtatcgacctcagtgtttgaaccgggcggttctcagagagaaaacccgacatcctccatacacccagaaagaattcccgatcaagatcagcctcagtaaacccataaagacctggcgtgagatcctctggaatctctctcttctctagacctaaaggatcaagcttggccttcatgtggccattaacctggtaagctctaactagcaacaacaaacgcatgctttcttgaatggtttgccccgagataccaggcgatgtagaagcctgacccacaaaattcctaaaaaagttatcccacgactcatcaacactgttgggatcagcctcccaagctctttgtaactcctctagatacacactgcttgttccatctaagaagctatcagttagcttagaaagtgggacaggacgtggaacaggtgcagcagactctgcctttgatttgagtattgtagagtgaaaacatctggtttgacaaggcaaaacccttgttctagtggcatatgaaccacaacgagactgagacagtgtccttcttatggcaagctttgccacagaagaaccgattctaaaccaaaccatagcttaagtaatctatcagtaacaacgaaccatacaatcccagagtctccgatttttcaaattgtttaatctctgaacctgaaaatgatccattaaacaacacaataaaatactcaacaacataaaaagaaagtagataagtcaaaaatggctaatcaagtaacgacttagttatatatatatatatatatatatatatatatatatatatcatgcaaacatacaaaacatagaaaatttaaaacgaaaataacctataatcccatattttctcagcgatctgacctcattcagatcatcgaaatgtttttgaattcccaaatattttggctttaacaactttcaatttcggagaatttccatcagagaaaattaacaataaccaaaaaaaagtagtaactgaaaaaaaaaattaagcaggaagattcacgaagaagacgaacctggatcaaagatggagacgatcccagtgaagtggcttctaggagacagagaaagaaggaaagaaaagtaagaaagtgcaccgccttgaaaaatccatgtttggctacaaggataactatatacctgttattttaatacttatataaactgggcctcaataagattcattaaatattgggcttttaggcccaacgtaacactcgaagtcctcactcaaatacttgttcctaattattaactgcgccataataagattcatcaaatattgggcttatcggcccaaaacatagcactcggattactcgagatgcagaaagtttcagaggttgaagatgatctgcgtagatgatgaatgtttctggagaatgtgtaggccgtgaaagatgcgaggaattagccaagtcttcttcgttttaccggaaagtttactcggaggtttggttaaccatcgatcccttcccttcttctgaaatcgagtgctctcacatattcaacgaaccattgttgtattggtttcttagatagaagaaattggatgggaaccaataaggagattaggtggagatttaacgttttttagctttcacattctgtaagttccataattttagggttgtcttcaaaatcttacttaatgtgattagtactttgcaacctatgtagctccatcttcatgtgacatgttagctttgtgccatcatcatgattatgtacagagataagaagggaagagctcacaacttagaaattcaactgaacagagactatcctaattcaccaccttctgtttctgcggtttgttaatgtcaaatccttaagcttttttcattctccgtagcgaattaacttttgcttcgatgtaggatgtgccatatatgtttacactagaatggtcaacaagttcaagattgaaggatgtaatgcaccaattccaaaaggtagatctaagactttgctacattctctctttgtaatcactaatcagcttgtttttgttgttaacagcatttggactatcttcaagaattttggtctgtcttggacaatatcgataaatctctatgtgttgttgatgtcaagcaaccagctcgtgcctctgctattcgccggattgatgctggtttaatacctttacctcaattccatttgtctccatactcttttatttctgtcttgacgaaattcacttttatctatctctacttggttcatttttttctcagggaatgattgtatcatcattgttcatatcgacttcaaagaccctaaatccctaccagagtatgtttctagacaaacacacactctcaataacctacttgtcgacattttttaatagttataagtgcttagacaggtcccggtttattggtcctgtgccttcagctacgcatatgaacaacttgcatatgttatggagaagaaattgcaaaagatggtaaaattattttgtctctactctcccattttaaatctctttcgagaggttggttatatagcatggagttatatggattgttgaaagcaggaatgacgggttaatgataatcatacaggtcaaatgaaagatcatttcctgagaaccttgaatgtattctaggtactgagcttccaaagcctctaggtctccaagtggaagacgatcaacaacaagttgaatgtgggatttgctatgcgcagtttctacccaccggtgatttcttaaaccgaaaaagcaatgcttcagaatagtaatttgctttgatggttcgctaacttctcatttactttaatctaagatgaggagctcggagctagaagtgggacacgaacagattacacatgtgaaaacatcagttgcaacaagtctttccatagcctctgcctcacagactggttaaggtctatcacaacaacaagacagtaagtggaaaccttaatctctcacgctctcatatccaaacacacacaatccttgtgctctaaagctcaattatgatccaatttcttgcaggtcatttgatgttctgtttgggaactgcccttattgttcagacccagttgcagtcaaaaccagcaacaaatagagttagacaaaccatcatcctaattagctgatatctgaatgttgtaatgaaacgtgatacaaagagaagagttagtacagtaatgagtagtagtagtaagtgaggacaaaagttcctttttactatttttcttctgtacgtttaagataagactcatgtagctttcaaataagagatgtgaatgtaccttgtttttttcttttgtggccactcaattccccaaagctgatctatcaatcacaatcaatgtggagtttcaagcaataactcttttacttagtaattttgaaaaagagtatttgaatgctattgtttgcctttttctccatggatacatcctttctctccagctgtaatagtactgtcggtggcttaaccaatctatgactctatgtttaagacctcaaaagtatttgaatgctataatttaaacaaatttactaagcaaaaaactaactaaggtgaatttttttggggttgcaaattttaggtgagttttcactattaaaaacaagtatatgatatatccactgagtttatgtgaatttggccactagtaaatttacttattggttacatgctatatatatcatgtcatcttgttaatatttctgattagtgttatagtatgcattcaacaagaacataaaataatgtgaaaagggagaaatacttatcagggcaaaactaaatgagaactagttcgattctgaagttgaaaattagatatgtacaacatcaacccattgatttcaagttttcttggcatttcttaatgagttccacattatttcaacaagctctgaacttgataagacattttccttctaaggtttaatgcaaatctgacgcctttgttggcaatgggaccatatagccaaaccaataatatcctcttcgtgcaacaaatccttgtaacatcttatacgcttcgattatattttattttgtgtttgtggttatttttatgttaagattacaaaattttagtggtttatcaaatcttttgtttacaatttggaatttgtaatccaacatttctaactctatgcgtgtactaatgatcttctaaagaacatgtgtctcaaggttacgagtttaaactatcatcgtgggaaagatgactaaatttagattcggaatttgcttggtaatgaaaaaaaagttatgtgttcgaaacaatcaatgcctagccataaggtcacagtcacataataaattgtcttcacagaattcatctatgtttataaaaatttcaaataaccacaaatcacaattatatctatacacactcacgtacgtctgcacaattgcgtaagaggacaatacaatccacattttcccacaatttatatataaaatctcgtacaagacgaaacatgatcattgcaacgtacgtatgcaattattttcaagcacgacactcgggtggtgggacaggaaacctagaccggtcagtacaataatcataaaccatatggtttactctaacccaccggtaacgtcgagcttcaacggcgttaagagactgataggcataaccttcccaccaattatgagggttcgatggacaaaaggttggtccaggaacaggacaaccttcgatgtcgaaatctttgtaataagcataaaatggagctttgctccaatcaattttctctaatccaccacgtgttgcccagtcatctgcttcccataatgttgagtatactcccataggttgtgatgttgggtaagctatgttcttggcttcgttgtttttgtattctcttattggcacatcgtctacgtaaaaactgagtaaccaaaacaaccccacgttaaactaaggtttttttaaacagtaaatggtgattttttgttttgaaacagtaaatgttgattctagttgaaagtacaattagagaaaagcttacacaatgtgtttgtgtgaccataagatagtgtaagtgtggtaatccatagatgggtcgaaccaaagattaactctttgttctctatctcctttgccatgagcaaatatgtttgtttgcactgagtaaggttgaccacttctgtttcccaagaactcaaaatctagctcgtctctcaccgtggccgtatcggagttcatctatagacatatcaatgatttgaccgttagtgtttcaagaaaatgttattttttattgtgtgaatgtgtaaaatttcaaaactagtggagtaaaatgatagacttacgtagaaagcggtgaccgtaccggcagagtctccgggaatgagtttgatcttcatgctcactcgtccgaatagatattttcttttggaagcaaatccacatcctttaaaagacaaatatgaacatgtacagtgagagtatattacataaaaacaccattaatttcaaaatgtttccgtttaaaaatataactgtggcgttggtgtaccagtgctctgatcaaggacgagctggatagcttttccgtcttccatttgacggatgtgagattccgaccaggcggctttgaaatcctcgacgaatgtcgcgggtcgagcggaaacccgaatgaacattagcgtcaagagagtaaaaatgcaaagacagagagtaccgggaaaagaaggggaatatatcttagccatctaaaaactgtctgtgttttacttatgagttagttgtaaaagtgagtagagagtgataagtatgcatgtatttatatacacaatgttttttttgttgccaatgggatttgaggatttaagacgctgacgtggacggtaggagacatcgtttagctttccacacagctaattgcgagccgtcctcttggcctactcatttattaagctatattctaaaaattacctaaatttgatgccaatgaaaatgtaaggatgagaattatagattaatcagacttaaattgttgttcctttgataaaatttatgacgtttcttatgacatatagacactatataatatatacaccattgacacgcctaatatacactaaaaggattatcaatcatcatttgatcagtctctttataaaagtaatgaatgtacaacgtgcaattacaaacattaattaattaaatgtttcgattcttttcttttcttttgacatatgtttcaaaaatcaaattaataaaagaaacagtgccaagaagtgttagggaagaaaatgtatacgaaagtgtggtttacaaacgtgaaggaatttaatgtctcaatcaaaggatggttgaggtacataacataacctatggtcctaattattttggcatagagaatttataatatgaggtttgtatccattggatgtttcccaagggccacctatggcacctacgacctactaaatacttgtttctatccaaatttgaatacaaaaaaaaaaaacacagaagaatataaaattttattggatcatatttgagttcatagcaaaggtcgactcgagtgtacgtagatctgaaaaaaaaaactttggtaccaaatcacatgggataattatgatctacttcaacttaacatgaaggtaagaacattaatttcatttctcatttcatgttttgttacttcaacatcttagtgagactcgccgacatttttagagagtgagaaaagaggaataaaaaaaatattcacataaaattgtattttattttcataaataagaagaaaaacaaaacaaacttcaccattaccgtagctaaaaaagctaagctcacaacacctaaaaattaatcattcaatttcaaaggatatcacaatctaaccagaaatgaacctttgtttctgttttattacaaaaccacacaagaaactctcacatgcaattctctctagaaagcaatatagatagataacttaccaacagaacatagtaagaacacaggatcatatcatcgttcatactcacatctcagtatggctctcatataccccggctgaccacagactggagattccctcttgtcccgcacagtttgagtggaactgttgaatcagtgttgagaccattgaatgttcttgatatcgataccttctttaaccatttcataaagcgggctcatttccctcaacttctcaacttgtttaaccgtaagctcgaccgctttatcaatctcttccttcgtggtaaacctaccaatcccaaacctaatcgaagtgtgagccatgtcttcatccacacccaaagctctcaacacataagaaggctccaaactcgcactagtacaagcacttccactagacactgcaacttccttcaatcccatcaacaaactctctccttcaacataagcaaacgacaaattcaaattccctacatatcgactatccattgaaccattcaccacaacaccatcaagcttctctctaaccccattcagcaacctctcctgtaaccccttaatccacttctcatcatactccatctccttcatagccaactcacaagcagccccgaacccaacaatctgctgcgtagcccccgtaccactacgcaatcccctctcctgacctccaccattcatcaacggctcaagcctgattctcggcctcctcctcacatacaaagcaccaacacctttcggtccatagatcttgtgagcactcatagacatcaaagcaacattccacttcttaacatcaacaggtatcttcccaatagcttgagcagcatcagtatgaaacggaacattatgctctttgcaaatcataccaatctcctccataggttgaaccacaccaatctcattgttcacagccataatagaaactagccctgtgtctggcctaatagcttctctcaacatctctaaatcaaccaatccatcagttttcacaggtaaataagttacctcaaatccttcttgctgcaaatgcctacacgaatcaagcacacacttatgctcagtctgtgtagttatcacatgtttcttcgtgtccttgtaaaagtgcatcactcctttcaccgccatattgttcgcctccgttgcaccggacacgaatacgatctccttcggtgaagcttcgatcagtttcgcgacctggtttcgtgcgttctcgacggcgttctcagcttcccagccgtagagatgcgttcgcgagtgaggattcccatactcatggatctgtgaagcattcatcgcatcgaatactctaggatcaatcggagtcgtcgcttgcatatctaagtaaagaggtctacctgaaattcgaactcctttcatcataatcgattcatcctcgtaattcacctccgtcgcagcagcggcggttgataagtagcgacaccgggaaaaagtgccgtgtggtttggttagggttctgcggattgtggcagagattaccttagacgccatgtttctaaaacctcggtttgtgtttcttcttccgatttttgtctagttgattgattctcttcgattgcttctccgtgaagaagaagaagatgcgagaggtgaatatgttacggtcactggcggtttcatgacggtggtaacgtggtcgtctctgaaaccctaaattttcgagtccatgaaagtatcaaaagcctatgagaaactggcctgttaatatacataatgggcctataagttgcccaatactatttttatttttttctttaagaggctcttgtatatttgtctaacctggtccactaaaaaggtgaaaatagagtctccatatcgccaattaaaaaccgtgaaagttcgtctacatatcgaatacaccttatccgctttgatctacaacataccaacaaataacaattcaatcagaaattacatgccagacgaacaaaaactactacttgaagctatttcctaatcctgacataggaatttagaaaaaaactctgagaatcagcagctttaaccaatttgaactatagctagacgaatttttggatctaagaaagcaaagttgtgacgaatttgataattaaataaaaaccataaacctaacttactaagtaagagactataactatactgaaaacatcaacaaaaggaaattttcatccggaaccatttgaattatccttttatatatgaaatttgaagtctgtagagtcttgtgaagcaagaaaacaaaagttttcaggtagttttcctttgtttttttttggttcaaactttaagtagtttaatttctaaaaacccaaactttaaagcaaagtccaacctatggctataataatgagtaacaatcctagtcggattttgtacattatagaagcctaataattaaaagcctaggattaatatcactctagtgatttcttctctttaagcaactctactactttcctcatggtcggcctgttgataggaaaagacgacgtacagagcaatgcaacgtcaagaactttctctatctcttcatactctctcgtcgaaagtttcatctttggatcaacaagcttgctaagatctcgatagtttccaagtgaatcttgattcatggctccgtcttctgctgatggagaagggtaacacaaagctgcttccattgcaaacttaacaatgtccttattctccccaaaagacgaatcgttcggtctttttcccgtaatcagttcgagtaaaaccaccccgaagctatagacatcgctcttctcattcacttttgacgtataaccatattctgcatccacagaagaacagtaatgttactaaaacgcttgcgtatagggttttaacgatttgatattgtagagctaagaattcgaacccggagcaatgtagccgtaggatccagcaacacaagacattgaaacatcggagacaccatcattgtcttctctcttcaacggtttagctaaaccgaaatcggcgacacgtggcttcatctcatggtccaacaatatattattgcttttgacgtcacggtgaacaataggcggaacagagtcatgatgtagataagaaagtccttgagcagcaccaaccgcgatcgaaaatcgtgtcgtccaatcaagtggagaaacggcacgatgttctttctccgaatgcaaaacgtcacctaagctgccgttttccatgaactcgtacactaagaaccgaaactcctcgccgttgcagcacataagaagtttcacgatgtttccatgtctgacccgacccaacgtctctacttcggatcgaaaaacagattcagattccgttttttgacccgtttctccccagagtttcttcaccgcaagcgtttgacctgatttgagtttcactctataaaccaaacccgacccgcccgacccaattatgttatcttctgttaattgcgggtatatgtcttcctccgtgaacccgacccgctggaagatggttattttgttggtccgtttcggttttctcttgaataacggtttggttttgatgaatagccaaaccaaagctccggttagtgcaacgatgcagaggattgagattgggagaatgtaccgggtttcccgtttggatcggcaaggtctaatcggatccaaatttggggcacagagattcgggttacctaagaaactgggtcgaaaaatatcttgctgaaatccagaaggaatcttaccatagagtttgttatcggagacgttgaattgattaagcttgagcctcaacagctccgccggaatctcaccggtgagttggttgttagagagatccaggtagtttaaaaccggtaaatcaccgagttccggtggtatcccgcctcgtaaacggttgttggagagatttaattcggttaactcggtgcacgaactcactgaactcggaatctcgccgtcgagcatgttctcctgcatctctactctctctagattcttcaatttgttgatgcaagacggaattgatcctaagaaactgttgcggctaagatcgatgactctgagatcacggagatcacaaagtttgacgggaatcacaccggagaagttgttagcggagatttcaagctgagatagatgacgagctttggaaatcgaaggaggaatcgaaccttgtaattgattgttgttggctagctcaagacgagtaagaggaagttcccaaaacctagccggaacttcgccggagagtttgttatccgccatacgaatgtaattaagcgaatgacaatcgccgtaagattccggaatttcgccgcttaattgattgctgaaggtgataatcttctgaagttttcttctgtagcacaaatacggcggcaattcaccggagaatctgttcgtcgagacatcgaattcagagatttctgagaatttcccgagattccttggtaacgtccccgtgaaactgttgttgaagattttgaattcaacgagattaggattcaaagctacgacatctggtaatcctccggtgaagaaattatcattgagattgaaagagataagttgcagagcagcgatcttttccggtagttcaccggttagattattctgcgagacatcaaaattcctcaattcggttaaatttccgatactctccggtaattttccagataaccggttatcgtagagctcaatctggtaaaccgattcgagtcttccgatactctcaggtatttctccggtgagactattcatagctaaatcaagattctctaacaacaccagattcatgatcgaatcaggaatttctccgacgaggttcgagtgagttagccgaagatcagtcagattcgacaagttccccaaggttgatggaatcggactaggatcaaaactgatgtaagcgagatcaagacgagttaactcagtcagataacccaaaaacgccggaacgattccactgagcgggttaccattaagattcagaacttgcagagcagtgagtctcccgtaactttgaggaatctcaccggtgaagaggtttgattccaattcgaggactcgtaatttacgaaactccggtgagaattccggtaatttaccggagaagttgttttgattgagaatcaaattctgaagtttagaacagagggagagaggagcagaatcaatcgtaccattgagattgttttgagaaagagtgatgttgatgagtgtacggatacgacagaatccgtagggaaagccaccggagatattatagccggagagatcaatggtagtgacggcgagggagctaccttttctgatgtggcatgtgattcccgtccaattacatggactccgattatctccggttatgacccaatcttgtaaatttccatcggggtcgaaaagtcgggtctttttaactctactcaatatctcagcgtctccattggaagaaacttggagaaaacaagaaagaagaagtaaagagagaaagaagaagagattagtattggtgagcatcgtgttgggaagagaggtatgaaacacgatgaaggaggtgagattgtgttcatagaatgggtttttgaaaagaagaaaaaagttgagtaacgtttaaagagtttgagattgttatttaaagatggacggatttgctggttttttttgctttcttttgattcacatgggaagtaggtttaagtttgagtgacagtttctttcttaagtgtttgtttggagtcttttagcttaaagaaaagttgagaaaaggaatctagaaaacttttattagtgttcactcttttttgaaaacgccaacgttatctccctttttttgtagttgggtagatgaacctaataatttaattaatgtatggtaaaatcgactaatctagaaagatcattcgttcatacgtttggtacaaatttgcttatcggtaagttttcattataagaggaaggaaaataacagtatgattgtgaaaaaagtgaagtgcgagcaaagcgtgtgttaaaatgtccaaatctcttcttttttttgttttcacctagcacagataagcaaaatgcagagcacaaacagaaaacatgaatattaatgtacgttatcataataataagacgtattttgcgtggacgtattgtaacgtttcactctctaattgtaagctagtggtattagtgtgcgtgaattttcataatcatagttgcattctcctagattctgtacgtttttttggcttctattggttgtttaatgcataggtttgcggttgacatataaaaacaacatgcttgacttcagagtctttcgatgtttttgatgaagtcagagttcattgttgtttaatcaattactcctgcagttatgttgatggttaattgaacaacagttagagtagctttgagtaggaggttggtaagtgtctcttaaatggatgtatttagttagaacagagaatgttaggtaatgtgtagactttgtttgatcaactcttctttagtcatcagttaggcgcagttaatgtctactcttaaaattaataatttaacagtgaaatgagactttttacactcgcagttttgttgtatcaatgttttcttcattactaaagtttgatggcaagtgtaaaagttaacttcggaattaaatggaaggaagccatttggggagacactagaaccacattcacgtatgactcatcggattttgaggcttctctactttaattagcattcaacgggaatgacattcacgtattatttaacgggaatgacatttgctttattttcattttttgtttgcgttggagtatgcaattgccggaagacactcttcgtcgccgtgaagacacttctgtctgattaaatatgtactgttataggcaacattttatctttcccaaaaaccccatcctaatttttctaaattcatataaaaattcgtttttagactcttataattagccactattataagaagtactccataaaaagggggaacaagtttgtttaaaatcctcaaattttatttttaaaatggatgagagaatataatatacttcttccgtttcataatataagttattttggaccaaattttttgtttcacaatataagttgttttcaaatttctattatatattattttaatgttttataattatttctattatgcagtgtcttttatgattggttaaactttttaaaaataaatattcttaatctgcgtgcttttagctaaaacaacttatattgtgaaacggaaagagtaccatatatactaaatctaatcgaaatatccgattacccaaaaatacattggttactactctttacccaaatataaccaaaatactcaaattacctaaaagaaaactataacattggctacttttatcccaaatatatccaatttatatgaattactaaaaaacaaaatctagtatattcgcaggggcggactcagcagaaatatttaatgggggcaaaatgtctttaaatgggtttgaacccgatacttcttgcttttagtgggagcatttcataccattctgttactttacttactctgtattattaaaaaacgtaaattatttatattttactggtggcagttgcccccatcacccataacgtggatccgccgctgtatattcggatttattattttaattttaggttcttgaggtattacaaatatatatatatatattagtttagtatataactaatactgttaggtttatatttgtattgggtatccacatgtattagtttagtatttatattctaaatattgaatctcatatgaatttagtatttatagaacctttaaaaaaaacaaaagagttgaaaactttttaaaaaaaaaaaaaaaaaaaaaaaatgctaaatatacatgaagatgtgaaaaaacatgttggatttgtggaatcgctaatgaccatggttacatggcaggatccaaaatccggttagatttcacaacgtcatattaatttaatatttatagaagaaaaaaatagaaaaataaagagagttaaaaacctttaaaaatcaaaaactttgagaaatatattatgttttgaaaaatcaaaagtagtattaaagaccttttttgtaagtaacctatctataagattatagattataaacaagatagggatgaaaattgacctagccgaatgggatgatgcattgtctctgtagaattcatgtaggataggcgagagtcagacaaaatttaaaaatgggcttgtcatttgtccatctttattgggctttgtaatgtccaaagagtttcaatgactgcaaatccgtctctctcacgctacgacaccacagatgagaaaagctctgaagttgcaactacatctacatacaaagaagaaataactgattaggaggaatcttgaataaaaatcaaaagtttgagaaacatatgattagggttagaggggaataatataagaactaaaattcaaattggattagaagaaacccactttgaacatgagaattatttgttttgcgatcaaccagataattagatactaaagattaacaaaccatataaaaagatgttgatttggccaaaaattccaacaagacagtagataaaagagaaacatagataaggaagaaaaataccttttgaaaacagagtgttggagtcggcgcaagttgatttgatctcttgaagacatcctttgcttttgcttatgatcgtcatacccaaaaaacaaaattcgacctttttttttgaatctctgaacgtttttctatatgagaaaagggaagagagaaaacaaagaaagtttttctgatatcagaaaagagagagagagagaagtcgctatcgaatggatctctgacgctggagttatacttgtaaacaattttatgtacgttgtatcaggaaacataaaacctagagaaaaaggaaaacttggctgtgagagagtcgaaattaccaaactatccccattgaaaaaaggaaaactatttttgaccgttggaaatttcgttaacgtaataacgcctagtgggccagtgggtgagctggaactccaattttgttagtgctcaaaggcctcgacaagttaataacaaaaatataactttaaagattcaaaattcacaatcagcagcactcaataaaatttattgtcgtctaaacagagcctactccacctttcgacacaaggtggcgcttatgcatgttaaatcatttttcaagatattgggcttttttagttttcaaaagtaaagcccatattatttttgtgattcggcttttcaggatccaactatgtataatctgagcttttttaaaaaataacatctgattcgaggataggcccattatttcatggcccaaattatatgaatcatttttatgttgtcacgttttgccaaacggatcttttacccaactccgcataaaaaaactttcacggacgttttatacagttaaagatgatcatataacaacaaatagtgattgttgaccaaacaaaaaaaaaacaaatgattcggtatgtggacgttctcgtgtgtctcgtgtgatctctcattttgaaaagaatattaaagcaaagaaagaagagaggaaatcccaattatgagtctcgtgatgctttacattttatcgtgcggtttataggaatgtctatgatacacgtgtgggaactcacgtgtcaaagttgactgtgtatgccctttttggagatactaattggtggaatctggaatccaaaggcaaaacaaagctaaagttttgattcgcaattataactacatgctttaaacaaagttttacatgataaatccaacttatcgaatatgtgatcattacttcattgcaatttgtaagcgataaaatacaagagtccaaactaacatttggtttgctgacatttggtgtgaaggcgtggttcgccatcgatcttattattcatccattggtcagctcatagctaaaatttcaagataacaaagatttcaaaaagctgatagatattgtttatgcatgtgcataacttataataatggcagtaatgattacgtattagacaatgcattattagaaattagatcatgcctggtaaaatatagtaagaaggtttgatcatgcaaaacattataatatttctctatcttgtaaataatgaggcaagtgaactttacagctaattgtaatttaattatttttaaaagagctatgtgcttaaaattcaaaaggatcagaagcatttggaaatatttgtcacgtttgattttcaaaaatgtatgtcaacaaatagaaaaagtggcacttaaccaattgtctcttcttctttttgtcctttcagtgtcacctcactattattactttctaaatttaaccattattaatctctgatgataattctctggttacaagaatatacatttacaaatttacaatcatctcctgctttcttctttaagaaaaaaagagtactgcaatcatcataatatacaagtacatcattactcgtgaaactataaaactcaaaagtgattttgtttacgtcgatgagcatttacgaaacaaagcgaatctctacctagctagcaccacgttacgatatcatcgtatatgacatataattttctcacacacattttcttgacatacgacggtctcatatgtcacggacgttcatccatgaatcaaattcatatactaactatttacgtcctttattttacttagttcagtcatatgtcacggataaacaaacggtcattcttgatgtccccaagagcattccaactccattacatatatatatgtaaacactataaaatttaaacggaatgagtaagatttgggccaacacaagtcactagtacgtgaatcatagtaaaaggtagagccactataatcatcttacataattagctagacactttcgtatattatatagtgttagtgatagcaggtacgaatattaattagggtttttgtgtttttcttcttatgatgaccagcaactaattatacctaatcacctacactaaattctgaaatcttttaagaaaattgagcggctaataccaaatgtatacaaactgcatttcacatatcagatcaattgataaatttaaatttctaaattttgttattgtaatttaccttggtgtaaggattctctttagcaactacgagggatgggacataactatgtcggggaaaacaatgaaggccaagataaagacaaaacggacccattcaaaacacagtgcactccttcttctttctacgtgtctctgtcacatcacaatcataaattccacgtggcattttcacccctaaaacttaccaattaaaatgtttggattgatatttatatgtgctacataactgataggtctatagcatagacacagagtaaattgagttagaaaattggagtagtctaattttcagtgcttatgagttgtcacagacgaaaattctttgagataaaaaaagtttctaattaatagctttcttttgtccggaaattacgcataatgtgagaatataaagctgatatgaaatgacattaactattgtttttcctgagtcttttacctttatgatccatcgaacatgaatatcccatggacgcacagtgaaatggaaaatagttgttgtatatgtgatgaaatcgtgaacacacacgcaattgatgtgtgcatcaaggaaattacaaaaacactttttgtttgtttgtgaaataaacgttacgtttatgaaaaagataaaattgcagtatcactcgtcaaattcttgcttggagtatagtaatgaaagaatcataaacatagcaacggaatttgctaagtggatgacactttttggaaatgtcactaacttagtgagtgaactaaatcacattttagtgcaatatgttatcatagagttacgtgagaatccctatcaaagctaacacttagcccatgatctagttaggctgttatctccaaaatgtgaacaaacacgaagatagctacaattttgtttgtttggtccaattttctcattaaaacctagacttagatctacaatcatcattggaaactacgtacagccaaatgaaaaccatattaatgtaagttgggtgtggcttatatttatgagtgatcgatgaaatcataaatgctttacatagagtagaaattgcttcatgagcagggaatagagaagagatctcatcaaaatcattaaagacttaaagactttggtatatattttgcatgtgggagaaatatcaccttataggcttctcatattaactcaaaaccaatcattatctccccaccacatttatacctttgacctctcacatgcttcctctttaattattcttccaagttaacattttcaccaaacgcaaacgcaaccacaactttaaccgctctcaaacatcttgttgatggagatcaaatataatttctgtttgatgaaatttctttcaggttattgcaggtgttagtagctacatttgaatctttgtaacaaagtcaaatacctaaaaacaataaagaaggtgatcgttcatatcagttgcagatgcgtgactctatagcaagacatgcaagagtgttcacattacacatttcactcttttcaagatattttgaaattccttcaaaaaaaaaccaactgtacattttcattaacacaaattacaaactaaataaagccgaataccgattaaaaacataaaaaaggaaaatgaaacacacttaaaaagagtttaaacaaccttctttcaaaaaaaaacctactaaaccggaccaaagcacaaaccgtactaagagggattaaagtaaattaacaaccaaatctcatcgctaataacatttatgaaaagacaaatttaccccttataccggtaccctaaattaaccgccgtgaatcagaaaactctcatagattgagtagatccggcggactttgaacaccagacttcggcgaaagctcactctccggcgctgattccgtcatcggctgatccttcgacggtggcaacttcgggatctcagtgagaatctgaacaacttctctcatagtcggcctctcaacagcttgttcttctacacagagcatcgctacatagaagacgtgcgtcacttcatgaatcggaatcgaagaaagtctcggatccaatactttcagaaccgaatccttgttcgaatcagtcattttacgaacccattgcactatatcgacaccgtctccaaattctccgacaggttttcttccggtgacgagttccaaaagaaccacaccgaaactatacacatcgctcttctcatctaccttcaacgtatacgcatactctacacaaacaccaaaacagagcaaaagatagtaaagttagaaactttaaagagaaaaacagagcaagagattgtaaagttagaaactttttttgaagattttagtacctggagctatgtagccgtaagagccagcgattgcagacatacattcagaagtaccggaatcttgaaggaatttagcgagaccaaagtcagcaacatgagcttcaaagtttgaatcaaggaggatgttgtttgatttgacatctctgtgaacgatcaatggagaacaatcgtgatgaaggtaacagagtcctttagcagcttcaagagcaatcttgtaacgtgtgtcccaatgcaagtgtcctcctttcttaccgtgaagcacctcaccgagactaccattaggcatgtactcatagacaagtagattcgtctcgtggtttgagcaaaatccgagaagcctcactatgtgtctgtgtcttatccttcctaaggtttgaatctctgcgttgaagccgtgatcatgggaagatccacgagacattgcagcgagtcttttaaccgcgactagatcaccattaggcattacgcctttatagacaataccagctcctcctttgcctataatgttgtcttctttgagagaatccaagacatcgtcacacgtgaagtctagtctctggaaagctgttaacctccaagcccgtgactcactcgcctttttcaatgatctagctttgattatggctactaccgcgaacgcaatcgaacaaacaagtagtccaagaacaagcaataacttcatagaagctgataaaggtcctttactatgactctggtgacctcctttagcaacaccgtctttacaaggaccaagataaggaccacagagatcaggattacccaagaacgatgtgtagttgaagtaactgaattgtcctgttcccggaactaaaccggagaggttgttgtaagagaaatcaagagatgttaagctctgcattgacgagattgaaccagggattgatccaaccagatggtttctcgacaggttcaagtaattcaatatcttcatagcagtgatctcatttgggatttcaccggagagctcgtttctgctcagatcaacaaacgttaagagcttgcaacgactaatctccggcgcgattcgaccggagaacaagttgtggctgaaatcaatcttcgagagctgctgaagcttccctacctctgaaggaataggaccttggaacttgtttccatcaagaagaagtttctgaacgccggtgaagttcccgatcgccggaggtaatggacctgagagctggttgtttgataaactgatctgaccaagattaacagagacacctccggcgactggtaactctccggagagataattatcttggagctccacttgagttaatttgggtaatccgaatagtccttttgggattgacccgttcaggaaattctcacccattcggatccgggtcaaagactcacatttaccaagagaatcagggattgaaccaaagagaaagtttccaagagtgattaaagtttctaacttgttaccggagcacatgttcggcggtaaagttccggtcagcttattggaagagagatcgacgagatttagtttaccgttttctcctaatttctgcgggatgcttccggtgaaattgttctcccaaagctgtaacacttcaagctccggcaaatctccgatgaactccggtatctcgccgtgaagtttgttacggaagagattcaaaagcgtgagattcttcaactctgcgaaactcgctggaatctctccggtgaacatgttgttagacaaatccattgattttaaactcgatagcgttcctagctcccaagttaatggaccggagaagacattcacttgcaagaaaagcgtatcgagtttctgaagcttcccaatctccggcggaatctcaccggttaatccgcaattagctccgtcgaatctgactagctccgatagatttccgatctctggaggaagaccgtcttcgaaagcgttgtagtagccgatgtaaagctcccggagagtcgttaggtttccgatctctggagggattttcccgacaagctcgttgccggaaaccgctagatactcaataactggccagcttccgtacgaaggcgggatctttccagcgaagtagttaccaccgaggtgaaggtgccggagctgagtcagattggtgacggaaaccggtaaatctccggttagattgttgttgtagacatcaagaactcggagattcaccaatccagaagaaatctcatcgggaaacgaaccgttgaagacattgttcgagagatttaagtgacgaagaccggaaaggctcgagatttccggcggaatcggaccggagattagattttcagcgagtgatagattctgaagaagacgtaaatgagaaacatctggggaaagagtaccggagaggttgagaccggagagatcaagagaagtcacgtgacggcgagatacatcgcacgtgacaccaatccatgtacagaagcttgttgagactttccaggaagagagaggcgagtttttgtcatctccggcgccggtgagagaggttttgagtgagaggagagcacggaactcggagattggtcggcttgcggtgaaggtatgagaaatgtggagaagaaaaagaaggagaagaaaaagtttcattgtttctctctatctctcttgtgtgggagagattagggttgtgagatggtgtgagtgtagagagaaggtaagtgaagacgaagaagaagatgaggaaggtgtgaatttgttttatattcgttccacttgtttttggaattgtatataggtgccacgtcagatttgtgattttattacattactaatcataacactaaaaagtaattggaggtagacaaacacaaattacaaaatcaataatactagtgctgatttgataaaacaatcaagtgatagattgcagaagaaacgatatttgataaaacagtaaaaatagcctgatactaacatttgaaattcaaacatttgcagataattctgattccaacacatcatatgctttgacgaaatgaatattgtattatttagaactttgtacgatggagaatatactattattagggaaaggttcatttattttgttttggagtcatgttgttcttgaaacatttgaatggtgatgttctcaagtattgacaaatttcctttaatttctcatttcatatgaccacaatatacattttctaaataatcatgtgtaatgtactaataaatagagtaatttttgttttattttgagagacacaggataattgtatgagcatccaacaaaataaatgtagaaagattaactaaaatccctcaaaagatacaagaggtcatattcttaatcgtatggttttatcggaaaacgacaaaagctaaaaagatcgttattggtaatctaatcctatacgtaataagttaattgatgctttaaagcgaaaaaacccaataattaatgtagatgaacggtccagatgcaatcattccaatggatagtcaaaaagtttaccactgtggaacccactctttaaaagagaggtttatggtaattgggccgtatgaattgggcccatgtgtctgtaaataaaatagtgaattattatgttttttttgtacttgtgcctttttgcattaacaatgccacaatggggtcgtatttatttgatttggtcgatatatcaaagaaaaaaatcaaatgaattaatttcactttccaatatatatatacgaatccagacgacatataaaaaattcatttctggaaacataataatatttctaatacaaaaaccagcaaaatctgttgagaagagcaaaatataaaagttagaaaagcaacatgaaagtaaaaaaatatttagacttccttctttttgtatagtgtgaattgactttaattaataaaaaaaagtgaaaaagaaaattaaaagagattgaaaatgattgataattattagaaaaagttataattttgctggtggtaggaaattaaccgaaagttttggtcaaatatttattttgactgaatacattcttgaccatggaacatctacgtaattacatcttttaccactaaggagctctttggacttgaatggactgctcgttcggttgctatgaattgaccaaatcagccttcgagtccaaaccagagattgtcggttttgggataagtatcgaaaagacgaaaacaccctctagctcgttgttattaatgcagccgtctggacagaggagactgggggcatgatcgtaatcgtgtgtccagctaacgaggtttctttgccggttgctacagttcactgtcactgatctatctataatcatttctgcattctcgtttcatctataagtatttgtatatatgtaaatattaaaatactagtcacaaatttatatgaatttaaccatacaattgttttgtaatcttctttttagactttgatagggagaataatcaaccttcttaagcaaaatatcatactcaaacaatgtatttttattagataaattcaaataaatttcgaaaaattattgagcaagaattattgacaatctgatttggtaagcacgtgtgaagggagctttatgtaagaaactttaagaaagatgtgggaagtaggtgcttaatgagattcgtttatttgattttacacttctttcttactctcttctctatttctaaccctttttcatttttttaaaaagtgtcttgaaaactcaaatttaagtaaatagaaaaatagattgagatgaaggataatgagataacattgggttaagagttaaaatagagaagaatccaaagccaaaagcaaagttgtttaacgatggaatcacgttgtatccattaccaagtttctttttgttttgtttattctctaaccgcatcgtctcgtgctgtgttcctttctgtctccttaaatgcacatctctataaggattcttattaccaacacacaatcttgattcaaatctctttactcaccaaaaagataactatgattagtaatacgtatatgaatggaatgattataccatatcttttttctttcgaaccaagattaaacggaagaataataaagctcaacaaccatagttgattttagtacatttaggaatttgaaagttaactattatttatggaaagactgaagcacaaagttaagaattaggcagtgatatgttttgcttgttttgaaatcatgtaataatagagagaacatgttgcgaaagcgacgcttgatgaagcaaaaaaaaccaagacaaaggtcttaacaaagtcatcttttttcctttggtttgaaaaaaaaaagttgcttcaattttctagtggttcatttgaaaggtgaaacacgacccaataaaagtgaaaatgggaccataaacatgtcatcttcacatcaccactctgtttctgagtccgaccatcacggacataaaacatggtccaactaatttgatacagtcagttcccataacttatctctctctacgagttactcttactatgtatgatcactttttaaaacactttcaatacttgcgaaactgtattttaaatattgggaaaacagagagaattagagaggaaacatgttctgaacattatatttattaccactcgtaagtcactttccatttgcaggatttacttatacctaatggtgtcagattgagtttgtgtctcttttacaacagtatcgcaccttctacatccaatagacaactaatgaaagctagaatcaatcaaaacagatttacactagaaagaaaaggatgataccacattgaaaaattgatgaatgtatgaacaggatggtaacaatttaacttagaatcgaaattttggtatgaaatcctctgaagtctgaagagttttaggtttagttgaaaattagagtactgtagtagtttgagatcctctagacgaagcagaaggttccatcaaattctatttgtttcgcgggccaacccgcaagcccgatattttatggacatatgtagagttcaagcccgccctgtgatgatgcttattggggcaagctggtgggtttgtgggccgcttgacaaaagaacattaaaaaaagacaaatttgatggacaatcatgattgttgtggttagtatacatacttttgaggatcggatcatgcaatgagtgaattcttcactttaattaaactcatcagattctctcacagtaacaactaacaaacaaaggaaacaaactcatgaaaagccatccaaggaaaaaaggaaatctttatgtgaccgttaagtgtttcttgtcaaatattatgtgaccgttaagtttatcttgtcaaatattatgtgattgtgaccgttgttaattgtgattagcaatttccttgtttcttttgaacctctttgctccccttataaataaatagatgagagacgctctcacgcagtctcaacaacgcttcttctaattcttccttgagagacaaatcaaaactctctctatttctttctttctcatcttcttccttcagagacaaatcaaaactctctctttatacataaactctgtggattccgatcgatgatgatgatccaagtagaagccgacgacgatgatccaagcaaaagccgatgcaacatccgtaagatttcagactgatcggagccgaaattaaagcatatcatcgtttcatagattgaatgataatctccttcaatccacggccgtcgtctaccgtccaaaacaaaatagatttcagttcaccggataatgatctagccaccgagatgctttcaccggagacaacgaggaactaagaggatggcgaaagaaaacacgaagacgctctcgtttgtggtttcaagtttcagaacaagcacgagtcgccgcctgagtatatcacgacttttaggtatattactttactaccctttttcttttttaataaagattatgattttgattttaaaaagaaaaaaaagattttatgtttttccgttctgatttttctgatttaaaactaatcacaaggttttcacaaatatttttttaaataaattgttttaatttttgtttttaatagattttttagtgttaaattttaaatatgtgtaaactattagatacattatcccgtccataatatgaggtctttaagaggtgttttaggtttaatatgttttgcacatataaatttttaacacttattctttttatttaaaattgtttttaaatttgtattttatgcactatttaatttttgttttgatttttaagtaatattttagataaaatgttttattttttaaaatatacataatatttttgtttttaagtgttaaattttaaatatgtgtaaactaattggacacaacatcccgtccatagtatgaggtcttttagaggtgttctaggttcaatatgttttacacatataaatttttaacacttatgtttttatttaaaaattaaattactactattttaaggttttcgattttttaactaatattttagataaaaatattttttatttttaaatatataatatttttgcttttaaatgttaaaatttaaatatgtgtaaactagttggacataacatcttgtccatagtaagaggtacttaagaggtgttctaggttcaataaattttatacatatataaattttaacacttatgattttatttaaaaatatatatattttttttaataccactattttaaggtttttgatttttaaagtaatattttaaatatatattatatttatgtttttaagtattaaaatttaaatactgtatgtgtaaactaattggacataacatcccgtcgatagtatgaggtccttaagaggtgttttaggttcaacatgttttacacataaataaatattgtaacacttatatttttattgatttgttttttaaaaatttgtatatttttaatacacattgtgttctaggttcatagtaaaaggtgattaaaaggtgttctaggttcaacatgttttacacatataaattttaaacacttataattttatttaaacatattttaaaatttatattttataccactattttaaggtttttgattttttaagtaaaattttatatttttaaatatataatattttaaaacaaaaatattaaaatttaaatatatgtaaactagttgaacataatattcggttcatagtatgaggtctttaaacacttaagaaaattaacttactatgttttttttatgtatttttgggttacttttatttaataaattatggggtcttccctctctcgaccaaaaaaaaaaaacattgtaaggtgagttttgagagtaacaataatattggggtatatttttaaaaatattgtagtggtaaataccgaatttccatatagtttctgtgtggcttatatttgtccttttatagggtgcaattttagagtaaagatagtatctaggtttaatgttaaagattctaataatgatggggcgttttcgtgttttctatttatttaagctccatttattattaccggctgttttctattttgtcgttcccggtaaattttgccggcgaagattgaaacttttccaaacgatgcaagcaacggcgaatcttccgacgatatggaatctgtcgcttcgtgggtcatcctctaaagtccatatagtgaaccctaggcatcgaaagtctcacgcgcttcattgtttgaggttttgagtttcgtctccttcgtgagatttctctttctgctctgttcgatccgattcttcaggttgatagtaatattagtgtagcattttacagaatttagttaatttcatgaaatcattgcttatctagagtgaacctttctcaatctttctggtttgtgtagaagaatattttgtgttgcaagaattgattttgcttctctgtaattaaactggattcttttcgattccagatcagaagggcatgaagagtttgacaattctcaggttactcttctttggtttgaagtttgctatcttctctgattttctagcagaatgtaactagtttagttcacagaaaagtcttggacaatcttctattacaaaagaagcaaaacataaggacatatggaacctctttagagaagctcaaaaaagtaaaaacaaaattggttgctatttgtttcggtttcatattctgaaagttaactcacccgattggattgtgtcgtctttgttgtgtgattagatataatgatcttaaacaaacaacgcctagctgcagttgacgagttagaacagctaaagaaagataaagaggaattgttagagaggataaaccaattggaggcagaaagtcagattgtaatcaagaaaggtctcatttttttgaatagtctctatagtttttgatgatttgtattcaagtgagcgatgtgatactagtcttttgaaccctgaagcttatcttgtaccatgttataagcagataagtcgtctctattctgggagttgcttctccgtattgattctatggttatcaatggactagttaacattgaagaagcttcatccatgagaaagctggttaaagagcatgaagcgaacatctctgtatttcctcttgatgtcctgcaacaaggagatgccgaaattctagcagaacttagacggttcacaaataaaggcaaaaggtgaaaattctagtggactttatcttcaagcttatttcacatttttttaatttatgttttgacttgtatttgtcaattgattccaggaatggtctccatgtgattcatatttgcaccgaaatggctccattagtttctgttggacctttggcctcatatataacaggattgtcttgtgcactccaagaagagggttacatggttgaagttatattgccaaagtatgagtcaaatccttcagaaaaatatactttataatatcaactgtgaagtagagtcttattaactatattcattaacagatattctacacttgatttggacgaaattgaagggcttcgtgaaatcgaagccgatgcatattcttattttgatggccagctgcatgcaaaccgaatatggaacgggtgagtgagctgttgcaagttattcttcttataatgttgatatttttcagtgtttgtaaaagaagaattggtaaaatattgtcaaaacattccatttcttcctaaatttaaggcaaagagaaccttgtttatgcagagttgtctctggaataggagtgacacttattcaaccagtgtattactcgtcaatgtttagccgtgataaagtatacgggtatcaggacgattttgataggtcagtacttcaatttgatatagttgagcttgaatctacatttgttttcagactggtttggtttatatgtgttatctgagaacaaaatcagatttgcatacttctctcgtgcttcattggattacattgcaaaatctggaaagcagcctgatgttttacacattcacaactggcaaactgcaatagttggaccgttgttttgggatgtttttgttaatcaggtaaaacacctcttcaaactttcagcgtttgttcacctcatagttttcttattgccatctctttgcaaactttgtagggacttgaaggtactagaatactcttgacatgccaagactttgacaaggcatgccactttgctttttccctttatactactttatacactctacagtctacattggcaaaattgacaaagaacttcttgtgcttgtgctttttagggtcttgtacctcctgaaaaattggagctatgtgggctcgatccagctgaacttcaccgtcttgatcgcttacaagataacacaaatccacattttgttaatattttgaaggtaagtggaagacaataacacacaagaattatctccaagttacatattcttgttctcacatttctttacttagggcggtgttgtctactccaacaaagttgtaataatgtcatcctcacatagctcaatccctggtctcgaaccaactttagctatccacaagtaagttactgacacttcaagttatctcaataccatcaatcactgcataataattgaaatctcctttcttgaaatctagggacaagttgttttttgctccctttggaatggacaactcaatggagaaagacttgtgttgtgaccttcacgtctctgcatatacttccattaagaacctatgaaaatacacaatgatgaacaagatgaatgattatttatcatattttcacattaaaaaaaaaaattgtgtccttgtgtttagtgagaatagttgtatctacttaaatgtttttccaactaacaaatttggattcctgaattaattaaaaatagattttatgttgttaagaaaaaaggaaattacacttttttttttgtttttggtcaaaggaaaattattgtacaccttattttttgttaacaagaagatattgttttgatttttgttattaaagtgataaaatagaattaaaattcggataaatcagagtattgaaataacagttcgtcagaagtaaaagatatacccaaatcaaaacaggaatcggattcagagaaggtctctctctgtatttatcaaaattttgttcctttttactaaagaaagacagagtgttattgaatctgacagcgaaagacagagataatgacgagagttggccagagagattctccggctaaagaagaagctccgccggcgactaaaaaacgatttttgactccgggaaggtaaaaaaatcggaacttttgtttatttctttggtgggttttggaagttgatgacgattgtgatctctttctctctctctctggtttgtgaaaacgatttaagcgtgattgtatgacaaaacaaaatctatgaattgggtgaatttagatttccaaaaagtaaggcaaagatttcgtgttttagggttgtgtcatgtttagataagtgatttgcctagctttgtgttttttttttgactaagcgattctaactcttgagggctttttatgttgtagattcgtgacaatcttgtgtatcattaacttgataaattacgttgatcgaggagtgatcgcgagtaatggtgttaatggaagctcaaaagtatgtgatgccaaaggggtttgctctgcaggaactggaattcagtaagtttttttgttctgaattttgattttgagaataattatgtttatagttttatgagaaagacttagactttgtgtgtgtctgttgatacaggggagagtttaacttaactaactttgaagatggtcttttgtcatctgcgtttatggttggacttcttgtggcttctccaatattcgctggattgtcaaaaaggtttaatttttatcaacagtttcatatatttgtgttcttgttttttggtgtgtacttaagaatcaatgttttgattatctctgtctttctatactttcttgcagattcaacccttttaaactaatcggtgttggattaactgtttggactattgctgttatcggttgcgggttttcctacaacttctggatgattgctgttttcagaatgtgagtgctttatttaaaattccatgttttcgcctttttcactctggtttctgtatattaactaacaatcttttcttttgtaactttgcctataggtttgttggggttggtgaggcttcctttattagtcttgcagcaccttatatcgatgatagtgctcctgttgcaagggttagttttcaattctgttgttattagtcttaattttttgctagtttacttacttctgattgttttttttgtctttctttccagaaaaatttctggcttggactgttctacatgtgtataccagcaggagttgctctaggctatgtgtttggtggatacgtaagtttgcttaactctttctatgggtgcaagttttttgcttctgaggaaaatgtttttataatctatttgctttacctgttcagattggaaaccatttaggatggcgttgggcgttttacatagaggcaatcgcaatggctgtcttcgtcattttgtccttctgtatcaaaccaccgcagcagctaaaaggtgatactagatactttttaatcaacattgcataatcccttctggatgttttgccaatttttgactaaaatgtccctcttctttgcgtataggttttgctgataaggattctaagaaaccctctacatctattgaaacggttgctcctacagatgcagaagcttcacaaattaaaaccaaaacccccaagtgagtttcgctatcctctcttctttgttactgtctatgtaaaagacaactatatatactaatatacttctttttggggcagatccaagaacctggttgtcctatttggaaaagacttaaaggctcttttcagcgagaaagtatttattgtaaatgttcttggttacatcacctacaactttgtgattggagcttactcatattggggaccaaaagccggttttggtatctacaaaatgaaaaacgcggacatgatttttggaggacttacaatcatatgcggaataattggaacattaggtggaagctatgtgcttgatcgcataaacgctactctttcaaacaccttcaaggtaataaagaactcactaaacacctcttagttactatgagtgctccgttttttctgattacctcttaattgatcttgtacagttactagctgcatcaactttactcggcgcagcgttttgtttcactgctttcttgatgaagaatatgtatgccttcatcgctttattcgcagtgggagaaattctaatctttgcaccacaggtaacataatcaaatctcaagtattttgccaaaaagctaatctctgtttcttttttttcgacttgtttgatccgaatgtcattttgctttcttgtgcaggctccggttaactttgtgtgtctccattgcgtgagaccaaacttgagaccattgtcaatggcttcttcaactgttttgatccatatcttaggcgatgttccttcttctccactttatgggaaaatgcaggtttgcattcatcattaatgacttgaaacaaattagttttactttttaggattagatttattaaccctctcaattgttttgcaggatcatttaaaaaattggagaaaatcaacacttatcattacttcaatcctcttcctcgcagctattatatggggaattggtaaggactcaaattgtttttattttttttcactcatctcataatcttttggtatagcttagtaaatttgtttgtttaattgtttgtgtgtagggatatttatgaatagtgtggataggtctaatgaagtaagtgaagacgatgaggtcgaagaagataaattggaaagcaaaacagagaactctactctcgcctaatttttgaagacatttttatcatttttcttcttctacacgaccaaataattccttagtcctactccattgtttaattgaacaacaattcatttgattcattttcttttccttatagatactatttctctgtttcttttgtgtacataaacctaattttttggaataatatgttttagagagggaatttttcttctcgagcttccctaaaagattcaaccattacaattgtttcttaatttcatggatttttttattacttatgttcactctctgtttttgttaatagctaataacatgttcaaatatctccatacttgaacattcatggaagaaagaaaataaaagaattgttctcatttcaattggaaataatatgacagataaatcaaagtgacaccaaaacaaattggtgtttttttcgttttatttaaaattgccgttcttactgaagtcattaacaaaaaatgggaaaaaattgggaagtgaaaaaaaatagtagtcttattttggttagtaaaaaggtttgtttttcatcatcatcttcaatcactttagaagttaggaccagctgcaagaatctcttcagtcaattttccatcatcaccaatcttatgacttgtgaatgtctcaaaattgcttttaaacaaaccagccaatttcaacaatgtgtcctcataagccattttatcaggccactgcacaagacacacataaccaaagatgtcaaataaaggagttaatttcattaataaaaagtatatatgttttctgctgtctatctgacttactgcattaataggttccagtatctcagaaggaactccttctacttcatttggaatctccaaaccaaaaatatctgttttacggtaacttgcattcagtagactacccgaatgtatagcatcgattatctttcgtgtatacgccaacttgattcggcttccagttccgtagctgcatattttatcaccaattttaatactcttcttgtttgtttagctagttacttataattgaagtagagatggatggttaaccttccaccggaccaaccggtgttaacaagccaaccggtggctccttgagcctgcattttctcagccaacatagcagcgtacttggttgggtgtagcataatgaaagcagcaccaaaacaagctgagaatgtcgctcgaggttccttaactccttcctctgttcctgcaacctacaaaatcacattattcattacgaatcgattaattaaaagagaaccgaaccgaaccaaaccaaaccggcacttacgagagcagtgtagccactgatgaaatggtacatagtctgagcaagattgagcttgctgattggcggcaacacaccgaaggcgtcacaagccaataggatcacgttcttcgggtgtggtccaacgcacggtatcttcgagtttggaatgtactctatcggataagccgcacgtgtgttctccgtcactgatttgtcagtgtaatccacttctcgtgtatgctcatcaaacacaacattctccaaaactgtccccaaaaccaaaacaaaaaaagtgaaaatgttatggaaacgtacaatctaacatttgtaaagtgagttttgtttttaagtaccggttccaaacttgatagcgttccagatatcaggctctttgtccctagccaaatcaatgcatttcgcgtaacaaccaccttcgatattcgaaactccagcctcactccaacaatgttcatcatctccgatcaaataccggttatggtcagtcgacaacgtagtctttccggtaccagagagtccgaaaaagagagcaacatctccatctttgcccatgttacaaccagagtgaagagacaaaatctttctcttaggcatcaaataatgcatcacaccaaagagtcctttcttcatttctccagcatattgggtacctagaatcaccatctctcttcttcctaggtttatgtccacactcgtcgaagatgtcatgtaatgagtgaaacggttacacgggaatttccccgcgttgtaaatcgtgaaatcgggtgtcccgaaattctctaactcctcaggtgttggacggatacacatgttgtgcatgaatagtgaatggtaagctcttgctgaaacaattctcactttgattttgttctctggatcccagtttaggtattgatcattcacaaacacctaacaataaaatcatacaaagtctttaatatatagtctatgaaatttaattacaatctcattttgaatatagtagtctatgtcaagttaccttgtccaaggagtttaagtaatcaacagctctctctcggttcaccaaaaaagttttttcatccatttcaatgtttggtgatcctctgtaaccaaaacgaaattattattttttaatgtcaaaactagaaaaacaaatactaaattttgatgcatgtgttgtcatatataatttggtgatcttcaatatatatgtgaagtgaaatgcatgtagataggaagtgactcactttccccaccagagttcggcctcagtggtatcatccttaaccacacgcttgtctttaggagaccgaccggttttggctccagacaatgtagccaacgcaccggtcgatgtcacaaacgatcccttctcaaactttatcgcttgctcgtacaactctgcaatcataaaaattcggaaggtgatacaaaacatgaaacaacattaaaaatagggctcttagttaaaacggtggcgttttagggatgtattaccggcgggagagaggttgtgaaggatgtgagtgaacttcaagccactgtcgctgacgtcagcagccggaagtgacgtaggagtcactggcacgtgtgctactttagctgccgaagtcggatctcctcttattaacttcggtcctgtctctctcgtcaacgaagccaacgatgcactgtccaatatttcaccaaattatgcattcgtatcattgttttctcaaaattcatttttttattttattttttatgattgcatgcaaaactaaacaaaattcaatcatacgattatgagaaaccactatatatatcattacgctatttcacatgtttaatcttcaaatcaaagatctttttttgcttaaatcacgattccttataattttgtgatttgtaaaattagtaaacatagattggcctaataactttttacattccccattaattattgaaaataaattgtgttttttggaagttgagctatattcaaatgtaaatatactgacggattgaagcatggtctcgctggagacaggagtagtcggaccactagttccgctgactccgctggcgctgccatctctaagaggagtggtaggggcagatcgtttcttctggagactgtgaagctcgtcgatggtctgaaagttgacccgcggtgcgatgtcatcctggcagacgtctgccggccctggagatttgccgcccttctcagtcgtgatcctcggaagcgcatcacgggccgccgcagccgagaaactgaagtctccaccggtactttcgtttccgtttcccgccatttctactaacttgggattaagattaaacaacacaattaacacaaacacacgtataaacaaagtatatacacgtatatgaatttaaagagaggtatgaagaacaatgttagtaccgaaatgtgtctttcttcttttgttttgtagaagattaagaatgtataaatacaaaagaaaaagaaccaaaattgtctgaaagagagactaatggttgtgatgagattgggaggggtagcataagccggttttataggttcattgactcagtaattaacgcgttttaattagcctgcataatcgtgttttttctataattaaatgatgacactcacgttatactcatatagagagtataatcttgattttgtagataatgcaactatttgtccactattgtgataattaggtgactagacattacgttgattatagatagatttggaaatcttattaagcatactttacgtgcacatgggtgtggataactttgtataatacttgtcgtcgtattcatgtcttcacgtttgtaattaagaaacaattccaataacatttcaaataatacagattatacagtccggtaatacttttaatatatgtaattaagaaacagttccaataacatttcaactaatacagtccggtaattcttttaaaatatgtttggattataaatatagtgtgtcgtttccaaatatcttatccgtacagcgtacaaacatagtttttaaagcacgttttttgttttcctaatcaaatttccccacagtagtttgacttagattttatatatatattataatggtgttaacagtttcaacaccattataatattttactttctgacaaaaaaataaatatatttttcttctttaaaatagtccaccgccaatgaaaacaaatggattaacggagtttgtgtggttattacgataatgtattattttgtatggatgacatatactctgaatttgatgtaaatatgtaatagaagatattggtggttgcaactcttgcaaatacaaagtcatcaataaagactgttagaataacttaaaaacttaaagataatccaatcttggctgtactaaatggatggttacttgaaaactagataaaatttaattataattaacactttcacttttgaccagagaagaaaattaacaaatttacaaagccaagtgtcagtatactgatctggaccgttgattttcaatgttgacagctttcggacacatcacaaccacgtcatatgggctaatctctctctctgccgcagtaccaggactttttaattaacacgttcaccttttcggagttgaccaaacattttcgaaattattaaatctctccttaaataacccattacattatgtaaaagataactttggtgattaatagattcatagatttgttttagagttacattatttgggcctaagcctattttacatggacctatgtttgtagagtaaaggttgttttcggtatcttattttcgtcccaggcgccaaaggtaaatgctttattaattggtttacattatttttggaattctcaatgggctttacagttgccgattgcacaaactgtagcccaactgtgacaaaatctcccaaaagttggatcagccattataactccaaatagtgtgttataccgggttattctgattttcacagagttcattagtacaagtaattgtaacatcaatgaatgtaatgcaccttgattagtatttttttaagtatggtgcgtcaaaccgtttgaccatatatagttcgagattctttccctttcattagttgacattaacattgtccatatgcaatatgtaactgcgtgatgaatgatagcttagtttttttttttgtgaaaaaataatagcttagtttttttagttatgatttgaccatatatatagttcgagattcttctgccactgatcattttagtgaatcacatcgagaagtggacctttgacaatagttaatcatttcatccattttaaaagtatacaaaatcattgcattcaaaacaaattgcaacttggcgctagctacatataattagtaaatgtcttaatgatataaaatgaatgaatttaagcgagaagaaagctttgcaacggcgcatgacctggtttctaccacggtgcacccaccaaaccattcaccaacaaccaacaaagacaatccccacgcactattcaaatcattcaaacccggtgccttctataacaaaataggctataatgatgatcacatgactaatcatgatcattcatttggaaagatataatatattatagatcctcttaagttaaacggcatatgataatataaacttaacttttgattttgaagtccagcattacaagcacactctctaatccactatacctcaacttttaattctatatagtacacaaaaaaagcagacttcatttatttgatctacaactttttttaactattcagtcattaatttggagtttttgaagattacaaaaaggaagaagaagataaaaatgctaaaagaccaattaattccttctaatgtagggtctcaatctctctgcaatacaaaaggccacacccgtcggctactgcttgtcgctatcatgcacctatgtgggtctttttctgaataatcatacttctattatttataccttactaaattattgcttatcctccttatataaattatgtaccattatatattcaaaaatcattgaaatcgaattttcgaaaaaaagggaaattaaaattaaaatctggcgttttccaagccgtgcatatcgctgactcgatttaaatgcttcctcataatagccactttagctaatttctcggcggctctccaagccgaagtaggggtaagctgctccggtttatcttcagttcggtttaatatactatttctcggtttaatccggctaagttcatttagctcaacctccaaactccttaaactatcatccgaatgagacgcattggaccgagccgtcgttagaacctgatacgctccggataaatcctcacgctcgataagccggcgtgaatccgctacagcgcggcacatggagtgtaaatttctcagccgttcgatgcttgaagatacatatctgacggattgtggccgtgggatcaaaaatcgtttttctttaggacatgtcattggctgatgtgtcatttggtcaacgatcgacgactgtacggacattacttggtgggaaccactcgacgaagtcggcactttgagctcaacgagaaactctctctcctcctccgcaaacaaatctccgacttggatgacagaaccggatccgaaattctcgagtcgaccggttaaagagtaaaccgatgaaatctcagtcaaatgagatccgttgaccaaactgagatttagcttcacgttatggagagtcacgttgagcaacgaagcgattctttcggtgaacgcgtctcgtagcggcgcgtgaagcaacgctccaggagaagcaatgtaaacggaatgaaccgggatctccggacgagagaaacgcgtggtagacacgacgaacggaatgcgcgttgcgtttagtttagctttcaaaactgcctccggttgatcttgaccgtccgataaaacaaagatgctcgttgacggattcttctcccgccgatcttcaacgactttaaccgctttcttcaacgcgtcgttaacgctcattccaactccgccggtggtttccattccgccgagtgcgtcgaccattcgccgcgccgatcgtcttcctttcgccgtcattcgtcgtaacggcattaaccgttttgaccccgtcgagaaaacgacgatcgataaacgatccatttctcggagaagagagatcaccgatctcatcgcgtgtttaaccgtttgcaaattagcaccgccgttgcttaaatcgagaaccgttaccagatctatcgatggtcttcgcgccttaatcgcatcggtgatggacgacggcgacggagacgcttttagtttcatgatgacgacgtgtgtctccttctttttcccggtttccacaacggcagattccggcagcaacttaacctccagatttcctgagattgaaggaaccatatcagacgtaatcgaagaatctcggaagaatccggggaagtcatcgtcatcttcaacgtcgtcgttttcgtctgattcatgtatagtgttgatctgagcaagagaaaccggcgaataagctaacggctcatcgtcgttgtacactctcagtgacttccccgttttgatctctcggatctcgggtcgtctaatcgggtcggatccgaagttattattaacagccggataattcgactttggcgcgtgattccatgcggcagagcaaaacggacaacgcttgtcttctaatccattgacgcaagaaaggtgaaacgaatgtgaacactccgccgtgaaaattgccgccgtcgagttgctttgatttgaattcactctctgcaaacaaatcgcacatctactactattactctgcatccacacacacacaaaacggagctttagattatgtctttcaaattaagaacttgattgaatcaaaagtaactaccttgttgagaagaagcgtggcacggaggagagagacgccgccgccgccttgagaggaagaagaagatgatgatttaggagaagaagggttagagaaaaacttgggacttgagctgttactagtccttggagtagcattgctcgtagtcctgcaatggagtttgggactagttggaagagatgggatagtgactgatgtggaagctgaggagcggcatccagtgccgcttccgccgcgtgatcggagacgaggagttgaagggttggataaaaaaccaaactttgatcggaatcttggtgtgggaattggaggatcagtagtgtgtaatgatgaatgttgttgaggtttatcttgattacttgaaacggaagtgcaaaacgcttttctccaaccaaacaccatttcctgtgagaaagaaataagaagagaagctctctttttttctatattattcttcttcttcttcttcttctatttgtggaagtaattatagagaagaagaagaaggactttgggcataatggatcataaggaagatggagaaattaaatactaagataaagactatagagagatttctttttctttagtgatgtttcgataaagacatttttttttatgttattttaagttgtaggaatattataaggtaaaaattgtgacttttatgcgtgtgaattggcttttgtttccatttgcatgtaattgttttgcctcgaagaaaataatcactgatccgttaagtccttcttttttttgggtcaattttgctattttttttacatatttcaagtgttgtttcattgggatggacgataaagttaaaagtcaacggtaataaccgaccatatgcaaaatgagatttcaaataacttgagacgcggagatctttgttttccatttgcatgtaaaatctttcttttcaaaatattaaacagtttattagattgtctaatgtggattcctcttgaatgttccacaatgtggttcgattatataaatcatttccaatcttatcggattcttcgaaatgcagattgtgatggagtgtaaggtcaaacatgtgggcacgtgacgttacagtctgagcaataaacggtaagcttattttccttacgaaatataaatgatactaaaacacgttgtattcgagttatcttcatgattgtgaattgagttgtatatttaattgatagttgcttacgtaattacatactggctggagcgaggaatttaacctaaagttttgggtttggaattttgtaaaaggtctttgatggagaaaggtcgaaaagtttttttttttcatttatttaccaacaaaatgatttataatatatggtgacgacaagagctaatgatatgacataaagattagactggtccaggtccagcaaattttgaattcttcttgctattgcaaaaaaattgatggttttggtctgattttgatttcgacacttctattattttgatttgacaaccttttagattggctgatcaagtgctcgagataattagtgtcctaaatcaaaggtattaactccaaaatacaaattactgcaatttgtggcctctagtatcttgcagttatgctgaagagccacatgaatgaatgaaacaataaatgggtgggtacatatatgataagggggctgctaaacaaaattgtagttaagcatttgtaaatggtttggtaggttttttaagtggctgccattgtagagacaacacatgacttcgtgcgtgcatgccatggaatcattgattatcaaccaaaaaatgaaaatattagttagttaatcttgttaagaatgtaatgacttatattatacgaatagctttacacaagtatatatacaagtacagaggaggttacactagggttgtacaaatatagaatgttccataaaggagacagaggaatattatgatattaaagagagatgatcctatgtatccttaacacgccccctcaagatggaggggctatgcacactccaatcttgtctcgaagttccgtgaagtgatttcgaggaagcggttttgttaatgcatcagcgagttggtctctagtgttgacgtgagccacacgaagaatgccttgctgaacttgtccacgaataaagtgatagtctatggctatgtgcttcatcctggaatggaaaaccgggtttgcgcaaaggaaagtagcacccacattatcacaatagaccacaggcggtttgggaagtgtgatcccaagctccgtgagaaggctgcatatccactggatttcacaagcagtatttgccaccgatcgatattcagcttctgttgaagaccttgcaacgctcttttgtttcttggcagtccatgagattggatttttcccgaggtaaacgatgtaagcatttgttgaaacgcaatcttctgagtctccggcccaatctgcatctgaaaaggcatgaagggagagctcgttttgagcagcaaagaaaatgtcgtgagtcgtagttccagccaaatatctaagaactcgttttgcagcttgccaatgatcattggttggtctgtgcataaactgagagaggcggtttacagcatatgcaatatcaagtcttgtgaatgcaagatactgcaaacttccaacaagctttctatactcagtagggtcggagagagttataccagacatgagtgtgagtttaggagatgatgccattggtgttcctactggtttggcgttaatcatgttgtagcgttgaagtagatcaagaatgtactttcgctgcgaaagatgtaagcccttagacgtccgatgatcttctagaccaagaaaatagttgagatcttcagggtctttgatggagaagcgagctgcgagtgcatcaagaacttgttgaatgcttcctttgtgactacccatgattagtatatcgtcgacatacaccaatagatagacaaattatttgccacgttgcagaataaacagagaagtgtcagccaacgagttttgaaatcccaaggtgaggagataagtcttcaattccgtataccaagcacgcggagcctgttttaacccgtaaatcgctttacgtagtcgacaaacgaatgatggattgtcgggatcaataaacccaggaggttgctccatgtaaacttcttctttcaaggtgccttgaagaaaggcgttgttgacgtctaattgtcggattggccacgatcgggttaccgcaacatcaagaacaagacgtaaggtggtcgacttgatcacaggactgaaagtgtctgtataatcacggccaagttgttgattatacccttttgccacaaaccttgatttgcacctgccaagagaaccattagggagaaatttgtttttaaatacccatttacaaccaacaatgttcttattaggctcttgataccatgttaagaatgtaatgacttatattatacgaatagctttacacaagtatatatacaagtacagaggaggctacactagggttgtacaaatatagaatgttccataaaggagatagaggaatattatgatattaaagagagatgatcctatgtatccttaacaaatctagtttagttggatttgatttaacatttgaaaaacttgtataccaacttaattcgaaaactgtatggaagattttgaatgtcctaacacaatcacaattattgtatatatatacttggtctgtccggacaaaactgctaatcaaacctttcaaagaaaaaaaggaaaaaccaaaaaaaaaagaacttaactaaacaataaatcaataataatgctgatacgatatattttgtccatatatatgagatcgtaaatctctcccatgactgataactgataagaaatctatggataccatcaattcggtgggtttgttgaaggtctaccaaatcgaagaaacacacattcattctcgtaatcgtacgtatattcatttatctagcttcttttatttgaatttttacgcaatatgcaattcgattcgtagactcagttgaatataattgacctaatacctaatgcttataactaaatattatagatactattcttgaatgcaacattgagatgatcaaatcatttacatttacaatcttatttttctcgtttgatgaagaaataattttggggaacaaccatatatagatgagtgataaaggtattgccacgttccattactgagaagcataattcaattcatatcttttggagacaaattcgacatgtcattccctaagtctatttcatatatttaattttaaaaacattgaatattactatatagtttatcaacttatatggatgtatatagtatgtcccattcgaataagtgcatcaaagcgaaacgaattaaatgagattcacgaccaatgattgttgtttatgtgtatactattaagttcacgtgaagctagctacaagaatcacagatatatactacattatttggattaaagttttaaagtaacaagagtgatttaaattcgacccgtaggttctcttaaactatgagagtactatatgagtctttaattatcttgatcgaatatatgccttggaattgattaattaacgcctctttgaaaaattggacagttgaatataacatttcattttaggtggggtttaatcatattgttttgtcaacgctaacggaattattaaaaatgaacaataaatgatatcacaaaaataattttcataaaacaaataagcaaaccaccattgccaaacccaaagaggcgcactatgcttccaccttcaggaacagaaaaataataaacgttccttgaatgagaaatgggaaattagtatatgggaatttatgttcatgtatctttgactatttttctctcaaacgatattattcgatactattaaactatagttattcactaaatctaaaactgattcgttgaaatttatgatatcttcgtttggggattgtactatatagttatcatgagtttgtacgcagcccatgcttgctaaggtaaacaaagtttcatggaaggttaaaaagtgaaataatgatatcaaaaccttttcccggcgaaattacttttatttatctttgatttgtcttgtagcttttggttcttcaggtgaattattcaagttggtttaaagatccgttggtggcaatgatttggtagcacagtttagttatgacagttataaaaagatttttttttctttctgattaatcttgatattccatttagaatagagtcatagacattgagaaaaacgtaggtttaccacttccgcattcaaatgtgttagaatttaacaatccacctcaaagatttaagtactgattaatatttaagattgttttgcaaatgcagaagaagaacctccatgttcaatgatagaaagccaaatcgtaaaaccggattgtctatcttctcttctcgagaagaagcaaagaagagaataacaaaaacgttacatcaaataatatctcaaaggtagaagtcaaccacacatccaaatcaaacacaaaacataaaacaacgaccagtttactgactaaagcaacaaacaaacaacaaaaatagatcatttttaattcttcttcatttccttacattcgtagtcttacttacttcattttaaaaattcagaaactaaagatattgatgttttgaaatttaaaaacaccaccaaaagatcgcacatattttgtatagttagaaagctttgtcatgttccatcttttaagctctcatcttcgatttctccattgctctcggagctgcagctgcaatatcaccagttcaccacattgaatcattaagacattttgaatcagagaagacgagtgatcaaacatgaattgaaatcagtttaatttcgattttatttacatgttaatttgttgtatttactcccaaaagaagacgagtgatcaaacatgaattgaaatttctaaatcagctacaagtaactcacaccaacaaaccactaatctcatcatacacactacttgtaatcggttttagtagagatagtagtttacgttgtagcttaggagcagagagaagaatagactttacctaacccaatagcatcacaccctttcattatcttcagcttcttgcagacatcaataaacatcctgtaatatacatcggatcagaaatcactcatgagcgcttataccaatcaccatgatataatcttctatggcatgttagatttgattctaagatatctggcagagagtagagaaagcttctaacaagttttgaatataagagaggaaacttactcccacggaacatctccaacaagcatccagtcaccatccttatcctcataagtgagcacatagtcttttccattcaaaagatccttgagcttggtctcactaagcatatccttcccagcagctccattagatccacattgacctaaacatcaaataaacagtgcaggttaactactttgactgcactcattcattgatccttaaatagaaagaggttttcaaacacatcactagcaatcactgaaacatctcaccaagagtgaaagtggtgaacattttctccaaggctgaagaaagctccccgtagttagtgtagctcctcaggtcaactttcctcagataaggagcaccatccatactgaccttcacgaagagagccccagaacctggcctcccatcaacttcgtcactgttcttacaagtagtggccaatgtgttcttcctgtaggatctcactggaggccaaccgacaatttgtgccctgaaaattccagaatccgaaaaaacaccagttagctagctgttgaaagtaatccatatcaaaatcgaacgaatgctcctatcttctattcatacttggctgcaggtggactagagctattgtttgtagtgctagactgtcctttgggtatgttttgtggcacatctttctttgttacagactgggtggctgctgcttcagggaacatccagtttttctcagtatacactgaacttttagcttcagcaaactgatccattgtgtcagaaaagcctcttttgtttcccgatgcattgttcttttgcgaggaggagcatatctcatctttagaaggaagcaaaggaaagaatggcttctcatctagctttgctgggctcaaaaggttaagctctgtgtctctcgcaggagattgtgatccaggaagaccaagtgtcagctccgtagccttgaggctgatagtagctttgtcatcttcagcaaggggagagagagtagagcttccaacagaagaacaatcagagagacccaagtagttatgctctttaagtcctcctagagtgttcctggagatgcaattgctagtaggtgaagaactagccaccgatacattgctctgtagctcctcttccggggacattggatactcaaggtttctttaactgcaaagctgctttacctgatgatttacacagcacaaagtcctccacattaaattcacataaccataaacaaatcctcaaacaaaaccctaaattaccagaaaaaatcaagaactcaatttcaatcaaaattcgaagaaactcgaaaccgtatcaattagggtttcaaaagtagattgcatctatgaaaaactcacaaccaaaatttagagcaaaataaagctcaatctgagaaaaaaatggaaagctaaaaataaatagaagtcaacttaaggtcagatgaagaaactacaccgttgagttacatttttcgagctgatctcagatttgaatttccacagaattctatctacaaatcactaaacctagcaaggtttaagccaacagctcaaacaaaccaaaattcgccatagaaatagtgaggaaatcagcaaagaaactcaatagctaatagatctaataactactaactacacacacaaacaacaacaagctaaaaattaccggatttgaaactatgtataagaagaacagagaagacataattacctcaaacggaaaaaacaaatcctggatgaaaaatggaagctcacaacgaagaagaagaagacgatcaaaaataagagagtctgagatattttggagaagaagagtataatttttaagaaactgtagaagatgaatagcaaagagaaagagagagagaagtgtcaaggtccttccattaaagcagaaaaaagcttaattatcattacccagaaactcgtagccgagattaaaattaaaataactaaacaaagtggtagaatagaaaataagtggaaaaagttgcgtatttttatttacgaatggattctaatccaacggctcagatttgatcgtgctgataattctaaaccgtcggatttaaatcagcagatatgaaccgttgatgtacaaatgtcgggagtcggatctttaaacaaaattatgccacttttctggctccacccgaaaggggatggttgtctgcaaatattaaattccgattctatccttttgtttttaatgactaatgtaacctctatgtgatgataatgtgattgaggaatgaagggtaaaatggtaaagagagaaaaagaggagtgaggaggggacaagaaagcggcattccaagtcggtttgccgggtggtgaatgggacatctaacctcttccactttcttcctttctctctctatctctactttattaatctaaaattaattaagacttgttaatctttttttataatcactttctttctttcggattaaatttaattaaattccgccaccttcctaatttctttaactttcattattacgtttccttatctttcaattttttttacttagattggcccaactggatggggcccattgagaaatgttagtccccccaaacttgaatttttcattttgctttttttttttggtttggcattcattgtagtcttctagatagatgaatgggtaaatagtataagtaactttaataatgactatagattaatctttttcataaggttacgtcacgtgctagatttttgttttttatttttgttgaatttgcacttaaataagtaaactgattgaaacaaaattatagtcatgacaaaaattagatacatacaagtttgtccgaattgagtttaaaaaaaaaatctcattttttgaaagtataatttgtggtgttattgttagaagtacaaaatttgaatgtgaacaacatacatatttctggagtattaaatatgtctgaattgcactgttacgatcatcatacacaacgtttaatccatagtaataaggatgattggttaaaaagtaaaaaagtaaattcgttggtaataaacaggtaaattatgtatgttaatttttatagtcggttacattcttttcgtgttaaaaagaaaaaaagaaaaaaattatagtcgggtgtaatatacataaaaaaaattactgtaaaaaattcaaagtaattaaaaaaggaaggtaatgggaattggggaaaggggagcataataataacaaaaggggtgaaatgggattgaagaacacgcatgggaagcacaaaatatctcaatctgaccgtaggatttgatggtaagagagtaagagaggcctgtgtccgttcatcatcatcatgaccttctctgactctttttttttcatcatcactcttccgtaccactcacgttatctcttttttacccctctctattctttttaaccttttttctttccttttaccaaagatttaaagacgattaatcaaaaaaaaaagtctttaacaccttatgcacaaagaggaaagtaaaagaaaaatattcaccgtccagaataataatacggcatttcttaaccttccccgtaaaaagttttgattttctctttctcatattttgtttaatcgtctgtataataagtaaaggatattaattatttcaaattactacaactaccatcagacattatatttaaaattatgagtacatgaaaatatgtgtctaattaaaaagtgattggtaaaaaacaataatagtaatacagataaattattacaaaaatgcaaaagtaaacagtagatcagattagcagcatttgcgagtacaaataatgcgggttgagacaagacaatgagacccgtagtgcttttgtccttcacgcttattttattagtctttgattgatgatggattcactaaagttaattaatctttttccccgtaattaattaatttataattagagtggaggaaatcaaacgacaagacacgttagactgtttactttgggcccagactttgcactctagtatataaaaattcatttataattgggcttttatttcatattataacataggcccataagccactatccttcttgatgggccataatatacttacctctctcgtattaaggatttgttgaatttataatctacgtgttgaccccaaaaaaaatgtaatgtacgtaagatatttcttcgtttagtcagtcatgttgctgtcaacgtttttataattctttgtatcacaattttttcaatttttttttaactagaaatacacaaaaacaactaattatttattgcaaattgttatatgttttatatgtctcaatatagggtcaaacgacgagctactaaatcggatttgcacaacaaaataatataattaattttatcgagttcgtaataggacaatgtaccgagccgtgatcatcaatatacgagagagccattaaaatatatttgaccgaaaatcaaatacaccttcgagttttcacataaaacctccgtcagatatttcatccctcgcaataaattactacataaagataacattttaaattacatgtatatctagctgtatatgaattagatataagaaaaagaaaaaaacggtttctttttctttctatgtataacacctgtatttgtacatatcgcttagggtcttagtctatatcaacatggtcccatacagcttagtttttgcttgtggaacaggtttggatttttctacaacataagagcttatattataaatgcatattaagtcaatttctctgtttaatcaaatctttttggttctagaattgatgtcaccgaatcgctatgtatctttgattagattggagaaaagacagatttgcgtcactctcaaaacaaacccaacaacatgctgcatacctcattgaaatcgttattagtagataataatttgtaagttcattttttggactaattaaaaagtttaatgttattatgttagatatatattataatggttattaacaacgttttaagcaaacacacaagttgtgatataaaaagtgtaggatcgtggggtttagggtttacaattataatggttaaaacacgttttatagaattttttgttattgatagaaaaaaaaaagtgatataaaaaagtgtaagatgggtttagtggatatactcattgaccctaaaagaaacggcggtgacaaattcaagacccattcacagttcacacttcgcacacacatagatatagatatttttattgtgattacaagttaaaatagcaagtctacttcctaatagaaattccttgtatttcattttagaaatttgaaaccaattttctataaactcaattgtacagtatatgaaagtaagcacaatttaaaaagaaaaactgaaaataattgtgcttactttattttagttttcgtcaataacagtgtttatagatgtttgcatatgaaagatcgtatctaatcttactaagaaacttataaatctcaaagataattgttatcttgtgtcaaatttcgaagaggaactagagcattacatggtgtgaatgtgtaataaactaaccatgctcttattgcagagaaatctattctttattgaacaaactggaacgtttacaacatttaaacatataaagagacatgtagattccaaaggaacaagtacaagatatacatgaatctaataatatacattatagagatcgattattcattattatccaaaaacgctgttttcaagatggacggatggagttaaaaccaatatctgtgtacatagaggaataatctgatcaagcattaacacaattaactcgtaaagcaccattttgaataaggccgcccaacttatgtcataatctacctcaacatgtgttttttttgttagtgaacctaaacatgtgtcatcctagaatagaagattggattagcacaaagataactagcttatacataatcaacttgtcgcaatatataaatgagtgaagcatatgcggaaaccgagcttagacatatgggatgatgataaccactaaacaagttaatgtaacactatcctactatccttacacttttatgtctaaatgaaatctgttttaaaaaaaaaaaaaaaacagaaacaaatgttcctattaagaaaataataaataaatatataaatttggaataactgatttttggcggtatgtataattaaaactgcaaagacaaaatacagctatacctaaaattataagtcaggatcgaagtaagaggtttgtcaaattcgaattc

SEQ ID NO: 970 - DNA, 40251 bp, Arabidopsis thaliana
aagctttcacgtgagtgttaacaaaaacaaaaagtgaattttttttgcttgtgagagtgatcgtcttcttctttcggccgggttttaatgcgcacgttagtagcgtcttgggctgcgcgcattatagagctttcatagataagtatttgtccatttgggattaaaattgattttgttaataaattttgattatacgatacaatagtcactttcaagatttgcgtttttatcgttttcagcctttaaaatagtttatatggaatagaccaagatttttatgcttagtcatgtcacaccgcattcgtaattttattataattttttgactaagggtattgaattccgtattattataatcgtatgattcgttcattctctcttttcttgtttttccaacataaatactattagaaggaagattcatatcacaaatgtctaagatgaacatagagatatgtttgatataataaactttatattataaaaatgtgatgatatccaccagttatgttagtgcagagttcaaataaatacaaacacattttctatgcactagtgaaaaagacaaattttatcctaataacaaaccaaacacttgtcttgcattacattagaaaagacttgtgtggtttcaatgaattgtcgacatcttacaaaaatctacatgagcggtgagagagactggacttggacatatgttgctctaacttcttagtgttgatactttttccaaagcttaaagaaatatagacattatttcatagctacaaatatacagtgatttttaagtatgaggacaaaccagagagactttgatcccatatgtttcaagcaacagtggctttgcagcagacattaatgacatcatccagagatggatgatctcccgtgccttcgtcttttcgaccgtacaataatttcttgcctctgaacacaaacgtacctccctgagaagaagacagaacaaatgatcaaaccaaaaataaaagcagatatcttgtcttgtggagaacttaacaagaaagaacctgttgcaacacactgcttctgtcttcaggagtggcttctatggtgtaattttttgttgcttctcgaatctcgctaaatcttgagaagaccttggtctgcaataatcgaggttttctcatgtttcgaggtgaaaatagtgtatacaatgagacggtaacaatgtttgaggtgagtaggttcatacgctagctgggttgaagaaagtgcggcccaaaccgaagtataaaccaagaacatcatatgcctgcatttaagaagagccctctcaaaacttcaatcaccatttcaacataaaagatatcttaaaaacaaggtatatgtttgtttgtgttaccttgcgttcaggatccgcataaagacattccatgggaaaaggtaactaaaacaaggaaacaatctagactcagtatcttggttaaacaataaagctcccataatacaaggacttctctgggaagttggaacttgctattttgatttatgctgcgcctgttggtatttctgattctatccaaaagtacactatataaagccatgaaaatgcgcttgaatggaggatgaaatcaagctaaatcttccctatatctctcaccctcttctcatgttcgagttgcagattttgcaaagaccaagcaattaacaaatcttactaaattgtatcactaaagagcttgagaataatctcacaaaactcaacccaatcttggtctgattttttaattcacaatgacaccaaacatgctcaaaacgcccattagtgatacaactaactaacggttggtcttcgtaaacatgcaatgttaaggtgagaagagggagctagacactcagagatatggagaagactcggtctgatctcatcctcgactcatggctagaaaccagagtactactaaatgcacttatcatcagagaggaaaaccactagagcatagcataacaatcaaaagcaagttcttctcttaaaaagttcaacccaatgaacaagcaaacataacgtacatccaaagaaaacatatccatgagctcagtaagttggtatatatatcgaagaaaatggagaaatcttatacccgagttgcaagtatacgagccttgtcaggagttccaactccaacagctatcaatttaacaccagccgcatcaaatctcggtttagcctctttcaaagcagtagcaagttcccaactttcatataaaaaaaataattcattatcaaaaacgttttacaacaatccttgattttgcaacaattccaagtgtttatgaatgaatcaatttaccagcaaacgcatccgaaatgcctcaagagtacaacggcagcaattccctgtgtccaaaaaaaaacactattcaaacaataatatcccaaaataatgaaaagaattcgttcttcataagcatcctaacatacatctttctgatcccagagatcactgaattgcacgcgttggcctgaagcagtaaagatagagacatcgccgagtatctcaccgatatcttctctgtaatcagtgaaggactcagtggcagctctcgcggaaaccacacgaggcctactaatcggtgaaacggaggaactgtaactggattttaatttggtgacaggaacagaagcaatcgacgatgagaaattcgatggtaactgagacaacatgggtttcgagcacagaggagaaattgtggaacaaataagcggcaatgagctcgaagatcgtagagagagaatcgccattggtgattcagaaaccaaaatcataaactcaatttggcttatggagaagacgagaagaataagaacaagagcatctagaaattaaacacgtggcgaataatggaccgagaatgtatccggcgtcgtttttagtttaaagcccatatttattttgaaagcccaattcaaatccaagtccattaaaacaaaattacgaaaattgctttcgattttctcatccaaattggttcgtcttccccataaactctcactctctagggttttaaccgtcggcgtatccgccatgagaacactgcggagaaatgttacggagaatcgtcttaccatctcccggcgtagaacggagaagaagacctcaccgaataaaacagaaaagtcagtccagatcccagttgatatcatcatcgagatactcctgagattaccggcaaaatctatagcgacatgtcgttgcgtgtcgaaactctggatctccgtaatttgccgtcaagatttcacagagctgttcttgacccgatctttgcatcgaccgcaactcttattctgctgcaaaaaagatggtaacttgttcttcttctcgtctcctcagcttcaaaatccatatgagaactcgtccgccatttctctaaagaatttctccttatgctataaaatttcgcgtcctgtcaatggcttgatctgttttaaacgcaaggaaatgaacgaaacagtgacagtgatatgtaatcccagcactggacataccttaagcttacctaaaccaatgaagacgagtattgggccgtcaagatttttcgtgtatgaaccgattcagaaacagttcaaggtattgttgtcatataaaagtgatgagcatcaagttctgacactaggaactggagaactgtcatggagaatcatcgaatgttccatgcctcacattcttggaatgtctgagatatgcatcaatggtgtgttgtattatccagcgatcaatttgtcttcaggggattacattatcgtttgcttcgatgttaggtcagagaagtttagatttattacagtcatggaagagttcattaaagcagcgcatgatggaactcttataaactacaatggtaaattagcttcacttgtttctgaaagatattgctttgttgatggacgtagtaagagtattgagttgtgggttctacaagatgctgaaaagaaggaatggtcgaagcatacgtacgtattacccgcttggtggcagcataggattggaaccctgaatttacgctttgttggagtgactcgtacaaatgagattatgttgtcgccgtgctatcaaacagtgcctttcgacgtctactacttcaatattgagagaaagacgatgatgagcgttgcaatacaaggaatggaagcgtttcagggtcacttagtcttcacatatttagaccatgtagaaaacgtgaagcttctgcataacatgttttaattagtacttttgtttcttaagatatttgtaacagaattagtctggctcttggttcctatcacatgactatgggatcttatgttatacacttattactgttcttttcttcttattggatgactatgactattttcaaatggataaaaaatctactttttatgagtaagaaaaattacaatatcgcaaaattgctggtatcataaaacttcttcagtcactaaactgacaaacagggagataataagtatcaagctgccaatacttttgcttgacaccttcccaaacttcatccccaagacaatccttaaccggcaatggaatcaactgagtgctaaaccctaaattctcaatctccaaagtcaccaaattgcaatacacaacatgaaaaaacgcgttgcttccacaaaacccattgaaatacgaataaacaccatcaggcttcaacagcctcggaagatgctgatgaaactctcttaaatcttcataatactcaccataagtatcaaaaaagatcccatcaaaagaattatcatcaagcttatcaagaacatcttgccatcttccaaaaacaatcttcacattctctttctctccccaaccagattcaatcatacgcttataaacttcaggatgagcttcaatgatcgtgtgtttaaccggattgtatcgttgaatcgctgtatcgacaagtcccataccgaaaccaacgttaagaatgtgaccaccgttgagacaaatagctttagcgtgagcttccattaatggtttttcccaagccatcatcacacctttgctttcactatccattaacttgtcttcactgaaactaactctgtcttgaagatattcttgattagaatattcgttctttgtttggtttcttgcgattgttcctaagattagctctgattggatcccggttttgagaagaagatcgaaagtttcttgatgtcctgcttccatggcgaaatctcctgctgagagatttgatggagataatgcgttccatggagctccggattcgagtaacgccgttactatctctgcgtttccgattttagcggcgtgcattaacggcgttaaaccgtcgttatcaaagtgagtaacgtcggcgccggagtaaattaaagtttgaacctttttcaagtcgccggatttagcagctaaacataactgatctgcttcttccatggctggacaaaataaagcaaaactcgcattacaaattgaaaagcaataaaagaaacgcataaattgggatctatgataatcaaagcataaatgaaagattttttggtttaggctcagacacgcataaaaacaagcatcacgaaagattacaagagtgatttggtctctcgagtaagtttcagcatcgagaaatgttttttgtcatcaccgcctcttaaaaattaaaactttcaaatcaatagataacaggaaaatggtataaaagttgaaggaatgaagggaagaagaaagaaactaatatttcaaattgaaatcaacaaacaatggaacatgagataataggagcaagagtcttttacctgagttgcagagtggagacgtatatgaaacggcttggcatttatacatgtgtcggtggatttaaaattagggtttatttgggcctttatgggcttacagtttatataagttggtttttctatgggcctatatctagaaactttattagttaacacattgcccaataaaatgtactcatctttttcctttttgtctaccactagataaaaccccaatttagttcttccgaaacatcaaataaaacttgaaagattccagaaaaaacttgtgtgttttcgtaagtttggagtttgaaatgtagttatgttctgtcaatttttttatacataaacttcgttttaacatcttattaacaacgcaaccaagtgaacatagtcttggtcttattctagttcttatttaaaagtccattgcaagaaaaataagttacaggttattcatatgataggtcaaaccgtcacagagatatgtccacttatttattagccttgttctggttacggaaaattttaccacttgtcttaagttgtttttatcatcaacaaaacctaaaatttattaatccaattgaaattcttgagatgttcaattacgaaactaatttgataaaattacaagttgttcaattaatccagacaatgcttattgataaagtcttttggaaaacaaaaatagatgattgagaagagagctcatattctatgggtgtatatgagtctatcatgcccagtaatagagcagatcagaattttaatcttgtttttttataatcatcgctctcttctcccatcaaattttggcaaatacaataacgtaaatcaagaagaaaattaaaacgaaccaaggaagaaatttttataataactcgatgaaaaagagtaaaagaggcgttgctttgaatatctgtgttgcagtgtttagtgtaggtttgtaagaacatgtgtttagcgtcaatatatacccgacggtggtagtctagagctagggtttcattgaactttttatgggcttataattattcgacctgttacataaatgggcctgtattattgggcctttattagttcagagttgtaatatactgtggaaggctcactctacgttttatcctctagtctttttcttgattcttctccaaaacaatataataaactggacactttgacatgtgacaaaaaaaaaaaaaaaaaaaaaaaaaaaaaactggacactaacactgtaaatgattatggtcgatcactgattacgtttttcacttgatttcctttgatatcactatgatatcacagctctttcgaccagtattggattcgaatttgtaagtaaaacctagttgaaagactaaatctttcctgctatcaacatttttcatgatttcaaaataattagaactttccaagttgctcgtgacattacagtgaataacaagaacttgaacacccacacagaaaatgaaaccccaagctgttcagtaatgggccaaaccctaaatcagataatagagtagaatataggcccaagttgtatagagtccactgatgattaatcttgatcttgacttccaagatacaaatagaaaacaaaacaattgaaattgaagcatatgaaatgccgtatgtgtgtagtagatagaactaaataatttccatgtttgaaacgaatcttgcttgcggagccctttttccctcttttattgaccagactttttgtttctttttctgcagaatgttattttcattacgatggacccttcttaattatcatatcaaccatcttttaaaaagtgaacatgattgcataacactataaactgtatatgatgaaataatacagacagagatgaaaacgtcaaatagaaacagtactttatctatctcctttcacagtatacatatataatcataaacttaataaacgaaaaaaatagtgaacaacataaaaagtcacatatattaattcacttaaccagagaactgagaaaaataaaatatatattttggttacaatagagtgtataacatcaaaattctgcagttaacttcacgagagaataattgggtgaatctcagtatacggatacatccgtcaccaactttcttttcaacattaagataaaaatttattatatgaacaagatctatgaatgcaagtagcaaaaacgttaaaaatatagttgactccatattgatcaattaatttcaccaaaacagactgattaaccaacgaagaacactcattggatattttttttttcttgtcgacattaaataagtatatacaaaaactcaattagcgaattttataaataataatatgcatgtgcgtgttcggtatggtaatggcttcatgatgttcacttactcaaactcaagattatatggctcacgtttctgcagaaacttttatctcatctcatctctccttttctctataaatacgcctctatttcataacttcctcttcatctttattgatatttctcaatataattgatctctgtctcatagttataaaaagaattgtatcataagtagtcatataaaagaatggttaagttcacaactttcctctgcatcatcgctcttcttctctgctccacgctaacacacgcatcagctcggctcaatccaacatccgtttatccagaagaaaactccttcaaggtattaacctcatgctcatggtgtatatcatcagtatatgtgtacataggaaacatgatcgaaaaggctttaatcgtttaaataacaaggatgtacaattttcctgaaattaaagactagtaaatatatatggtttcagctaaagattgtctgattaccataaaagaaaaagaatcattatcgagattaacaattgagtcacgtgcgtataatcttttcttatgcgcagaaactagaacagggagaggtaatctgtgaaggtgttggagaagaagaatgcttcttgatacgaagaactttagttgctcacactgattacatctacactcaaaaccacaatccctaaatgatcaattagcttcttattattgttggatacttggattagtaatcagtatatatatccacatatatatatgatgtttttcttatatccatatatttagcttcttaatattgttgcactttgtactttcttaattattaaccaaaagtactacacatttatatacttatcacttaatctgaatatacatacgcgtataagattattcaattattgaactaagttttaatgtcttcttgcagaccacacaagctaattaatctcctctaattttttatttttttttttgtcaaacaaacaacctctcatctcattttagtcttaaatgaaagaagctgactttatttgttttgtgtaaattaaatccctcatttgacagcatcagtttctcatcataccacacacgcgttaaagataataaaaacatacacctatcaaataatgacacacccacatctataaatgtatatagagacatatatgcttcgcgatttatgtgtggatgttaaaagtataactacaaacttctcaataacttcctcgttcaataacatacacacaaatagtttaccatgaaatactactcaacatcaataaagaattagtatgaataataaaaatttacatcattcatacgcattatacttgtcttaccaatttatccaataataatttcaaattaataacaaaattaggagaaacctaactattgccatagagttttggaaatggtcaaaatcagatcacaagatttaaatggagaaaaataaaaagacggtgagagagaagtcggtgacaactattatttatggtccgtttctcttttctttttcctcgtgtgcaaggccgttgacaaaaagaagaaaggctttttgatgggacaaaatgttactttgggccaagcccatataatagtttactctgttctggaaaacccttacttataaggtctaaaattcgtcgtgcccggaagaagagctagagcgacggcgaccggagattgagattgatcggcagagatagttattaatcttgcaaaatgtttcgaaggaacaggtttctgtctttgccaatggtgatcggtgcagttgtgtaagtagtcgttttatcttaattaggcccaaagtctgaatcttgaatactacgattatggtttccccaagatctggtagattctttttcttattggatgatattgaaatagaaaatggtagattactctgtatccaacttgattttaaacagtgtagattttttgaggattggaattgaatttttctgaaaagtaagtagaaaaagatcattactttagcacaaatggtataatctcctgaaatttgtcaaatgtctgattcattcgttagtagagtgaagcaatctgaataggtttgttttggttgcaggattggtgtggtttcagggaaagctattttcgggcctccgcttgatcagtactggaaagagaagctcgaacgagaagaagctgttgttgccaaggaagaagtcattgaaaagagctcagattcatcgtcaacctaaacatgtttgtactattttatgagcagagtgatgtaaatcataccgtgatttaattacggattacaacgaagagcttggacaaaatgtttgcacggaagcattgttaatttattgtacaaggtgtgatacttacagaaaggcaaaacagtgtaacaaatgtagtaagtgccttgcatttcacggttttgcaaattgttggagaataataatccctaagcagcactcttcttattctcacttcatcttcctcggagcaaagtcaaaaacaaatttgaattttgataaatcccaacttcattgaagtgttgagcagattttgatgccactttggtgacttatgatatttcatttcaagtatcactgcgacttaggatagtatcttgttgttaggatatttcatttagagtttgtcaaaaaaaaaaaaaaaatgggattaagagctggtcttgttggcttagaaaactcatcatcatcaccatgagaggctgtgaagttaagatctcttccatgccagtagtgggcctctattgtgtgtggtcggtccacattaaaatattgttatacatcaaatgtaatattattgggttcctacaaattactgttcttgctgaaatttcaaaaaacgagtgtgaaaatactacttatgttttgtcaacaaaaattcacctgaaatggaagtaagacacgtggacagctcgattcttgcgattcggaagaggcgagccttcgcgtctctctagagtccacccatattgccacgtggctttaaaccgttacatgtggcaaatctcgtgttggtcgctaatacacctcatcatcatcatcttccaaaatttacaaagtctttttttggggttaaagtacaattcttttttcttttcccttatatatttttttctttttctaataattattttggtaatgtagttccatgatcctaagggtggacttctatattttacatttcctattaataccacaaagaactggaaacaaccatatataggaaaatactcctttttttattaatttttcttaattttgattaattatatctcttttatcataaaatctcataacatttaatagttataaggtaagtgtgtcagagattaaaagattttcccaaatactgtagtaaagatttgtattaaaagatgggaaaacaaaatatgagatacagttgacccaaaaaaaaaaaaaaagacaatgaatcatacgtgtatatgtcatgtgtatcagtgtatgtataagtattaattattttctgcgtagatatgataagtacttgatagatagatacgatttcgcatcagtttcggcttctctttttctcgtccaccaacataactatttctcctcttttctagcaaaagtaaaaaataaaaatttacaatatttttcttgcatagaatctctctctccatttttaggattcttcttcttcttccattagtctctattgaatcagaatctcaactctcaggtaaatctcttttcgtcttcttttttcctttttcgtcttgaaattcttgagaaaactacaaactctctctctggttttttcaagacgattcggatttggattcagattctcatctatggtaatcgtgtggtcaaagaccgaactgaatctttattgctttttaattgctctattcataatcaaagtgttttttttcttttcccaatgcgacttcttgattctatacgaacaactattcttccaagttgagagtaatattaatctaacataaacaaccatagttctcttgaattttgaactacgaattttggttttaaaaaacagctgagaatttgaatatcttgagcaatctgcatctgattttgatttctgacatcctgattaaaagtggtttcagatttgattctgaaccgaagaaataggcggcttcttatttatcgttaagtttaatattaaacgttgtattgctctttaagtatctttaaaacctcgtttacttcgtgttattattcaattttgttataacaaacaaattttgatacgttgctctcttcttctttgactaaaaaaacacatgttggtacgtaggttggattttgagagctaattaaatagttaagatgatggaaatagcttatcagcctcggattgattccgagattgaatcactcgtcgagagaatcaatcctccaaggttagtaccttattaatatttttatcattatgttggatattttttttttaataaagtagtattattcttgatattactggttttgtgcgctaattagggtttgtgtagacaacgactctgacccagagtgcacacttattaaggttataaaaagctcttgataatatgctttttaattataagttcatagataatgactaattagccttaattaaacatgtggttgatatatgtaggtagatagcgcgaacaagtacgggatattactggacatggttcaagtgttagccgatcttgatctcgttatctccaaatgttacatctcatctgatggcgaatggttcatggatggtaagtcgtcatcgtcatcatcattcacatgtcatcatggtggaccatatatcacatgacacctgaaatttctctttgttagtgtttcacgtgacagaccaactcgggaataagctcaccgaccgaagccttattctctacattcaacaggtgtgagattaaaatcattagtacaataatcacctaatcatttttaaggaaaatagtataaaattaccaagtaaccgaaaaaatcattaactaagatgaccaactcttataatgtgacagcttcgtttatttatgtttctttttgggtacttttggacgtatctaattagcttcttgagtttacttgtgaaattaatacatttcatttttaatgatttttggtttttacaaattcaggcaatatgttctagtagaacgggaggtataacaaaggagatgcagagtaatctaaaacgggaggtgcaacagcgccacgtgtcaacagaacacacggcctttgagataaccggaatcaatagaccgggtctactatccgaaatatctgccgtactttccgacattggatgtcacgtgacggctgctgttgcatggacccaccacgagcgagcggctatggtgatttatctagaagacgggtttaacggtgggcccattatcgacccaataagaaaggcccaagtaaaggatcatctggatacagtcatggaggcccatcacatagttggcgatgtgtctcatgtcgtcgtgagggtcgtcgaggctaaaggagttccggtcgggtgggctcacactgagcgacgacttcacgagctaatgtacggagaaggagattacgagaattgcttcgactgcgattgtttcggagacaggtgcgcttgaatttatacgaattaatcatcaatggcaaaataaaaatgttgtttagcttcgttcgatacatgtgacaggtgcgatgctttgtggagaggaagatgcgagaggatacacgtgacaatcgaagcatgtaatggctattcaatggtgaatgttaagtgtagagacagaccaaaactacttttcgacacggtgtgtgctttgaaagagttacaattcgttgtgtttcacgccgtcgccggagctaaaggctccactgcagagcaagaatatttcataagaaagaagaacgggggcacgttagaaacggaagggcaaagagagagactaaggcattgtttggttgctgcgatttcgagacgtgcttcacaaggattgaaactcgagattcggacagagaacaagatgggtttgttgtcggatgtgactagagttgtgagagaaaacggtttatcgataacgagagctgagatgtgcacgcaaggtgagattgcggttggctcgttttatgttacggatgtgaatggtggtgagacgggtcctagtgaggttgaagcggttgtacgagaattgggaggagcggttgtgtcagcggttaaaggggttggaatgatgccgaggaggattggttcgacgagtgatagtgtggagcaggacaaagctaagtcgtctattgggagaatgttttggtctaaattagagaggttgtcaacgtctataagatcgttgtgaagtgtttgattagtggtttttgcctctctggttctcgtgattatcgatcgttgtatatatagatgaactaggactatttgcagattcaattgaaattcgtataattattggttttagatgtgatctaatgagataagattctatcaatcaaaaccgttacttatcgtcttaatttgttcgaatgaatcttaatctcacaaaccaaacattataccgtcttaattgaactggaatttgttcggtttttacaaatatgagagaccaaacattatataccgttttattcaagttgtgagagattgtaaattgtagacccaatttcggtttggtttagctattgaatttgacagctggcatggataaagaacaattactttacagtaattaacaagtcaataaaagggcattacgggaaatttaaatattgaaatgaaaatagagagatctttataaaccctaatgtgacggtaaacagtaatacattagaacactctcgaattcgaagaaaatacgtagcaaaacccttatttttgaatttcagacgaattccgatttcttaatcaaaaatccgataagagctttggatttggcggcgaataagaaaacatggcgaatttggatatggagcaacattcatccgaaaacgaagagattaagaagaagaagcataagaaaagagcgagagacgaagctaagaaactaaagcagccagcaatggaagaagaacccgatcatgaagatggtgatgccaaagagaacaatgcgttaattgacgaagaaccgaagaagaagaagaagaagaaaaataagaagcgtggagatactgatgatggagaggacgaagcggtagcagaagaagagccgaagaagaagaagaagaaaaataaaaagctacagcagcgtggagatactaatgacgaagaggacgaagtgatagcagaagaagaagagccgaagaagaagaagaagaaacagaggaaggacacggaagcgaagtctgaagaagaagaagtagaagataaggaagaagaaaaaaaattggaagaaactagcataatgactaataaaacgtttgagtcattgtcattatctgataacacttataaatctatcaaggagatgggttttgcacgcatgactcaggtaatgtttttggaattgaagctttatgtttttgtatagcaaagattcaaccttttacagtttggaatttggttggatttcaacacttttgcagatacaagctaaagcaattccaccattgatgatgggagaagatgtacttggagctgccaggaccggttctggtaaaaccttagcttttcttattcctgctgttgagcttctttaccgtgttaagtttactcctcgcaatggaactggtgttcttgttatttgcccaacaagagagcttgctattcaggttctaattctctcacaattttctatatagtctgtagaatatgctaaaagtgatacttactatacatcattaatgtttcagtcttatggagtggcaaaagaacttcttaagtatcattcacagactgtgggaaaagttattggcggtgagaaaagaaagacagaagctgagattcttgcgaaaggtgttaatttattagtagctacccctggaagacttctcgaccaccttgaaaatactaatggttttattttcaagaacttaaaggtaaacacaaatttctgatttcagttttgggtatactggtattgatttaatgcaacattttttattcgttaatttgcagtttcttgtaatggatgaggctgataggatattggaacagaactttgaagaagacctcaagaagattttgaaccttctaccaaaggtattctcgtggcttgcatagtgaagtcacctcaacattctgaatcatagagatgtaaatttcgtttcatgtcaatgtgttgttgataatggtaaaccgtctttttgtattgctgcagactagacagacgtcactattttcagccacacagagcgcaaaggtctgcttaccaatcagtatagttttcacttaattctttattagtgtcagtttattaaaattactggaacttgattaaaccatcaggttgaggatcttgctcgggtgtcacttacctcacctgtttatattgatgtggatgaaggacgaaaagaggtagctattaacacaatttctattatcttttctcgcaatttactttgtgaccaaaacaggcctttttcaattataagaaaactggaaagtgcaggttacaaatgaaggcttggagcaaggttattgcgttgtgccaagtgcgatgcggttactttttttacttaccttcttgaagagattccaagggaaaaagaaaattatggtgtttttctctacatgcaagtcgacaaagttccacgccgagctctttcgatatatcaaattcgattgccttgaaatccgtggagggatagaccagaacaaaagaactccaacatttttgcaattcataaaggcggaaaccggtattttgttgtgtactaatgtcgctgcccgaggtcttgattttcctcatgtggtatgctttcttaacaactttaatgttttaataatctggattggttggtctttaatcaaattattgtctgcttgtttaggactggattgtgcagtatgatcctcctgataacccaacggtatgttgcttataatttagggtttttatgcaaacacgcggaagaataagggataagaaatcactcaaattcttgaatgttacttttgatttaggattatattcatcgagttggtagaacagctcgtggtgaaggagcaaaaggaaaggctctgcttgtcctaactccacaggagttgaagtttatacagtatctcaaggtaaattattttcattcaataaaaactttgataatttttcaaattatagaaattttgataaaagaatctgtttccaactgtataatttgcaggcggcgaaaattcctgttgaggaacatgaatttgaagaaaagaaattgctcgatgtgaaaccttttgtggtaaaacattcttgctctttcaaataagttttactacactgaagaaacaaaagttgagagatttatttaaaatgttattgcaggagaatttgatatctgaaaactatgcattgaaggagtcagcaaaagaagcatacaagacatacatttcaggatatgattctcactctatgaaagatgtctttaatgttcaccaactcaatctcacggtaaccaaatctgcagcatacatataacaatacgaaacgtcatgaaatcaggaatacaatttgtttttgttttctgcaatttaaacgttaaccgaaggtctttgtttatgtgcaggaggttgcgacttcgtttggtttctcagatcctcccaaagttgctctgaagatagatcgaggagggtacagaagtaagagagaaccggttaataagtttaagagaggtcgtggtggtggtagacccggcggtaaaagcaagttcgagaggtactaaaaatacagttgcacaaacaacgtcatacttagtagtatggcacatgccttttaacgaatgttgtatcttatttttggattcatttacgattgtgttgtcttaagctgtttccagagatatcagacgagataccagttttgtccccgttacttagaaatattgatcattttgttttgcgaataaacttggtcttatatataaacattgcagttttttttactacggctatataggttttgataaaatggaatataaaaattattcacaacaaatttcggtagcatcagatatttgcaagacgtagatttaaatgttatatattgccaaaagaaacattggagatcacatcacactgcatcaacatcaagccagtcgtttgattttttcttctcttttacctcttttagctgaacccaatctggtgattttttgtctgaagaatcagaaccagagttagtaaggttcttgtaactcactttcacgtctccttcgttatcgtcttcttcttctagatcactgaatgatacatcttcttcgtcttcaccaaaaggatgatttgtggttgatcttcctccaatggcgctaactgatgaagtctcttcatcattcaaccaatcatctgcatcgtcgtcgtcttcatcatccacttgcacattaataaatctagatgaagaagcagtggatgtgcttctttcttcaatgacagatttgtcaacaatttgtatctctttgctctcaatagggtgcttgtctgtttcaacgtcagatgactcgactggatttacgattttaacagctgctgtttctggtgaaggaggcacagtaagaggttccacaatgacagtattagcttcagaactccctgcttctacaggtaatttgcttcgtttctgtagttcctgagataacattgatcttgcttcgagtaccttcataagcaaaggcaaaaaaaattagtgacaggaacaataaatgatctaactttatcgcaggaaacctgaagtagcaccacctagaagcttacaaatctagcaaacctgattgacatgctacaactcttcacttatgaggatcactgttttggattaccatataactttctagaagagtatgattagcatcaggcatagggttacaactatatacaatgtgaaaggcataaacttgaaaacaaggaaataggtagacatttgtaagcaatggagttgagaatccaaacttacctgaggagtggagagaagcaaggcatggtctttactgagtttaggatgcacaagaacaaagtaaatcctccagaagcaattctcagtcatatattcagggcaaagctcaatcctcaaagaagccaagctcggtgctagcctttctacagctaaagcgtgctcgtattgagcatcggccaattcaaagtctgaaaattgatttaaaaacagacaattgagaataactgaaacacccaataccccaatcatgaaagcatataaactgaaaacaaaatcaaacttgaacttcactattcacagaaacaatttcagatatataaggaaagatctgaaactaaaacttaccatcaaagctatcgtcgtcatcaggtaaaggaaaatccaaccaagtctcaggatgcatcgcaagatccttcacaaacgcaactaattcctctgtaactccgattacgtcgtaatctttcggatccacatcttctgaactcaattgtaagaaattcgaagcgatctttgtgaactcagacacaggtaagttcccagatagtttcgaaatcccagtcctgaatctcccaccaatctcagcgaaatcgttcttaatcccagcgattagatcctcatcttcctccggatgatcgggagtttgatttctctcctgaagatccggagatgaagaaggttgcgagaggaacgaagctacaccccaaaattgggttctcaaggtcttggtaagttcgctaatgtcttccttaacgcctcgtggagactgtgaatccgatacagattccgacggctgttgattcagatgcttatcatcatcttcatcttcctcatcgagcttgagtgagttcgctatggatctagctaaccaagccatatctgaatctctctctcacacacacatacacacaagttgcgatcgtgatctttttgttacagcagaagcaaatcaaacttgagagatagataatgaaatctccgtctaaatcaatatctaatttaaatattgtaatctttatcttacttaatagcttaatccaatttagagccaaagacgacattttgtattgactgtcaaaatattactggacctggataatagcccatatagttcaactaaggcccatcttaagatagctcctattcgggaaattatttatattttattttttctaacttgagacaaattgttttccagatttggtaactgtgtttagattttatttccagacaagagctctcacatcagtgacatcacactcactgatacaatgtttccaagagatatgttcagattctcatagccaattaaataaaaaacagagataaacaaacagtgaactgttgaaacgattcataagtcaaatcatcctttcttttcaattgttcattcatttacacagtgcatacaaatcagaccaatgcatgttcaaaaaataagacttttattcccctccacaaatctgaaacccacccatatctgttttctaatcctactgttctatcaagaatcactaagggttataagagtgtcaaataaaacgattcatagatcaataatttctccaattattatgactcacaaacagctagtaacttacaagaggccaaaaaaatgattcctttcttcaatctattcttctactgaataatgaaccaaccacaacaaaaagatttatacagtttacttctacttaactattattattcaaataacattgcaaaatagaattcaacacatcgaaactcgtttcttactctcatactccttgagcttcttcatttctatatacatcaacaagatggggcagatccgttgtgtgattttgacccgaaaggtgaaaacttgatcagtcttttattggatagttcttgtgagtttacatttggagataaacattgagtctgaataatgtagactacataacttcaatagctcagctgaacgttgcttcaaagctggatcacatccactttgtatcacaagcaaaagctttgcagccaaaccaacttcaacagcaagagatgaacattcttcagaagctaatttgcaaactgaccaaagaatcgatatcgcatagtttgtgcatttctctgataccttcatcagtaacctaacggtatgcggaatcgtgttaaccgaatctttcaaagcaattctgccttcgctttctaaacataacgaatccaacacgaaaagagctgactctaaacactccacatccaaacatggcaaaacatcaaccaattgaggaactgcaccaatcctaaccaacaagttcctaacttgtttatgaacagaaaccgatttgagcagcgttaacgcaggcgaaacgccgtttcttcgtctcctatctttaaccaatctcattaatccaacaagcaaactatgactagaaacaagctctgctctaaaacctttctcctccaccaaccttccaatcaatctagcacaattgatcttagtttcaatcgaaccatcattcaacatatcaaccatcaacgagaccctagctggttgcatcaatccagctttggaatcagagtcaagctcaagattaacaagaatagctatagcctcagatccaacagcgtgagaagtaaaaggacttaaaagagaagagatcacaaagactccaccttcatcaacaacagtcttcttagcaatagcgtgagccatcacaacttgcttaagctcgcttaaagcatgaacctttgctttccctttagcctttctcaacgtacccagaatctcaatagcacgtccttgcacatcttcagatcgtttcttcatcaaaacatacttctgtgaaaaccaagtgtagatcaattggtgaagagtcttgttaggagtgaccaaatcatcccaaagctcttgcatcgtcgttgggcaagtacaatgccctatattgaaccatttgagaatgttggacctctcgtaggtttgaccagtacacaaggtcactggatcttgcatcggctctagagagataggacagatgaaaacagagggtatttcaggtaattccagctcagaaatcatctccttcaaatccaatttcttcttctcatcggtaacaaccaccagaaatttcccatctccgccgccaagaacaccgtctttaaccgccgagtgtagatctaagatatgcccatcaaacccaccgttcttagaaggctgaaacattggcattttaaaaacaaagtctttcttcttccttgcctttaaaaacgagtcaaaaaggaaactttcaactctctcgtaataataatggagcagtgtatcataaatacatgattaatgcttccccacctgctaaccaagaatctggattgttccaagagtttcagaatcgatagtgaaccttgaaatctcggaacagaacaaaaaagtaaatgaatttgtgagaaatttaagaatacccagatgacgaatttgtgaaagaggaagaaggagaagagaattggttgtggtgtgtgtttcggtgagaaggaaattattaaagcaaagagacaaattaaaaaaagggaacgtttcttttggtttggaccaaagattttctctttttcactctttttgctgggaaaaaactaaaaagcagacaaaaacccaaaaaaaaacacagattatgttgaccgagatttttacaggctatagccggttatcaactcatctctcgacccatgcgccacacgtgcaagctcagatcctgaggttaaatacccattttgtccttggcttgacccatatgtacccatctttagctaaaaaaaaaattgaggtgttttttttttaaatatttttagaccaaataataaatcttcatattgattttgtgttccattgaaatatcatgttgcttaaaagagcactctcttgggtcttccctttaatttttgctactgaaatcgatgtgttgtcaaaaacaataaagtattatctcagtaaattaagaagaaaaatagatgaagggggtattatggtcttttagacgatgagcaaagaaaatcccgcacgtaagtaaaaaaagctgctaagtaaactacaaatacccacgaggacaggttagggtcacgtgcgacgttcatttcaaggcctaattacttcattaaccttttatttgaatcatcattatcattgctataaacaattctctattttttcaaacaaaaatctaaaaatctcgttttttataaacacttttctttacagtctatatattctagaaactatgaagaataattgcagtaatgagtaaatacatggaaaaacaaaagcattactctttctcgtttcatactattgaaatggaacatatttgcttaaacaaatccgtagtattactcccacttaattagaagaataacaacaattttttctctgtaagaacatatttttcaatttttagtaagtttatttcctagattggcacgaaaaagaaaaaagaaaaagtgtaaataaagaagtatggggtccactacatgcaaaagatccagctagacgtttgaccatatgacagtgtgtgttgctttgactgtacgcctcgatcgtgtctcggttgtctttgactgctctgtcaccacttatatccttccacgtctctcttttcgttcctaatcttcggtattaatgaatgttgttaacttttattaatactacaaatttaactaaatgaagataaattttaataagcgaaaattgatgggagtgtcagcagagagatctgagacccatgtgttgtttttgttggagttgagtactctgccagaaatgcagaattttgatattccaaccaagttttcaaatatcacacggattcaatcttaattatgtgttattaacaaaagtatgattcactcaactagttttagttctacaattaattgctagtttatttttgaattcttagtatttttaatttatagagtatgttatcaatggctattgataggcaatgaattcattgccaatgaatgatctcaatgttgtcgatgttatgagtttcccggtcaaactagtaaacttaaagcggaccggcaagagttttaagtcgatgtgacgtgtttgtaataacgactaaaaccatgtgaattttcatattgattgtgacgataatacaattagtatttttaactaataaatggctgtttgtatgtgctagagaagggacctagtgaccatgactacaggctggttagggttgttctaaatattgtttgatgaacagaacacatatcaggacatttatataattgttgtgcctagagttgccctgcataattttcaatttgctaaatttgtttgattatttaacttagaaatgagttattgagattgtcgtatttgaataattacatcacattgcgctttgtattttgtttctaagctacatagactgtcacgtgagtcctaaactcgtagattatttaacatgttgtttcgctatttttaggttagtgatacaaattatgattaatttttcagcagatcataatttaacttgatgaattgatttatttttcgggatatattcgtttgcgaattcatatagtatcatcatgataattggataacatagaactcgattcacgatattattgggtctaaaactgaaaattttaccatgcctacgattatcagaaaatataataatgtttgtgttgttgggctgtgagggcttcgaaatggtacatcaaaatgctgtacacggccttcgtgaatgataggatttaagaagcccaataagctatgcaaaaatataaagatgcaaaatcgagaatttttattgtcgttgttaaagatgcaaatcaaaaatttaatatatctcgtcctagacatacaggttacaaattgactttcgaaaactttattatgtggggcaagttataattggaaattataaaagtgcagatagatatgtcagcgatgaatttattgctttcatttcaagttgccaacaacatattgaatccattgtcaaatatctctatagaaacaaatcaagttgaagcaaaatctttcttatttgacaaattggttttaaattttgatagtgaaactggtaaatcaagtcaactgtaaccaccaatttcttatatactctcttttccttccaatgaatctctcactccccctaaatcattatttcagtatttttaatgcaagaaatttggtgccatatctcaatccatattaattataataataatttcgactttgatatttttgttgttgtacgctttgataacgtgtttaaagacatatagacgtgtactttggcaattgttatttgactattgagcttgtaagcaagtttaagcttcaatggataaatacttcaagaaatttctaaaaaattaatactaattaaaactgccggcccttaagattacaacttcaaccttattttgacttaaccaaagtaaattaaactatagattaatattttgtgaatttttaataagataagtatcaccaaaccgtaaacatccaactagatacatttatatatacataccctaataattattatttctgaaatgcatttaaaacgaagtctatcatacacggcatcttcctgttctagtcgcatctcctctctctctcactctctctgtaatctcttatatcaacttttttttattccactttaaatcatgaaagctaaagaaatgaagaaagaaagcaatttagcaaggttggtgaaatctccggttcgtttcttgatcatggcacgtgacgcttacatacgtagcatgacgtcatgctccgccggtttcatccgcggtggtggtggctccggcgcttttggcttaccacccggtaatttccaaatctgcgaagcaccaaccaccgttctccctcgtagcttcaccctaaattcggccacgacaacacgtgaacgttgccggtttgtcacacgtggcgccagcagcggagaaatcacggtggagacgacggctatgaaacgacagatggatctccggagaaattatagttgtatggttatgggaaggattgatgaagagaaggtttgtgatcagtttgaagaagaggattatagcaaaaaaagaaaaatcggtggagttttcactactcatcaacaataaaagaaagaaaatgaagatgaccatactcattttcgtttctttcttcttccatttctggttagatacaaaaacgctaaacagctgaaagaaattcattttgtgtgcattgttcaagtgtgcttatagactttcttgcttgtatataaatttcagtacggaatacacagtctagattgcagacatagtgaaagtagtccttcattgtgtcaatttcgacatttttgagttacgttttcaacgaacactgaattagtattaatgcgagacagatgagaaatcatggaatgaaaaaaagttttattcaaaaaaaaaaaggtcaaacaaaaagagattttttttttttttccttcttctaggcattagagtagtccttcaactttacatcacccaatgtcaacgtatggattacatttgtcttgcgtgtaaatccttaaattttactggtgaatttttgttatttctccaatccacaaaatggaatttatagtctagttttcccttaaattaaaagtttgaatttttagtctccgtataccataacttttgacattatggggttatctttatatgtttgtatggttctcaccagcttcatataatatctacgaatttttttttttttttttcatttcttgtaatgaagatctcatcaaaagagagaaagtttgagacatataggactactcttcgatagaaactctactataaagcaggaacttcctacaaaaagaatggtgaaaaccagtgatactatagtctcaatttcacctagacgaatttcatgtcagctttcttcaactatctgcctcatcttttcgtgtacgatcttcctcaatatccaccaagtcttcttcctcaccttttttaccggcttgctctttccagtatgctaccaacttcttcaatcgcaccatctctttggatgatatatgtttgctgggatcattcacgatcgttctcactctcgatgcatatctggaatcaaaggaggaaaaaaaacaatatggattatccatttttacactaagcatatttgatttatgttatatatatatgggaactcatgacttacagaagagaattgtacgtctcgtccaaatttgattcggctggagacacattaacaaacattaacgtcttggcattgccgcccaatgaatcgctcatcaacatcgttagcttgtgattcctataaggaatatgctggttgccagaagataaagcaccaataacatcacctaatgcagaaagtgatttgttgatactttgagcttctttgagttgacaaccagctgagcccgactttttaactctctcagaaccagcaagatccacaaaactcagctgcaaataacaaacaaaaattcagaatattgtagaagataccaccatgatcaggtgatatgggtttaacaatggagggcatatcattgactaataatatggattgtgtacataaaggtttaacattttgtaccagaccaaagatttgagctgtaaaataatatctctcttaaacaagattaatgttactatatttttcttcggtagactaagcatgaaaatctaaagaaactcctatttccttaaaatccctaaatgctactaaatcctgtgaaaaatgataatgagtcaataaagaaaaacatagtgaattttgtcaccttgcccctcgcagcagactgggtttgaagatcaatactttcaataacaactgataatatgaggtgagatcttgagctttcttcattcatatttgttccagaaacatgtcgtcgttccgatccccgttcaagaatcattcgcagttcctccaaagttgatataggaatagttgtcacattctctacaaagaccattccctgagaaaatattttatgcataagatcaaacttacgtgtctacaatctagttataacctagttaaaatagatatatctcacaatacctttgaatcttttttaatctctagtttcaagcgtcttgcactttttggtaacaaaaggtctacaagtgtgtcttgataaagttccaccatatatgcctgcataactttttgtagtcagttgatgtcataatcttttatcacatcatctattaggataacaaattacctttagagaaaatgaaaatctcttgctatctcgctttaatatgttgaacagttcctttgtagctcgaggtgtgagtccaggattgctctcatgcccatatatagtgaaagtttttccagaaccagtttgaccatatgcaaagatgcaaacgttatacccatctacagccgactgtaccaaatactgttaaaaggaaaacgatgttagtaaccacaagaaaataacaaaggatgaaaggtaaatgaacacagttacatatcaataatacctttgtgtcttcaaagatatcatcttgactagcacgcatgtcaaatacgcgatcatatatgtgttgctttcttttgtcgtctttccatggatgttcaacagtaaactcatccacagttgtcagcatttgtttttccctctctgaactctctttttcatttagaggtcttattcgacaataaactctaatcttccctttcatatctacaatcaaataaaaatgttagtaaaattcttttttaaaagcaatgaacatcattgtacatacttgagcattatgttaccttctatggtattatagtatcttttccttaaaacttgttcttccttataaagtatttctagctcagcaagttgggctccttgcattttcaaaatggcagctgtttgctcattttttctgtcaatgtcctaagaaaatgaaattggaatgtaaacacatccctctacttcaattttgaatcgcgaaaatacattatcatcattcaaacagaaacaaaattaaataatgaagaagacaaaagagtaccattacctctttcatttctcttaactcctcaagttctttcaagttattttgcaacagcagcatgtcagaattcttactttcaatcgtagactcagcactatccaagtcttgagcaagtacttcaagcttattttcaagttcagaaactcgaagctttaacacctttttttcttgttcatatctcttttgatgaatttcaacctgaaataatgagatgtcaacaatacgcaagtatttgatacttctcaatttgaaatcttcaataaatctaatacatagaattcacctcctcttttttcttcttttcaatattgagattttgctccaatatcttgttttcactcaacaacctctttgaattatcaactgcgacatgcaattccttatttcgaacttctaactccttttggatcttgtataatatctgtgacttaaaattcattgtcaaaggaaagcagaattggaaacaaaaaacaacaactcaatgattacaatgaattagatttaaacacataatattcacctgattattcatttcggctaattctgattttgtctctttacttgattttgtgttgcccgactttgccaaccttgcttccattcctcgcagttcagacatcaaggactatagcatatatagaataaatcattaaataacttcaaccaagcatcaaaagaaagacaaaagttaggttataactaacttgaatagttgttcccttctcgtcacacaatgacctaagtttatctcggtctaaagtaacctccaacaattttctcctttcaagctccaaaccattgtgtatagcttctaactcttcacgcagagtaacttcttgctgatttttctcttgttgttcatccatcaactatacaacaacataaaacatacgaatagttcatcagcatgccactctaaaacaaaagaggtcatggtataacattctacatacaataacataagataggagggtgatatatactgaaatatctcaagactaccaagcataaaaaccatgaaaaaatccaactacaataagttatttcatgtatttaaacaaagatcagcctccctctattatattcaattttacattgaagaataaataagaaatttgttagaatgtgtaccttctcaatcttcttttgggactcttcataagccttagacaaatcttgcaaacgtttttcatacacttcaaaattttgcggcttagaactacaagatatatctccattaaccaagctattggcagcagatcgagctttggagtaacgacgcaacatgacatcatttatatgtgtttgcaaagcaacacaaatttcttctccctacaaacatacaagttacccaaattgaatatctcataaggaattgcttcataatataatgatccacaaatagtgatgtttaaacctgttttgtctcgaactgaaatatgtgaagaacaccagcgactctcattttgaaaaagacagcagtgttactgctgccaaattgcatgatgtcacgtagttcagcagagtgcagatattctttaggaaccggtcgaaaaaagtgaacctacaagaaagcaaacaacaaattcaaatccaacaacatagatttgaattccaaacaacaataacagtttttttaaagtcataatgtataacatttatattgagactaaccccacgtttgttgatacccaaaatgattcgcccaggtaaaagaccgatcggatcatctatcttgcgtacgctaaaaaaaactgaattcccgtatggcagtgccttcagtatccgtagaaattgttgtcttgcatcatctttggtcacgttctcctacatgcccacatacacatacgaaatatcattttaccatgccatcacttcaatgggtttttatttgccaaaggtatctagaaaggggaagacaatcaaaatgcatagaactattcctaccattgaacggtagcgagcaaggatatccaattcccattcacgctttgctcgggttattgctatttgtcttggcaaaaaccgctcaagaagtgatgtccaatcactgatatgtgatacattgagaaaggaaatgatattgttaagggaggaaaattggaaaaataaagtatcggacaactaaaataaagtcaatggcggagcttaagaaaactaacatgcatgactctggactattgacaaacccaatcccaacaagaatttgcaaggcacaaagctgtgcagcatcgtccctcccaacaggatagtttcctagcaaatagtcatgttgcagctgcatatatgtgtgtcagcaacgaaaggcaagccttttgtgtggaaataaatgtcaccaatgaagaaaatgctcacttgaacatacgaaagttgcacaaacatcagatctgttacagcttcatcagactctcggaataatttttttttaaataccagtttgcagtgtagtatctctcctttatttcgatctttaatagctttaaattctgcgaggagatctccaatatacttgttatcatccaatcctatatattcctctgcaagtgcacagatagaaaaatgatcgataatgttgtattacttcacaatatatgacgaagccagtcatatgaaagcataccatttccgggatcagatgatttagaacttgaaacaactttacgacattcaaacaaactaaagctagagaaagctgatagtttaattgttccagctagctcctgaaacagatgtcaatgcagtgagagaaaaagggacaagaatatgatcagcggtaaattatgaaaaaagaaagcaagaagatacctcaacagcatcagacactgtggtagccatgtcatatgaaatttcttcaaaagtttcatcgagaaagaagacaatggttgtgagctttctaccggtcaaaagggcttcaatttcttcacgaccaggtgtggtgtgcctaggaccagctttgatagagcgctttaaagctttcaaagtgttaacagcaagaacctgagcatccggttcaatagttgcatcgtgtgcgacattatgaatatactcagatagatatccaccgatatctttgctaggaggcatagaggaggcacataagtacatcaattcccaagctttgatcaagtattgcctgtcaggattatgtctagtctgtttggagatttgggcaaaaagttcgtccctgagttcaacacgcttcaaagtttttttgaagagctttccaacgaggtcaatgcgttcatctaaactgggaggcgtagatcgatcagatgaatcaacacccatatattttaagatgagatgaaacaacttggtagcacggctgacgagatcgctgttaatcttgaggagagatgtggggattggatcctgaaggaaggaaggggagagagacatattcagtcaatggattgtcaatggggaagaaagggggggaaagaaaaaccttttgaaagcaaagcatatcctcaaatgtgaagcgctcgcggacattggagccagaggactttttggaatagaagaagccacgcttcccagcagactggatttgtttctgcattagccgcagaaaagcttcaacctggaagcgatcgatgaggggaatggcggcggcaagctccgcaggaattgacaatgccacttgaggagctggggagctgtgacagagcgagagactaagaatgttttcaaattttcaaagaagaaggatcaacagagacagcagcaagagagtgaatgtttttaaaaattcaaagaagacttacagaggaggaagagaagacgactcggcatcgaaatcggttccagagggattgggaacatagaagcaagaagaaacgtcggtggcgacttcggtgccattgccagagctcaacgaagaattactgcctcgttggccctccatacccgaagaaaaagagagattgtagtagatctgatgaacaaatttgccccagaaatttgggcagagggagagagagagatggggagacgagagtcacgggagatttttaattgcctcttctcattcaatacttcacgattcacctgattttctaattatttttcgttttcagaagatgagaccaaggaggaatctcaatcaaataaatgaacaatgactatagacgtgcttccacgtccgtttgccatggttgtgcctccaacaccattaacaaatcttaacacaattctgctctgctgctttggtgtcaattctcaaatacaataatgatttatgtaatgtatgcaagtcctattcaacacaagtgttgttacatttattttcttttttctttcccacagacgtaaacaatagtgctccatcaccttctccacttcacagctttgcgatccctaaagcaggcaagttattccttggcggaagctttagatcatcctcccgttccactctctcgaagtactgctccaccatgctatccttcatgtcctccagtcgccttggctcccactataatttcagatattgttatcaacaatgtcacatattaccaaccacaaataacaaatggagagacttgttaaacctttgggttcttatctttgtctaccaatatggctctgcacccctgcataagtaaagacacgctgttgtaactacggtctacaacaaagacggtttcagatggaaaaagcttgcaaaacctccacaaaatctttgctgatttctcccttcatcacatgacacaccattctatactcgcggataagacactgccccaccccctgcaatcgcccttcccttatctgaaatatatactcacagtcagctctttgtcaacattgcctgtgatgcacattctgggaactaaccgatctaagagagattttaaggcttgctggtgaacccttcttcaatgcttgaatggtagctgagatccaaccatctgcttcttgagtggcctctctctcctaagcaacacatatgatggtagagtgcgttgtcaaaggtaaatcagtcaactcaggatcgcaagtcaacatctctatatataaatgaaaagcttacaagtgcagatataatttcttcgactgttctccttgagaaacacctatcaataacatctaacctgcgcaacaaacggggagataaaaaataactgtcctctgcacttttataaattttcaattaaagatcagatgagaaatgagttctgtaaagagcgattgaaaacctgacagcaatacgaaattgaaattatagaaaaaatgtgttataatcatggtcaataaccgagaaaatgtaatcaggtaaaaccatactagtagaaagagtaaaagagataaaaatcatatagacttgcctgcggtaagcactctgctgtttcaggcgcggatgctgggtgtatgcatcgagaattgttgaggcaaaagttggatcatttgaattaattctgcaaagatctgcttctaatgcagtcaacctctgtggaaaggagtaaacctaactaagtagcaatccttggtgaagcagatagtgcttgacactagtagctatacaatatctgatgtgtaaagtcaattcagaatgtcttacgaaatagacgcacgcaaaggaagttcataccgttgaaggcacaaaatgagttgcaaggccacaagcaagcatttcagcaccatctaatctagctcctgtgaggccaacatactcccctgaacaaaaaagacaagaaagcattttcaaactttggtggctttaagaagatgcaaaaaaaggaaatatagcttctgttaccaaaaaaaccagggagccttgacaagaagtaggaggcgcctacatctggaaagagccccagagctgtctcaggcatggcaaaaaccttggagaaagtcgaaagatatgagcatattttggagcgacctatttgtcatccatggacatgtttaaggaaagattaccgtgttctcagttgcaatacgaaatcgaccatggacggatacaccagctccgcctcccatgacgataccattcaagattgaaacctatacgaattgatgagtttatccactcgggagtgattttacaaaaacaaaacgaaattatagcgagacctgagctttgctatatgtggccataacatagttgagcatgtattcagatgagaagtaattggcaccgagtctccagttacctagtcaacgaacgaagatagagaaagagtgtataaaagctgaaagtaagaaacagaaaagaatgggtggtaaaccttgattgatgtcacgaacaacagctgcaacatcgccaccagcacaaaaggctctcccatgaccctgtggcaaagttattcagtactaaatgtgtgtaagcggaagagataaggataatgattacctttaggatgacaagtttcacactagggtcctcctcaaatgcaaggaacagttgcagcaatcgagagatctacagaaaaaaatgagtctaagccaatacagtacgcatgtacaagaagggaaatattcgataccatgtggaaggacagagcattcagctgctttggtctgtttagtgtcaagattctaacactcgatttctcttccaccaaaacctgtgatcatattattaattcagagagcgaagaattgatcgtcgtagattcggattaaagacgcaagaaagagacctgagactgagaggccatctcgactgccatctttcttactggtcagattcgcctttgtatctccggagagaggagcagcaatgggatcagaaattaccactaatggctaacaaaatcttcacccgcttagtttaggaagttgatattgggccttatagtaatctgttggttttaataatgggctttattttgttaatagagcaaatggaactttgcttttcaaactcaatttcaaagccctcttgcaacatgcttgatgaatgagaagattatatgtttttatcgagtacgttagacatgtgttttttttgttaggaagctagttttccaactaaccaacacctccctctagcataaaatgacacgtgggcaccagatcaatcattaaaaaagtcttcaaaaattctcaacaaccacttctaaaagtcagacatgaaagccctcgcctctcgatatatagataatttgcatatacatgaaaactcaacaatctgacgcatatgcaacagagttgaaagatggaaagagcaaggatacgatggccgagtggaagaggaattaggctgaggcagaagacaaagagactgcgtgcgagagtgagaagctttttcaggcttctcaggagctggtgctgcagaaggcctccgctggtcagagaagacggtcttgattacacatctatacgtcgctctaactctttctacgccgatgcaattgcagactgcattgacttcatcaaccgctcctccgcttgacagcttctcattctcttccaataattctttcttccattttgtaaaatccaatgtttctgtatatgcaaccaattcgaattctttgtattattttatttttttgacgagtcgatgcatctttaagaagtgggcttataatgggcctgatgatactacatccttagaaaccacattagtttaaatcagatctgacaactgcagtggttcatacccttaaagattaaaggcccgttgaaaacccattaagtatttcacatcatattctgggccagatgaacaatctgacagctatacaagtccattcccttatccaaaggcccgttaaaagcccacgtaaaatgaatgtgtcagatccttccttgctcgattcaacgcgtccgagtctcagacactccccggcgagatggaggaatacccggaagagctcaggacgccaccggtaagtctggtggctctcttcggatacgcggagctacacgcgtccattactaagtatctccactcccagcagcctcccatcaacgctctggccttccccgacttctctcaaatctctctcctccttgctcatgatgatcagatcagccgaacctcctccttcagagatcctctcagcgtctccgattctgcttctcccattccttccagatgcggcggtattttgaaacgggactggttgcttaagcatcgcaccaaggtccctgcacttgtcgccgccttctttccctcacatcacatcttcggcgatccaactcaatggctacaggtctgctccgatctcgacagcctcaagtatttcctcatctccctttatatttgtttccttgtttcccctcctttgtttcaaaccctcaaattaacactgcgatctcaattgcttgctagatccgtaatccgtcccaaaaacatcaaactggtggttgtcgtggtccagtcttctccccacggtagcgcattttatccgattattcttttcattttcctctcggaactactggtgacttactccttcccgacttgtttttagaggacattagcgacgatcgtctggtggcattgcgaaagcgggcagaattagattctaagtacgtgctcttcttcaattccagcatagtctctgaactcacgctctctctctccaggtatgtttctctcctcttttactttgcacctagaacaagaggcttttccttcaatgcatctcaacacggtatgtttgcagactcgcttctgcttttgcagagttggcactttcttattacagagaagaaggacggagaatcaaaagccgaattgagaaaaggagttccaattctcttgatttgaatgttcgctactgttttaaagtaagcttttctcgttacctctgctaagtctaatcattttgttccaaagtatctgggaaaaggaaggctcattcatgccatgactgctaggtcgctgtatatgcagagtttcgtagagattggggtgaagcactgaagttttatgaagacgcataccattccttgcacgaggtctttattatctctaagtattttgttttttcccaacccatctgtcacgctaatatgtattctgcttctagtcaagaagttccttttgatgcatatatggtcattgctttcttattattacatatctttgcctgcggtttccacacattcaatttcgacgagcaattttgtttatgcaaacagatgatcgggacatcgactaggttgcctgcaatacaacgcttggtcgagatcaaaatcatagctgagcaattgcatttcaagatatcaacgcttttgttgcatggtggaaaactcatagaagcagtgacatggtttcatcaacataaaacatcatatgaaaaggttgtcggatccacagaatttatttttctccattgggactggatgagtaggcagtttcttgtctttgctgagttgctggagacaagctcagcaactggtcagagcttaacatcctcaaaccaaggaactgcggaaatatctttgactgagtttgagttttaccctgcctattattatcaggtcagtcaattctgctctatgtaacacatagtcggaacatatctaaacttggtggtgcattttgtgttaaatcttttctgtgtcttttaccatttagttaaaaacaatactacataaacttaaacacctacctctaagcaaatgctggatttttcgtcctctttctcataaatttctgagctgtctgttcctaggtacagtatgttgaaaatataatatgttcttatccactgggaaattttcgttttacacgcagttggctgctcattacttgaaggataagaaatctgccctggaactgttgttgtcaatgtctgaaatagctcaagagattgatagcagctctgcatctattactccttcagtctatgtgggtcagttcgctcagttgcttgagaagggagaagctattacacttcactcgtaagttgttcataattcatcccacaaatctatgtaaaagaaaactaattatgctaccaccatctctaatagtatgaattctaatgtatttgcagtataacggatgaagagtacacacggtatacaatttcagaagcaaagagagttcaggattcccttcaaattattgcttggctgaagagatcttatgaatcatttaccaaccttaaagcccagaggatggctgctctttgtgcctttgaagtagcccgggagtactttgatttggctgatcccaacaacgcaaaattctttttcgatattgctgcaaacttgtacagacaagaaggttgggtaactttgctctgggaggtgttgggttacctgcgagagtgttcgagaaaccttgatgctttgaaagattttgtagagttttcacttgaaatggttgccctgcctgtaacatcttatgagaattctgggaacttaagaaacaaaaattatggtcctggaggtcctgcaacaatttcaggaagagaaagtatacatcaagaagtttttactcttgtttgtcgtgaagccgagctgttatcatctaccgaaggaagtgggttcaaattagccactgatagccctcttcatctcgagattgatcttgtcagtcctctgagacctgttctcctagcttcagttgcttttcacgatcaaatgatcaagcctcacgctttgtgctcttttacgttgtcactactttctcatttacctcttccagttgaaatagatcatctagaagttcagtttaatcaatctacatgcaactttgtcatcagaaattcccagaggcctctgtgggcttcggcgtctaacactgtgaaaagtggtagccaagtggagaatgcgccattgctggtgcttgtgccgaataattggttaaggttgacatatgcaatcaagtctggttagtgtgatttaattataagggtgttgtttgtatctaacacactttgcacgtattgcagttattcattgaaattcaaacctgttttggacgttttcgtattctcagttaccaattagcaaaactgaagcttcagaacttgtatctatcttatgaaagcaaaagggaagttgttttcttggctgcctaacttttcacacatttctttgtttcatctgcagagcaaagcggc

SEQ ID NO: 971 - DNA, 79899 bp, Arabidopsis thaliana
aagcttgagtgtctttcagttcttgcaaaattggggcctcttttcacaatctgttcaagagccgagagtcctgctgcaatggaggatttacctgtctggaagcatgaaaatcgtgttgaatctctgccaacaaaggacccagttcttgcagtatttggccagaaagctactcaagttgatgaacccgaaccacaggtggacgtcagtctaggtgcttctggtcctgccctagttggagaagattttgcgatgccaatcgtggtaacttcaaagggtcatgccgtatacagtggtgaattgaagattaatctagttgatgtgggtggtggtggtttgtttagcccaagagaagcagaaccgttttctctagaaagccatcatgttgaaatctgtggtattgatggggcagagggcaacaatgaatccgagtctgaaacagggagcataaagaaaattcagcaatcttttgggctggtttctgttccatacctgaaggaaggagaatcatggtcgtgcaaactggaaatcaagtggcatagacccaagcctgtgatgctttttgtgtcattgggttacttgccacatggcagtgaagccaatacccaaaaagttcacatacacaagagcttgcagattgaagggaagatgcctcttttaataagcaatcgttttatgttgccatatagaagggatcacctattgctcaataggataaagccagcccctgattctgaagacgtgtcttctctgccgctgaacgaaaaaagtgtgttagttgtcagtgccaaaaattgctcagaaatagcgctgaaactggtgtccatgtccattgaatttgatgatgaacaaggggaaacttcatgtttgattcagcagggtggtgggtgtggagactccccaagctctgcaaatcttgcgccaggggaagagttcaaaaaggttttcacagtcataccaacgacgagaactccaaagcttggtttgggatcaatacatttaaaatggaggagagagggaggtaacataacagaggcatatgtttcaacaaagcacaaacttcctgaagtaaatgtggaggcatcaccactggtaatgagtttggactctcctccatatgccattcttggagaacccttcacttacgctgttagaatctgcaaccagacacagttgctgcaagaagcaaagtttggtctggctgatgcacagagttttgtcctgtctgggtctcacagcaatacggtttcagtccttcccaagtcagaacacgtcttaagttataagctagtgcctctgacttgcggtgaacagcaactcccaaagataactttgacatcagcgcgatatgctgctgagtttcagccatctgcggttgcttcaagtgtctttgtgtttccctcagccccacaagccgagaaagccatctctaccagcaagtagtgtaacttcgcatgacttgggttttcagatgtctatgcagtttcagccatatgtggttaagacagacatattgaatcagtttggtaaattttgatcctgaagtgtcgcctatgttgtattttcatttttccttctgttgttgataataatggatattttttggagaacccaaactagacacataggattaggacacaatctgttttgagatgtgttttgtggcaactgtttttctttcaatgcaaaaagtgtgtgtgtgcttaaaacgaccatacatggtcaagctaacgcagataaaacattcaatatttcgttgtattgggccttttgatatttgggcttcaaattatcacttgacgttgggtttgccttttctcacttgacgacaaatcagaattagcatctgtttagattggatcttgatcactggcgggcgaagttggagaagattgatggaaagccgaccgggagttttggtcgtcggatcctctggcgtcggcaagcgcaccctcctctctcgtacgcgcttctccctctcggatccgattcaaaattttgttttgctctaatatgtaatcaatcacaggattgctctctgtggaatttgaggattcatcggagtcatcatctcaaacagaagttcatgggtacgtctagtactgaagaatttcttaccctaacaagtttcatcgtttgaacacttttttctctctgtaaaatgtgggcagctggacgattaacactaagtattacactgcggatgtttctgtatgtatatcacatatttgcgatgaatactctctacccaatctccctaactcacatccactggtggcgttagttatggtcttcgacttgagtgaggtttgacattgatgatgatgatgatgatacacgcttcattcttctcaccttaccatccctgcataacccttttttacccgattctttgcagctgtcaacccttgttgctcttcaagactgggtttctcatactgacatcaacagttttgatatattgttgtgcattggtaacaaagtagatcgtgtccctcatcaccttgctcatgatgaatatagacggcgccttttgaaggcatcagacccctctagagatctgtattcggacattgatgactttgggatctccgaaactgaaggaagcagcttgttgggaagtgaagatgcatcactagatatcaggggagcatgtcttgagtggtgctctgagaataacattgagttcattgaggcttgtgcctctaatcctgattttgacaagtgtaagttctatctccttccttctgattatatattgactgcaatatgcccaatgtaatctggttactccttgtatagcttctactgaacttgtgaatgaaaagtgagtgaaaatggatgagcagagaatacgcgtattcgtctctctagcattaatgaggctcacgggttggtccttgtaggtttatcagtcgatggggattctcaaggggttgaacgtctatttggtgctctttcggctcatatgtggcctgggatgattctgaaatctggtgataggataaatgaacctgtgttacctcaaggggaaggttaattgtttcttccactttcctctcccatatatgtatgagttcctgaaatgtcctttcccggttagagtttctgttcgaccaggaagtggtagaccgaaactcgacccagataagaaatcctggtgaggacatttcatttccacttggattcatgttgattgggtcttatatttcctctcagagttgtcagaagaagaatctgaatatgaattggagtatgaagtgctatcagcaggctcaggtgatccatgggataatattgaagaaagatgggtttctgcaagtgaaacgcattcacatgccgatgctggcggatccacttcacaggaaaacctccatgtagaaaatagtatggtgaaaccgaataaagttgatgaagagctgctgccgtcagggtcaaggttagagctgcaaaatgacactgacagagcaatagtaacagatgaaaaacctttgggcacagaaaatgaaaaatgttacgagtttgaagatgtggaacagttgatgtcagaaataggaaacatccgggacaacttgcgattgatgcctgatttccagaggagggaaatagctgcaaatttagcgatgaaaatggcttccatgtttggaggtgacactgatgacgaggaagaacctgagtgagtctgtttatatcagatattgtaaaagatcagcgtgagctacggtttaatcctttctttatacaatctttatcaaagtccgtgtcttgttttttgatagattctggcagtaatagtcagttgcacgatgtaatacttatctgggccgacctgttatgtatcgctttactttttctttagatacgtaagagctctaaaatacagccttatacagaaaacctagttggtaacacttggcgaagcaattgttggcatacatgtaatagaaaataaagaccggatgatggatttgttctgcattcattttgaatattagtcaatatcattagcaggaacgttcttcacaaaggagaattggtttccaggactaatatctccagtatattctatctctgtgttctgatcaccaaccctgacgagagtgtgcccctctattggttcaggggataatggctcagcttcaagatcagacatgctttggtcctcgaaattactcatataagaggctgtcgagtgaccagtggtcttggagcggagtagagtggctccagaggcgtgaaaggatgaggtagaggtgctgacagtgtcagaaacaccaagggtctctgttggtggctttctcgctttgcctttcttcttcttcacagtcatgtgccatttcttcaacgcttttgccatttgctcatcaaacacagctttcttcatgtttgaacccatctgcccacaacaacaacataagtttgttgcttagttactactatatagcttcgtagacacaaatatctggagagtaaaggctgaaattaggataaatgtacctgagtaactagtgcatacaaaggaagtgtgatgtagctgcacaaaatcaaagctccaacgctgcaaatttatcaaacttgttgagctaatcgttccaagagagatatatctattagtttattcactagagaagaataagaataaattttaccctagagagagttttacgatgactagtttgaaatccgtgtgaaagcaagattttagcccaaaggaatactgcatgccaaattaacgaaatgtatcaagtcatttgtatcaatagaagagaatatgtacatggtccaaaaggcaaacaactagtgtattgcgcatagaatatagagagatgttgttacccagacccagaagaagtatgttagctggaaagcattctatacaaaaagaaggagcatttagacagcatggcacaaaagttgaagacaagtatatgtaacatgcaatggtagttttgtttggaactgaaaacaatgcaagtacctgaaataaggcgaagtgaagaagatgaagtagcaactgagggcgattaaaccaaaagtacttatctgaaccatgcacgagaggtatcccttgaacaactgcgtgtctctccgtgattcccagagccattcttgttaggatcgcttgaagcttcgtactgacagctagaatgatctgcaaggggttgtaaaaatgagacatacaaacacagtataagattcgctcaagagtataacttgtcttacaagtacaggtaggattgacgcccaaaacaatgcttcccagcctaaacaggaatgggattatttattcagtagaacaataaccaatggcttggtaaaagagcaagcaaatgcaaagctgactcaccattaacattcagaagtaggaaaattacaaatgatgcccacaaaagaggactgcacagtacagtatcagcaatgtcaacaaacacctctcaacgcagtactagctctagcactgttttgtgctacgtaccttattccaactaccaccttgaaatcgtcttccaatgatcttttgatatacttctggaagtcgaactttcttcctggagctaaatgggcctaaaggagactcacccataagcatcacaccattagtggaaggcaaatacaagagagaattgagttttgccttacagcgatgaagccatggcgcagagttaagtagtcagtcctccctacagatcggaaaaactgctgtaggaagcacccctgtaaatcagatggttgagagagcgagcaaaaatcaatttttaatcaacaaacttgatgccacgagggcatgctcaagaagaagtaaatgcatgcttctcacagcataaaagaagaaggggatttttgtccagaaactggaatgttgtctaacaaaggacgtctcatgagtgagtctgaatcttgatggatctatgcatagagaggagccactttagtgacctataaaacaaaggtttaatttaatgaacaagaactcgcctaccgattgaaaactcgtaatcatgagaacatgtctcctgctcccactttttccagccacggatctgcagttacagaaaatgatgaatagctaggattacgaaagtttgagataagaaaatcagggcttgtcgtaccttgagtctgccaagcatcatggtgatgaaactgtagaggatatgaaaggcagccatgaagaacaatagaatgtgtagctggtgcaaacccgtggcaggtatgagtggttcatgaccctgcggacaacaaaaaagtgttagagagatagagctagagcgtaaattttttagtacaagggaagctagagatgacctcatcgcagcgggaagaggtcgtagcagcagctagacgtctgcggtgggtcttgtcttggtcatgagtagaaggagctggacaaggtaacatagaggctgcagccttttcaggaatacaaatcttgagaatgtactgctctccgaaggtgagcaacaaggaaatgaatcctagaatcatcagctctgcatccatttcatatatcttagttttcttaaccaaatacggtaggagaaaacaattctctggtcttacccgcctttattttctccaaggcttcaagcagagagttcttatgtttctcccacaaccactgagaaataaaataaaagtttagagggcggaagtaaaggaagaaagaaaaaagggaattcagggcaaaccgtggcaactctgtgaagagccttctcgaggaggacggagacaagaatgaagaaggtacagacgagggcaacggcccaggtgggagtttgggagagtcctttctctttggcgccgcctgcagaggaagctcgggcaaagccggtaagcagctgagagcagaagagcaaagtggtccaacaccaaaagcatcttgtggccatggtagccaaaagaagaaaatcccttggtccttgattacgtacgtgaaacaatgaagagggcaaataaatgcggtgttgactgaaagtccgtttactgtgatatgtaatgcataacaataaattatgggaagagaatcaatcgtcaatgtttgtttgacactggaggtacttgagaacaatcaacctaataacactcctccatgtctcttttcgaaacccaacccttacagtagtcaacaacaaactaatgtcactgttgtggctctatatatcaaaactaaatgacaatttgatcccctgtgagagatcagaggggtagaagaacagaatcgtccaacacactcgtcagtttgactatttggttatgcttttatgattgctttccccttttagtatttccacttttagttaaatataacccaacttgcaactttagagatatagaatgttatcttactcttggccgttgctccactatctaccacctttatttattttttcttttctttatgtacctacaattttttaaatgcatggaggaatcatcactttctcagcctgggataactaatatgattataacaaaaggctcctctttgtctctatcaagtttcttccctctttttagtttcacgtaatccgatcatgttgtaaagtttctttgtagaaatatatattttgacaatgataaaactaaatgtattagaaatatatcttcatttgatcatctatcgttgatcatatgaataatttggaaacaaatggacaatgagctaagcccatatataggcctcacaatagctgcctcatacatacataccatgggctcttttaggcctatctacttctttgttatatgatcgaaatcaaaaggtgcccttgtgtagacacgccatttcctagtcacgcaactatcttatctcccggacttgttctaccacaaaacctggtctcatccttcttaccgttttcttgtttaaacaaatatttgactctcttacttttaatttattataatcatcagcacacgtaattctccgagacatacaagcaaacgacggtttcctcttcctcatcttggttttaatcccacaagttttttttagcatatcacttattttttgattggataaataaattcgaacaagatactgtggagttgtaaagaggaaacagaggagatgtgcaggatgagattattttccccaaattacaatgcaactgttttccatgtgtgcatatgtgatatgtgcagggttgggatcagtcaacttagcagagtggcttgtgaaagtcacacatatcacagttgacattttttttattgatatttgtaataaagtagagagtatgagcctatgaggagcattgtggacttggcatagcaatcagcttgggggtcaaattcaagagatgttttgtatcgtgactttatgttaggtgataaagacaaataatattatgattaaaaggtcaagtttggccactttgaaaaatgttagtttgttagttgtgactcatgtgctcgaatatccatggatagtttaaatacatctctctagctagagaaaaagaaagcggaaataaagatataaaaatatttggaaagaaagatactgggagcaatttagctacagcatgacgatgagtcttactttgattctgtcaacattattaacctgagacaatcccaaaagtctttcgtcccaatattgaatcttctaattttgatatctatgtgattttgcatatgcactacctgagagaccaacagtacctagaggccaacttgtcctttttattcacctttcttgcatgacttttcctatgttgaaaagttagactcctcttttacacttcatgtaccccactcctatacgtatttaatctaaatatatatacccaccaatcctctccatctacacaaacagcccaaatatcaaacctttcatctctatatctttaaccttgactgcttctcttcttctacaagaaaccagaaaaaaagaaaagaaaagaaaaagaagagattagggatgggtttcttagagttgttggaggtggcttcaatgccaatcgttcaagttcttcttatcagcgtccttggcgctttcttggcaaccgattactgctctcttctctctgctgacacccgaagatccgtgaacaaggtcaacctccgtctctgcttttcttttttctgtttggtgtcaactatgcatgcattcatatatcatcactaacaaacattttccctcgcagctcgtcttcgtggtattcaccccctgcatcatgtttgccaaccttgccgagactgtcacattgcaggacattatttcatggtatgcactaccagtctcctatcatccctctgagaatacatacgtgtggctttgatttgaccaaaattagttttgtaggtggtttatgcccataaatgttggaatcacctttctagtaggaggcattcttggatggttggtggtcaagctactgaaccccaaacctcaacttcatggcctcataattgctacttgtgcctcaggtaacattaaaacctcaaaatttaatctcaaggaggagagatatatccctgaattctcacatgaatcatatttactgtcctgtctacgtaggcaatatggggaaccttatgcttatactggtccctgccatctgtgacgaggaaggcagtccttttgggaatcgtagtgtctgcagatccattgggctctcctacgcatctttctctatggccgtaagtcaaacatacatacatatgatcttctgatctctgctcagacttaattgttgagttgatcgtgtgattaatttttgtcaagggcagctcgggggtttctacatatggacgtacagttaccaactggtaagaagctctgctacacagtttagagctcttgaagccgccgggttggtcaagtctcccaacaaggacatcgactctgatccccacgctcttctcctcaagccgcaccaaaaccaagaccttgaaatccaaggcaaacaaaaagtgtctaccaggacatacatcaaggacttgctccatcagattcttgaggaactcttcgcaccacccaccattggtgccgtaagtctttttaaaaaaagaagacatgattacgtttccaaccaacaactaataaatccactgctctgatgcgttgttatatgttccattcagattcttggcttcgtcttcggagcaaccaattggctaaggaatcttataattggggagaatgccccgttgcgagtgatccaagactcagtaaagctacttgggtatgaactcatcttttttgaatatggaaattacaattacatcacgactttgcgcctaatagttgacttggcagggagggcacaattccttgcatcacactcatactggggggaaacctgattcagggtctgcgttcatcagctgtgaagaaatcagtgattgtgggagtgataattgtgcgctatatcctccttcccgtggtgggagtcggggtggtccaattagcaggaaatctaggctatcttcctccagaccctctctttcgatacgttctcatgcttcagttcgcactaccgcctgccatgaatattagtaattactcaagccatcccccttcacttcattgttagctagatacggatgattaatcatacactatatatatatggattgcaggcacaatggcacaactgttcgacgtggctcaagatgagtgctcggtcatcttcttgtggacctacctggttgcatctttagccctcaccgtctggtcaaccatcttcctctccatcctctcctgagtctgatttgaaaagaaaatggagtttgtttggtctcttgtatggatttttttgatttgttaatactctcatagtatttttgttcattcacatgttgccaaataaaacagagaaagacaaaagtatgtatgtttcacagtgttgtgggcttttactcagaaaaaaggaagtgaggtatgggctcatagagaaagagagagcccaaaattggagaggcgtgttcaagttggccacagaagaaggggagacgtgcgatgcatcctccacgttgctttgcttcgattggttaaaacctcttcaatcatttctgaaacttctacatttcttcacacctgtcctctcctccttacctgtccgttttttgtttattgttctgctttttgatatactgtatcaaagatcgattaattaatttccgaattcaacagctcattcattagttgattagaaaatttagtttggttaagcacataagtaacacgagtcaaatgtcagagttttgtttattgcttaagcaaatactactatttcttaaattgagaaaccccaaacaagagccaatgaaagttttgtatctttttcttaatgacttaaaaaagggaaaaagataaaacagatatcatttgaccacacaaacatatacaacacacccaatcagagatcgatcgccattaacgtagactgtgactctcggctcttcttcactctcaatttcgatcggcatgaggtacgatcaggaagcgggatcgtcctcccattcgctgccttcgggatcatcctcccattcgctgccgccgacggaagacactcctcttttggggcctcgaacattgtcgtcgcagccaaaaacctttgcaaatgtcttcatcgccatcgtcggcgccggcgtgctcggacttccgtacaccttcaagaagactggatggctcttgggcctcctcacactcctcttcgtatcctccctcaccttcttctgtatgatgctcctcgtccacacccgccggaaactcgagtccctctccggcttcaacagcatcacttctttcggagatctcggcgaatccgtctgcggccctgccggtcgtctcgtcgtcgatgttatgcttgtcctttcccaatctggcttctgcgtcagttaccttatcttcgtcgccaccacaatggctaatctcctcagccgcggcaccgaacatattctaggcctcgatgctgcttccatttacctctggggatgtttcccctttcagctgggtctcaactccatcccatcgctcacccatctcgcccctttgagtatattcgccgatatcgtggacgtagccgccaccttagtggttatggtgcaggatgttttcatcttcctgaaacgaagacctcctttgagagtctttggaggtgtctctgttttcttctacggattgggagttgcggtgtacgcatttgaagggatcggaatggtaagcagaccaactaattcctctactgtctctctatctggtgctaaaactaataatcctgatttgtggttggatgtgaacaggttctgccactggaactagaggctaaatacaaagacaagttcggtagagcgctggggctagccatgggcttaatctcgatcatgtacggtgcgttcgggctgctagggtacatggcttacggagaggagacgaaagacatcatcaccaccaacctggggacaggagtggtgagcactctggtgcagctgggcttagcaatcaacctcttcttcacattcccccttatgatgcaacctgtctacgaggtcgtggaacgccgcctttgcagctcccgttactctgtatgggtgcgctgggccactgtgctggtggtcacgctcgtggccctgctcgtcccaaattttgcagacttcttatctctggtggggagcagcgtctgcgtggtgctgggctttgtcttgccatcactatttcacttgcaggctttcaaaaacgagttgagcatcacaagaatagtggtagacgttctcgttttcctcattggtgttatgatagccattaccgggacctggactgcagtacatgagatcctgacatccaaggcctgagcttcttccattgtttatttttgtcagtatgaaaagagaagcattgttacctccagcgaacacggcattattattgttattctgttactctcctcacttgtttatttgagtcttattactctatttgtaagaaagacgcaccatggaaaaccaataagaaaaatactcttagaatcaagtttgataaacaccatttgcggctattcgcaacaaagagactaaatcaaaactgcagaagccaaatcatttggactttggcctccctctttttctagtcacctgaatctcttcttttgctccttctccattaacagattcgttcagtctatcggtatctaactccatgccaaggccatcgaattccaccctcttggaaacggcatgctctgtattcagcctctctcttgagcatgtgggaaccgcacactggtcgtcgttcttatgttgacaactcgaagaagagtttgaaactatgccctgactgacgacgcctccaagttgcaacttggagggtaatgcatcatccttggaaaacaacaagtcagcagcaacatgcttcttcttcatcttcttgtccttgtggagacatgcgtcttgtacgagtccctggttaggaggaaaggaggcaatcaaatctaaagcggtcttagcagcagcaacggcttttgctgcagcagcggctttctcatctgcagtagctctggcggccttagcagcaatagcagcagcggcagcagtacatctcgaagcatctgcaatctcctgaggggtgagatctggattactcaaatgagaagctaaaagaatgctaagatggtaatcaacattggtggaaggatgtggaactccattagcatcaacctcttttgtcagcacattgacgccttccataattacacatacaacaaatctctctaacctacaaaacaaaccctatcagatcttacgcggatataagagagaagccaacatcggagtctgacgctaagatgcatttctagaaaaccgatgaagtaagcttaagagtttaccttgaatgcgcctgcgaaaagagataagagaagtccgccaaaattagggttttggaggtcgaaattctgaaactcacagatgaacgtttaggcttgttgtgtatttatacacacactcacacattaaaattaaatttgagacgaagatgataaaacccaagcagcgaacgactttcttcttctccgacaccaatttcttcgcacgttctgttcggatattcgctttattaccagtgcgtgcgcgtcgttccgtttcacttcctcccacaaattacttacagattatcccttttgtcaaattgttttttttcttttaattagttgaattcctttttatttagataatgaagatgttttaatgtagaaagacaacaaaacatgcataatttatgtaagtttttttttccaaaaatctttgtgcttttagcctaaacatgttttgaaatgaaacagtggattacattttagaggttgatagggaaagagatgtcttttgacaggctgggaaaccctattgcttgggcagccaaccagagaaaacatcaaagatatgttctttcatgggatctctgttagtcgcactcagggagattacattcactcccggttggttcttcaaccttgccactgcagacaacaaagaagaaagtaaactttgttaaggaaaatagattagtgaactctatgcagcttatctagactgccaacagaggagggtgacacataaagccaatacaagagtacatcaaagtggaccatagcacaattgactactcaagagttggaaaagtgttccaaacagtatatagatgtgaaggcactttcataaatttcaatttaagcagcacgcacggttatcattggcatcaggattggaaacaactacaggctgaaaacgaatctagttaacagatgaaaccgagctctgattcctcaataattatgtttgattccagataatgaattaccttcaggaagatgtcgaccaaattttgggctaggaatggaagcaagaagaggaacgttggagtccaaaacattgaggacagccggaaaaaaggatggactaaacatctccatcttgccaacttcatcaatgatgaaaagattggtatcgtctttgaccttgaaaaccaatgctaaaccagtcagtcagtgttcatctatccaaattatcaaggaaatgatgagctgacagaacacctgtagctcaggcaaggctatagactcgaaggatgcaatgtccactttgtacttgccaacactaggccatgtcatcgattcttgactgccaacagagagaaacaagtagcctaattatctgtgagagggaaactagagatttaagggtgaagaaggagaaggaggatggacctagaaacaatagaagaagcaagcaaacttgtgcggccatccaaagtgaccacttgaaaaccaaccctttgtcctcgttccctcatctcttctgtgtgttagttataactaacggtatcataaaaaagaagaagacttgatgactgattggtgtttagaaagaggaagagagagagagcttacttacgagtgtagaaaccctggatttttaagttagggttggaaaccctcatcatatccaacactctcatgatcaatgtggtttttccgacaccctgcccaaaaagtattgaaatccaacaatgagaaactgtaaaaggcgatgagaggaaagcaggaagataagcaagctcacaggagggccggtgacaagaaggcatttcccggtgcctgccattttctggccgttgttggtaatagtagccaataagggtcacaccatccaaatccaagtaccatccatttgcttacgattacagtcaatttcttctggactgctattcagatccctctgattgtgcctaaaatttggcttcttcttcctccacaagaccattaaagtctgtccaactactctttgcgatatatatgggcctcatttaaactttgggccgctataatgaaaagttggcctcatttaacttttgagccgatataatggtcccttttaaaattttgagctcatttaaatttcgggccgctataatggcctcatttgaactttgggccgatatatttggcccagatgtttattttccgggtccgggatatatttagggctattttccccctttgtgatgcaacgacttgaattttctcattctcgacaacgaaccagggaacaagaaccgtcgtggtcgaaaacgaagaccttggcggcaggtcatgtacggatctagggggtatgtattcttacattcgatcgccatttattctactggatttattttcctgttgcctgattggtattaatcgatttgtgttggaaaatcttgaggaatttagagggttggtgtataggaagaggatctggaatcgattattgtcattttgctacttgttgttatttgttccattaggtatataatcgatatgagtgtcattggtcgttgtttaggttcggtatttgtttgtgtggtgtataattaagaatgggtcttacttactatacaacatatatagactaagaatgacagggaagtctgggttgggtgtggttatattaactggttgagttgggggatctttttccgggtttcttgtttggtaattgaagggccatgtttgggagcggggggtacgaggtgggatcaaagagacaaagaatgatgcaatcaaatccctacttggcagttggcactggacctaccagctttccaccttttggctatgccggcggattcccagtcgttcgcctcaggggtcttcccttcaactgcgctgacattgacatcttcgagttctttgcgggcctcaacattgtcgatgtcctgctcgtcagcaaaaacggtaaattctctggggaggcctttgtggtgtttgccggccctatgcaagtcgagattgccttgcaaagggacagacacaatatggggaggagatacgtggaagttttccggtgctctaagcaggactactacaatgcggtggctgctgaggagggagcgtatgagtatgaggtacgtgctagcccacctcccaccgggccatccagggcaaagaggtttagtgagaaagagaagcttgagtacacagaggttttgaagatgcgaggcctcccttactcggtgaacaaacctcaaatcatagagtttttcagcgggtacaaggttatccaaggacgggtacaggttgtgtgtcggcctgatgggaaggccacgggagaggcatttgtggagtttgagacgggggaggaggcgaggagggcaatggctaaggacaaaatgtcgattgggtcaaggtatgtggagttgtttccaactacacgtgaagaggctcgaagggctgaggccagatctaggcaatgactctttccttcactatgtatcattatatatatcctttggaccaattttgttaggttaaaacccaaaatgtttatcagtggaatcatagtaatgtaagacctgtgtggttcagtttctgccttgggatccagttactggttgttttattctcttttctgaatatatatgttcttagaagtaaatgtgacatttttttggaataaatttgtagcttgaatggatcagacatcagagtgaaagatttaagatctcgggtgagattgtataactttctagttttctactcatatatttgcctctcaattatttattaaatatgactcacaatacaaaaacccaatatgcattaataaactgaagtcaattaatgatagctgttgaagaatgaaagtgtaacgacaggaatcgatgtgctcccattgaaaggtaagctatggcttcaagatctgggcttgtgcagactaggccggttgcagaagatacggccattggccctcacgagtgccgcgacagctacactgatgcccgcccaaaccagtgagaaaagcaagtgcttataaccactcccaactgcagccaaacacagatcgattctgtcaaccttcaatggccttagtattcctacaccaacaacaggaatcaaacttaccttgtttcacagacattgttgcaaaccagaaactgatcagaatcaccgtcaaagccactggaaagttctgagaaatgagagtattttgatatgagacctttatatcctaaggaactggtcttatatacttgtgatatattagctgatgattgcttacagctacagcctcaagacctcgctttcgaggcacaggagccatgtctcggctcacagcaactatatagtgtccttgcacaagatcaattgcatcctttgtacggaaccaagaagaagattataaacagccagtagaggagattgagatacaaagtattcgtaaactggtatagttggagtcaccaacctgcttagttccatcagcaaaattgttcaggtagtagcgtgcgagggcattccagccatcttgaaggactccttggatagtcctttgaccatacctaaaattaaaaaaaaagttgcaggaaggcatgtggaaacactcttctcttgggaatatatgtacataccaagaaggtacctgacaaaatctcctttaagtgcaggagtgccggagtactgaatgctaatgtcatcaccgtgattagcccacactgaaggaaaaacataagcagcaccagatataatcgagtttaaaattgcatatctaagatattcatggagaataaactaccgacatatcttatagcattcgtcaaagttttgatgcgagcgtatggtctcttcggcaccaaaaacaccaatccttttgagttgaagttccaacagctttcggcctatcatactctgcattttggcaggaggatgagcaaagagaaaagacaaaagagacaagggggtgtctaagaattgtatactaagactagcctgggtgacattagtacggtctaagcaatctatgcagttggttcgcacaataccaagctgctccttcattttctcacccttttcattcaacaaaaagtacctgcgtaattcaacgtatagtagtaagctcttttgtaattcaagattatatgcaaggagatgcatgtacgaggaaagtagtacccgtttttctcgaggaaatcctccatctgctcatacagaattgctaagcgctcaaagtgaatatggccacagatgtgatggaaatcaaagtgcaggtatctagaggatgagttagtgagtgagtgagtcagctgataataatatccttcaagtagtaaggaagtatgttaggagaaggcatagccataccttacatcatcaccagtgatgtgctgcatagcacctgcaaacctctcacttaggcgcccttcacctccatgctgatcacagaagaagtaatttactttttggactatatgatttaatacaaaattgagggtcaagaacaaaattattcagaagttatatatatgcaccttattgacaagatcaaccgccaaaactgatccatattttttccttaagtcgagaaagtgacgctcagctatcctcgcctgcaatggagattacttgaaatactatattaaggggggaagtgcttagttacaacatcatacttacagcttcttcaggttggacaatctcaaacttgggcttgtaggtcagatctacaatttgctcccacataaaaggcatggatcctctaatctgcaatatgtcaaacaacaacacaaccataagtaaaatcaccttaccctaaagaatagatgacgaaaaaccaaactatgtgaatgaaaaacttgtagggcctgaaaacatgtaacaatatcacctgaacaaaggatgatgtgtatccgttcatgcgtacaatttgctcagtctccacaaaattagcaacataaccatcagggtcagctcctcgtcgccacatgcgtgtaccttgcagttgtagtccagaaacataatcacaattaggcatatcatctgatatcaaaactaaagctgaagatttttgcccacatttgtagactgtcaaacctaaggacaaaggcataccatttcttctagagcacctcctagcaatcagagtaatgtcaacgatatctcttccaatggctgtttgaaaactatgaaaacgtgatgcagggttaaggaaaattgtctgaagtgatgatccaggaaaaagatttgaatagtgaactgatagaaaaaggatattcccttgaattacaggaagcaagaactgatcaagctacaaaattaaaacaaccacagggtgatatatatttgcaagtacagaaaacagaggagtgaacttgaacaagagttcactaaccttattatcgataagaacttctaacatataattgttccatagaaatctaggctcagcctgccaataaagatgtaaattaaaggttagtttgcacacaaacaagcaacaaaaagggcgtatggatggatacctgtctccacaaaggaagcaacttagactcatcacccaaatcatgcaagcgctgtgcactgaaacaacaacatacatgattagcaaaatctcaacttttttttttaatctctttttacaatctagcatttccagagttggcacaaattaagaagaagagaaattatttacgtgagagtcaagttaatttcatatgagaagtagagaccagttgtcctctcagcgacacttagcagcctagagtagtcatcagtctccatctttttctgcgaaaagcggttcagtgttttgatcgttgaggtccattaattattgtttcttgcttgtcagagagatagatacaagagggaaatgtaacatggagtcacctgttcttcatgcgggttttcaagtgaatgatcacatggaagaaacttgagcgaattaattttgtatataggatgtcccaaaaacgagccaacagattcgctctctgtcacaactactaagtaggatcctgaaatcaaataagaaaatttgctcttggttcaaatgaagatgaaaacattcacaaatagattaattattcgataggatctctgaaatttcacctgccaggagcttcagcatcccaaccacaccgaaaatggagcggattttagggacacgcaaagagttgcattctgctacttgatctgagacaggcaagaggatgcattacacatacatgcataagagaacaaaaagattccaatataacgaggcaaaaacaggaaacacaccaatgagcttcatggagccgtcaagacgactaatatccaaacatgaagcggaggaaccatcggttggctcgatgacgtactgatcagggaattcccacaaacgcaagccagagtgtatcttgagcctactcaccatggcttccagcaagaggaagaagaaccaatcaccttcttcgttacgagatttgaaactagtaggcgaaatgaattccgctcaattaaaatggccttcaaggcagtgagagtgagacccgttcaaattgattccgtacataacggttgaccaataacaacaagtcgacgaccgttattattatactatctttgtagttaattttgcgttgacttttttagtttcattaattccgataatcagcggttttctgcatgattacaatagactccattaaaaatggcccaacaactcaattcagtggcttatcctttctttacatctggacaaaaagtgttttcttgacttttagtgttcattacacaaaaacgaaggacttaaacacaatgtcgtatgtatgtgtatgtatcttggcccaaaagaatgtgtccagtgcccacccgactatgaaaacgagaatcttgagaagactgatagacctgaaccctcacttgccggacttggagtcgcctctgttgttgttgccgctgttgttgagctatggtaggcttgctgacacttctggatctcctctggactgaactgcagcaacatccccactacaggtagtaaagcctccacttcacctgcaattatcacaagttaatttacccctaaaacatctacttcgtgaatccacctttaatctccaggttttttaacctgtttctagcagttttaatatcacattctttaggtatgtcatatccacgccttctctcttctgttttctttccatctccctcaactccgtctttagcactgcttcctgtaatttagcataccaccggaagtttgaaataagatcctaagaaactggcaaagcaaccaaactctcgtgtaatcacatacctgttgactgtgaagacggttttctcgttcaagctcctcgatttcctcctgattcagaataaacagttactaattgcaacatgtgcagaaacagatcaatgcaaccaattctactacacctgaagagctaaaatatggcgctgtgtctgtgctaactcttcttctctctgagcttgttgccttgccaatatctgaaatttgattattatgtgtcatgattagctctcactgatttgtcccgtaggccatagcattacatttgaaggaaattaagttctaggattaaagatcgctccttgctcacacaagcagacagctaacattacaaaatcctaccagaatctggtgctctgctgcagaagtgctcaagttagatacatcctgctgttgtgactctgaaaccccgtttaaagaaaataataggttattgatgacagggaacccactgattcattcatatagggagcccttattaaaaaaatatggtatcaggaaaacatcttgtacctgtgttgttgttcccatagtggtgaacctgggatggagatttgttccacttaatgccacatgaagagtgaaaagtttcagtgcaaattaaatgaaaagttactagcgtaaaaccaaagataaaaaggagaagtaaggtaataagcaaaaaaaaaaaaaaaaagaaccatccacatactactggttttgactccatagattttcgaagatttgtcatctcatccacaagtctcgatatctctcgatccttctcctcaatgagtctatctgcaagctcacgtactgattcatgctcctcctgcaggtatgtcagttagacaaaaaaacttttttatgagtataacaaaaagtgatttaccttcattcgtttattccgcagtttggcattttctagttctttttctataccttctgcaggtgaggcttcattttgagcggtcaaagcttcacatcttcctatagattactgtagccttttaggaagggaatttcaatttccaagaactaatgaaaaaaccgaatttagatttgaatcaattacgtcgccatgtttcttctaaaacccgaaggtcttcttcccaagcttgtttctccgcctgattgcgagcaacagtggagtcaagcttcacttcaagacttttgatctgctcgctggcatctttaagtgctccagctctgaaatatatatgaaacaaaaatagctcagacgaccaatatatgtctgaagaactccataaccagtcccctgagaacaccatttctcagttgttttctctggcaaattgaggagaatgagcagccaacctccggaatcaaacatgaaaaagattcagtgtcaatatatacctctcttcaagttctttctcaaggctagccaaagcactctgaagatcttgctgtgccctatccctctctgcagataccaaatatacttctttttcagcttcctaacaccacccaaaaagataattagttggtaagcaccttggcaaccatctaaaaatatctccatcttaagattctagataacttacctttagagcttcctcaagagatttaatttgttcagagtctttagctgcagccagctccatgtccttcttttgcaaaagcgcgtgagcacggatcttgtaagaagagaattcactttggagccggttgatctgtgaacagttacaaggaattcaatatggttaaatgaagactagctaaagcagaacattccttaaagctcaaaatggctctttgattccataataattcacgttatgtgattaagaatggatgactaataaattcgttcacctaaccaaggctacaatagtttccaaaagaaccaaaagaaaactatgtacctcttctcttgcacctttgagttccgcatcttttgtgcttagtatctgggtctgcatggacatttcagatcccagctgacctgacaatttatatgaatgaaatgtctatagtccatagacaaaagtaaaacataactagattagttcaacgtttatgaactccgtcaattacttctcattttagccacttcgatttcggcctgtaagtagttgctttcagcgatttccagtttagatttaagggcatcgcatgaagcttcccaagtctccttttccttttcctaaaggaacaaaaaaaaatcatggcttctatgaattacaacaaaagaaaatagaggaatttatatggccaaacaaatagaaactctaaacatgctgtctgatgacagactgacgccttagatcatgtttacaattatctatacgcactcctatattcattccctggttaaaaccatgctagtaaatctgctaaatgatggaaatcatttgacgagtagtatgcaaaacaatgtcttagaatatacgaatgggcaacaataacgaaggacaaatgacagttggcatcagagagtcctgcgaatccatctttaaacattccacttacattctctgatttaaggtgtgcaagctctcctttaagagtttctgcagcagcccttagccttgctgcttcgccagttgcagctgcctccatctctgcaattttagattccttctctgcaagcagtacctaaaagaggtgtatacttggtgtgaagaatttatcacttatttcaaactattctctctcgctcatttgaaaaccaaagcacatcatccagtaatagaactaaagaatttagtcaaaagactaacctgcagcgacgaaatggtttcggctgctttgtccctctcagatagagcatctacgacctgtgcttccaaaccctctaagttctgtcaagaaggtggagagaagagaaaaccttggatgtcattagcggaaaatggtggctcatagcatataagaagtaacacaatcgctgatgctgactaccttttgatgcttggctgacaactcagtaactgcaatttgctttctctcttccacagcttgtaattgctttttcaggtcctccagaatctaggattaaagcaagtacgcatatgaagcagagtatacagagccatccctccccccccccccccaccccccctctctctctctctctctgtctcttttgtctctctatttttctatatattgcagactagtattacagaaaatgaaagagatcaaacctggtccttatcaagaagtgactgttgcaatgtctcaatcttattttctttaggctgcaatgagccacgtagttcctcgatagtatccctgagcctgtgtaaagagaaaactccagtactcaaattcttagaggtagctggagaagtgggaaaggcgacattcattttatacaatttctgtaaaaattatcttcgaattatttacttgttattggcactccttagttgttgcctctccgcatccattgctttaagtgcttcattcgcctgttgcctagtgcgttccagctcttgttgcatggatgagtgttgagaagatgctcgttcagctgtttcattcacttcccggaaacgggcgtcgagatcatctttttcctgaagatagcaatataatataccactgagattaagacagcacatagcagcgaaatctatatgtctgaaaatgcagcatagaaattccgaaatagtataagatggtttttgaaactcacagtagcctcaaagtggctaaaacagaaagcattataaaatgtagagaaagacattcaccttttggatttcttgaatgcgttgtttagcccttttgtgaagcctggtgaatttggcgtccaggtcggcatatttctcgtcgcgctctttgatttcctggtccagtttctgttcaactacaccaacaatgtaatagcacaagttgagaaaaggcaaacactggttccggtcaatgaatgagcaaatagaaaagatggcttctgaccttgggaaaacttagaggagtattcttgggatttagcatcagcctcagagtatgcttcccttagatgctcaagagcttgctcagctgcaactcgagtttgtttttccacatcaatttctctgctcaatgatgcgacctgttcttgaagttgtttcagctgagcagagtccgcttccacttgctcagctttctggagagacctaccttgcgctacctcatccttgagtccctcaaattgggatctgagaaagtcattttctaatctcagttcagcaatcatttggagtagctgatcaccattttctgtcagagtctcgttggaggcatcatttaactctttatcttctttgatcacatggctctcctcttcttctccaaccacatcagattccttgtcttcggacatcttggcagagcagatgtcagaaagatgaacccagacactcaagagagcgacgacaactagtaagcgcaaaatcgggatttgaatcaacaatcaaaagagaaaggagtcaagtcgtgaaattcgaataaaccagcaaaagcaacgcaaggagaagagagatttgaatgtaatcagtgccagagaagaagcttaccttgaggtgagggattagagaagagtgtggaggcagagagagagaggtcacaaacaaggaatcacgatttcgaaatattggatcggatctcaacccaaaggttaaaaacgtcgtcgtctctttcccgtcgatcagtgagacggtaaaacgttgatctgatcgactgacgaagaatggtaagaattgtgtaaagggtgttttactaatgaataattgcattcagaagccttaaaccttttgaaaattcatcaagtaaacccaagacgaggttagctaaaatgatgccgttttggaatggtaatatgaaaatatgaaggacagtccgaaaacagcttagcccataaagcagcaacttaggcccattatgtatttgtaatatatggcccaattataatcactttcccaactaatttatataaaatgaaattattgaagtctttgtccagtcaaatataataataagccattgaaaaaaatggcggaggagagcagagtcccatcatcggtgtcggtaacagtcgcccacgaccttcttctagccggccaccgctatctagacgtcaggtaccgccccacctttctcttttgactatttcaatcatcaacatagcatcattaggatcttgatgtaatggggatgatgaatataggactccagaagagttcagccagggacatgcctgtggggcgatcaacgtgccttacatgaatcgaggagcatcaggtatgtttttatttggttagttgataactgagtgatggatataattttgtgattgtgaaacagggatgtcaaagaaccccgacttcctggaacaagtctcctcccatttcggacaatccgataacatcattgttggctgccagagcggtggtagatctatcaaagccaccaccgatcttctccatgcagtaagctccaccacaaagctcttctttctgacttttactttgttggtgatatataatttgcgaatttgcagggtttcacgggagtcaaagatatcgtcggtggctatagtgcctgggccaagaatggccttcctacaaaggcttgatgactcaccattcaccaaacatctttccttatctcttcgtctccttcttcttcaataatgcatcctttccgcatgtaatcatcaataaatgaccctcctttctctttgctgtctgatgtgatagcttggagggaggggctcatcgcatctttttaaaatatataaaaatacgagtgtgtgttgattgcatcgaaatctctatatatatagtttaaaaaaaaaatcaattagaaaggagaaaggagcatccgatcaacgattatatctacaagattgttaccttaaaggtccatctgttcttggcaacagacaatatatgtgtatatattgagtgatcgatgagtacacaaagacaacaacaccatatcaacaactcgatcgtgtgtacaaaacaagtggtgtgacctaacgaggcaaacttcaaaatacgagagaagcgacgagagaggactgagatattgacacggctcaatcagatgagttagtaaaagagaatctgagtgaaccaggccaatatcagagggactctctcggaaacatagtgtatctgttttgtaaaagaaacaagaacgcaagtgagagaatgtctgtaactgtaaggagattaagaagaagaagggagtgaatgtgcaactgcaattctgcgaagcatttaataactctgctactctcaatgcaccaaagctgggccacctcttttatttttctaactttaacccgaaaaccaagtgaataagggagtgttgtgtaaccatcgtttcaggggaaatcattcacgtttcttttaacttactgcttagtcttccacaagtagacatttatgaaggcacaacaatccacatctcttctttcccactgtatgtaaccgtccctctttcgttttgtctgcttctgccctcagtttctttctcctaaataatcttcttatcgccaattcaataaaaatactatacacacttaaagaaatgcatttcatttagtcttcttccatttacatttacacattccctcaggttattcatacatctttcatttactttgaatacatcctgcgatcccatcaatctaagagcttcctctcaggtacatgcggtaccatcaatctatgagcttcttatatttctctctccatacccttgaaatccaccacattatatctacatccatttcctttcttagctcctattctttcactactcatagctctcaggagtttctacacccttattatatacaacagagctgcaaccaaaacaagttaattatcaatgtcacttcattaatgcatctcaattatcaccaacaattgtcttctcacctcgagttctgaaggttcttcagtctgtccctccacatcgctgcaaaatgtgatacaagaaaaaaatgaggagtctgcaaagcacactggatatagatgccatccagaacagtttgtatacctgcatcgatgtacctttcctctttagacgccaaatccatattcctcactaatttaagctcttccgataaaggatctggtccatcgggagcgctgaacaagaacacccaccatgtggttagcaactgtgacagagtgagacagtgtaactaacccaggagattcattaacaaactaaaaacctgtcaaggataacattgaaaacaggctttgcgctctgcggtctgcctccataaccaattttgatagcctcttccagcactattgctttgttcacatatattggagcctgagatatgacaaacaaaaacatgttatcgcagtattcaaaaggaacaggttaggattcctcagtttgagaaacagagaaccataaagatagtgagtttaaccacatttcgaaagcaataaattgaggaaagcgtgtaacccccaggtagcatacctggcatgctcttgcaacattgatggcatctgatggccgtgaatcaatgcatatagcctcaatgtccccaggctgcatgacacatggttaaccttagacataatgacttttgacaaaaagtttcctagctaagagcatgtttgcagtctttaagttaccttgccaagacatagacttgcataataagtgtttacaattctacctgtaagtttcaccattttaacctgtcaataatacagtacagcttattaactaagtggcaaccagctataaatgttctaattcgaggtagaagaggcaacatgtgtgttggaaacggatagtttacttcatatccaagtttgtcgacaacagcagacacgaactggaactgatcagggcattcctacaagatagaaagaaaagaaggttaaggggtggaatagaaacagcaatcgtcaaaaaagtgtaaaacatgaagaggggatacctcagtgtggccttgtagtggtacgtctaaaagtttctcaacagcagcatcccctgcaagtgtaagcgatgaaagttagcaacgctaagatacataagaaagagcaacgtgtagaaagaattgaggtgcattaccaacaataacaggaagcaagtagtcaccatcacaggagatcttgagaaaaatagtgggctgcttgaattgacggagaaagccaagtccaatagggagaacaccaaccctggattcactagctctaatagaaaagggaggcaaaggcctagaagtttgccacattgaatcttgccggaaaccatgtcgccgcattttgtaatgcatacttgtctctgttattgttgttaagaaaaaaggagcacaagttgagcaatgaaataaaattgaatgggctaatgctacaatcccttttaatcagcacaaattgaattaagttgaggtgattaaaagggatctatctaggtttgtggcaacaataataaaatggaatcacaaacaaactccataaaggtaaccctaaaaaaggagggaaatcgcaatcagagttgggcaaaagcaacagacgtcacagggtacgagtaaacgtcaccggaaatttgaataaataagagaatagtcacatttatttggaaatgggaaaaggtggacctgcaacgaggacagaggcttggagaaactcgagatcgggatcgccgaggccagatccggaaatagagcttccgtcgcaacaaatatgagaaatcttaggacggcgatgagaacgcagcgatttgaggttcaatggggtgcaacagcgaaaggaggagggtgaactggaggaagatgagagggaggcggagatggagcgtgagaaggtggtggattcggagatgaagattcccagatcggaggcaggaacacaggagaaggcaactccgggcatggtggtggtcgttgagagagagaaaaaaggaaagaagaaaaagtgaagcagagcacaaaagtagaagaagaatgatggagagcgagagaggagacgtcaatggctcttttctttctttaccgggagattttttatccctaataaataatgttattattatgttaatgatgtggaggataaggttatgctttttaaatcaaaactcgttttgctctaaattctataactaaactaaacacgtgggtctatttgattagtattattatttctttaaatgatgacgtggacagttaaatggatttggcaaatcccctgcagataaccaacattattcattggaatgcatagtgatggaatataaaggatgtgcctaattattttgacactaattagtagcaacaataataatgcgtcggtacatcacaccagtaaataagcagatgtggatttggtggtttatgatcagtgagatgccttcgaatcatgttacatttcatcttccaagtacaacctaagaaagtttttatttttggctttgcttatatgttaagtttactgaacacaaggcgtcgactttcctttgttcaaaccacaaaacacaagaaacagaatagagaaacagagagagacagaacagagagagattgtgtgtgtaaaagagagacagaacacaagactttagtaacccagttcacctattaaaggctacgtctgggccgagactgtgctcggaatccactagattgtggatgtcagaatccgcaattagaatcttgtggttgttttaacggggatcttttggtcttgttagacgagcaatgatcgaattgaaaagagaagaatgtgcttctgaaatttgtgtatagtcttcgtgttttttttatattgtcacttttacaaatgtcatcaactcatatttatactcaatacatcgaatcgaacgtattaaactgtttgttgatttcacgccgcagatctcgccttatttacgtcgtacgttacgaatctctaactcgggatttaatgcgcagtttaagtcgtgatccttccgtttctttattaatgtcggatcacctgttaagcggcctggcccatgctgggctgtgaattgggcctaactcgtcttgaagcctattgaatgcggattgcgccgaagtgggccgaatccgacatccacatagatcactttggtgtttacaaacaagaacacgcaagtgaacacctaatgcccttcactagcacttaggttcactctgtaatgtatcttgaataagagaatacaatgctcttaagcttatgctaacaaagtttctctcttctctcacaccttagtataactcgcaccacccctctctctttgcctagagttcctctttatagtggagactctaaacccttatgccaaaaaaaaccctaatcgctgagctgtcactccttaggctcttctagatgaccccagacgctcctccaagtttgagctgtcacaacatgacaatcaaccttccttttgcctccaagacaaacaaatttgtttttctgagtttgcaggaggccgttagcgtcaagtggtccaaggaactaactcaaccatggtttgctttaaccatagttagttcttctcttgccatgtcatcaatgtcttgatcatcaagtctcactttacattatagatagttaacacttgtgtgataaaaagcagcaacaaaaaacttctctctcttctctccgaaaaatcttttagagagagaaggttgataaaacttcttgccgtccggaggtttttccggtttacatgtcccgagtatgcgggcttatcatctggcagctcctcactcctttagtgatgttggccagctctcgtccggtattgatggctttcaaagcagcgatggccggcttcgtatcggcttctttgccgtttgcttcttcatgtttactgtttttgtttcctgtgcggtttctcctatagtttgctctgttggatctgccgcttcatctttgtcttaaactcaagacggttcatggtttcgattatgcctttgtttggtgattatagcttcttttcctatgctgatgttaattgccttttcgtcgctggttctatggtttttagagtttcaatatggtagaccatcagttatggactcttcaatttaatcaatttatctttacccaagtttgctggaatttatagcaactagttaaaattggttaattgatgtttgtccttttttacccggtgagcaaaaacaaaatttcattgttaggataagttttccggcgatgatcaattgaccggagttgagctctttgtgcgatggaggttggtgggataacacgtgtcctcatacgtatcgttagacacgtcctttgaagcatatcttcttctttggttttttgcttgggcttctttgtaagcttttgttgtaattggactggcttgttgggcttgtaaaagtttatcaataataaaacagttgagacaaaaaaaaaaaagatagttaacacttagttggtgccgaaacaaacaaaaagcatgaaattcaaacaaaaacgcgtacacaaggaacaccgaccaaatgtgcaaaactggtggtcctgtcgtaatatctccaaaggtttgacatcttcttccgacactttagatgctattcagtattcacctcatctcaagtttaaatatcatgaactcctttttactcctctacctcaaggtacatcaaaccaatccattcacagactgttataaataatatatatatatatatatatgtattactttttatttattttcagatattttctttaagaatggatcaagttgtgataaatatccaaaatcgatggataagactaacagcaaaccaaatttaaggaagtgagacagtggacccactccgactccgaggttccaatgccctaatcatcacctttacctccatctccttttctcaggttctcataagtgagtgtacttcaagctgaaattgaaaggactattcaatatcttcatctgttgttaccaatctcttcttgtgtctgctaagtggaaactctttcaacagcttcatcacctcatacgtccttatctctcttccaaggtagaggcaaagcccaagcggagttaacccatcctggtatagtcaaatatggtatcatcagttaatgctttcaaaaccagatatgggaatatacgcgggaacttgccttgttcttcacttctatgtccgccccttttatcaaaagaagctttacaatgtcgcttcttctggcctgtactgcaacgtgcagtggagtccacccgtcctgaaaacccagtgccaaattgtcaaccacctgatcaacaatgatgttgtcttacaatgaatgcttgacatcatcctaccctgtcctgagcgtttatatcagcgttatacagtaggagaagttttattgtgggagctgatgctgtttgcacagcatagtgcatcaaggtcgcaccttcctatcataaaccaaacggatcagatccagtatctgaagcgcaagggagatcataacaagatataaatatcattagttgaccacttacgtcatcaagaacaaatggatttgccgattccctcagcaggtagttagtaatagcctgcttcttaccaatgattgctcggtgaagtactgtcaagccgccctagaaacgacaagaatggaaacaacactagaaagagacgccaacaaacataaacactgtgcacaaaagcaacagcttcaaaaaagtcagacataccacatcggttgcattgatatcaagattgtgctttagcaaggaatcaaccagataaaactctccacatgctgccagtgtgtgaagaggaagccattttttctgattcaccagaggtacacacacataaatacattttcatcagagactgaaaacattcactttgacgaagagcatcgtaaggggacttactgatgtggcaacggctaggtcaggattccggctattgagcataaacttctcttcttttgaaagcagctttcgagggcctaacgagggatcagccaaatataagctctttttgcaattcaagcaagagaaggaaacaagagtggtaaacgtataccgtcggatttcttgtcgctgggatcgtacttgtcgctattgaagaacttggcaacgtggtcgaatccctttccgtaaactgcccatctagggttcttaggagccactcgctcgctgggagatgatacagcggtctctccatcgcttgacgctccactgtcgtcggagaaatttcccggtttatcgagaatgacaggcctcaattgagccaacttggcttccttgtacgtgagaaagtcattcaagtcaactttcctcagcggaattagcccttgcctcttcttctccacccgaaccccgaactccatctcctgcgctattttgcgcttgtccttcttcgtcagattcacctccgcctgaatatccctccattcctctggcacgaggttctcgggctcaatctcggattcatctaatctcttagccccgccacgccgattcttcttgcgctcctgcttcgcaacctgagtgacctccttatcaaggtaagggtcttcgaagacgccgtcctcgtagacgagacagtcaccgacaatgaaatcatcgccggcatcggggaggatcgacgtttgagaagaataggaaagagaccgtaatcgagtggggaaagcaagggagtgaagagagggagaaagacgagacggagaggttctggggagaagaagagagatggtgtgtggggtggagagtgactgcattatcggaataatcttgaataacggagctttctcctctcctcctcgccggcctctgatgtagtatccgacaatttcaatgggcctcactttctaatgggccttacttaaacatatgggcctgacttcccgttcgtcctttgattagtcaatctaccagacaccacgagtaagaaaataaactccattgttgctgctgctctgcttctttcgaatctcgctcggccggatctcatccttgttgcaaaaatgatggcgagaccgaggaatcatcgtccttcagctcggaaatcctcgcattcaacgctcgtcttcgccgtattgatcatgtccactttcgtgattttgattcttctcgcctttggaattctctcggtgcccagcaacaatgccggatcctcaaaagccaatgatctcacttctattgtccgaaaaacacttcagaggtaagataccatcccatgccaatattgaatttcaatttagtgtgcttcaagatcgggttaacttttccttctcttttttcccgtagaagtggcgaagatgattcaaagaacgagcgttgggttgaaataatctcttgggaacccagagcttctgtttaccacaatttcttggtgagcctatgacctatccatatacagatttgactttttttcctcccttggtaaatctgttttggctcccatattcatcttctctatctgtattttcaatgtattcttgcacgtttccttgagagatataatcattgtaaggaatgtcttagaaagcaaatgatagggaagtgattagtgatgatttgatttgctcttggttcgcttgctttccccggttagccgctactgacggaatggttttgttacccggtttctggatagacaaaggaggaatgcaagtatctaatagagctagctaaaccgcatatggagaaatcaactgttgtcgacgagaagactggaaagagcacagatagcaggttttatacttttcactcaatgcaacctcttgtagtagtattaagtgaatcctcagaagcttattctcctttactgaccaaccccacatcctagggtgcgaacgagttcagggacatttctcgcaagagggcgtgacaaaactatccgtgaaattgagaaaaggatatcagattttacattcataccagttggtatgatctagttttctgttttgtttaataatttgacaatttcttgatcccgtttctccctagatttcttaggcagccctatcattatcctgactggttctgttgatgctacaacatgcagagcatggggaaggtcttcaagttctgcactatgagattgggcaaaagtatgagcctcattacgactacttcatggatgagtataacactaggaatgggggacagcggatagccacagttctcatgtacctgtacgtaactgaccaagcaactttgggcttccataagctgtttctatgttcttcctataacggttcttagggactttgcagatcagatgttgaggaggggggtgaaacagtgtttcctgcagccaagggaaactatagcgcagtgccatggtggaatgagttgtcagagtgtgggaaaggagggttgtctgtgaaaccaaagatgggagatgcattgcttttctggagcatgacgcctgatgcgacgctagacccatctagtcttcatggtgagtagatgagtttgcagacatataaaatgatgaatgagaggaaagcatagtgcttgtgtatagttggtttcgagactaaattcgtggaatcccatcactaatttggtccaattgggcaggtgggtgtgctgttataaaagggaataagtggtcgtccacaaagtggttgcgtgtacacgagtacaaggtttgagggatgattgaggtaagtttaagtttccagcttcttcaagtaagtgatgtgtgtgcgtgagagacacataaaatgagtcacactacctgccttaaaaaataatatatattagttgttgtaaatggatggaaaagtagaatgtagaatgtaaaatgtaaaaagaagaagactctgatctgatcttcgtacagggaaaggtgaggaggtgagcctgagactgagagagagtgggtcaccaagttttgaggacagcggtgggaaatgaggagcaatagagaagcaagcttgtagaggtaagttaggggatgatacattgtaggctttgtgattcgtttgatatatacatacatatactgtatgtttaatggattaagaaaagcgcattggattgatgagaagttgggtggtgtttctgtttcacatatagtataatgttaacacaaaacttgtttgtataataaagagaagtaaaggtttttttttttgtttttgattaaattggaagccaaaaaagtcagaagaagggcgcaaaagtcttacccactcatcgttttctttaaataatcaaatccactcgtcgtcgtaagatattttcctttcgaatattaagaaagatgagacgcgtgattattaattaataaagaaactttcggtcagcggagagaaggttcctttgcctttggtctctttttctaatcgattgattatatcttcaaataaaaaggagaaaagaaaggttccttgtttttccagacaaagaaaacacaaattcattccctcctcctcttcatctcttttgcagatatggatggttattattctctgtctcccatctctgtcctccaccggattaaagattccttccatttcgccgtctctgcccttctcgccaacctcttctccgctctcttcaccttcttcttcgctttaggttccttcttttcttcacattcatcttcattaatcaatctctgtgatccctgaggaattttccttgtttctgcaattacgatatgaatatgatttgacttctttgttgatttgattcagtggggactttgctgggagcattgacaggggctttgatcggccaagaaacagagagcggtttcatcagaggagccgccgttggtgctatctcaggcgccgtcttctccatcgaagtctttgaatcttccctcctcctttggcaatccgatgagtctggaattggatgccttctctacttggtaacaatcttcatcatcatcaccaccagattttcttttattttcttatgctcaaatgcttttcctatcttatctttatatatatagattgatgtcattgctagccttttgagcgggaggcttgttcgtgagcgtatcggtcctgcaatgctaagtgccgtccagagtcaggtacaactaccatttcttttctttgatgcatcattcattatccttctcaacttttgtattaataataaacagatgggagctgtggagtcccagttccaagatcatacagacatctttgacactgccatttcaaagggtctcactggggactctctcaacaggatccctaaggtccgaatcacagacacctctccggagattgtctcttgctctgtctgccttcaggtttgtctcacttcccccctctgcttttgaacatcatcttccgcggaacgtagattagaagaaaccattatatattgttgcaaaaggttgagagaggttctagatgtttctattaggtgacaagtggttgaaagacaaaattaattaaaattgaggtgacgaaacaggactttcaggtgggagagacagttagaagtttgccgcactgccatcatatgttccacctaccatgcatcgacaaatggcttcgcaggcatgcttcttgtcccttgtgcagaagacatctttgaattgattttgaactcttctttcttctcttctttgtacatgaggtataggcatacacacacacacatatatacacactagtagtcttccttgattttttttagattacacgttacacagattttgatgcaccaatcattgtaacttcactcatctcttggagatcctgtttatttatgctacttattcttggcttcatcattcaaaaaggacatgctgcacttcccaattttagaaagtttgggatcggttttgcatagactaaatcccaaatgaaaaagcatatatacatacatatccttgtcgtcgaaaacaatgctctactcttaagaactaagaagagagataatacattttacatgaactagtccgagtacaaaaatatttggcatgagatccaacatgtcaatagcttcagttttaaattatacatttcttataccaggaagagtgaacccaaaaagacaaaaaaacataaagaaagaaaaaaaaaacacatatctttggttggataaatataactagaagatggatggagcctggttttaaagtttcttaggtaaagtgataccaccaccacggatagaaacagaaggggttttaagagaggaggctctgctgagcagattggtgtccaggaagaggacgaccacagtgatgtcgtcatggaaatgcctcctgactcctctctcaatcttgttgagatcagaatatctcatctctcttttctttgctgcctcctgcagcgcagctttcaccagtctcctcgctatcccctgcatcagcattctcacatttactctttagaaaaaatcatctatatatgtttagaaactgagagtgtctcatacgtttcttgggtggttctgaacgatttcaacagcctcttggttgctaagctgctcccaaagtccgtctgatgcaaatatcagaaactgatcgtctggttggagatcatgcacggttatcgacggttcccaactcaagataggtcttttcattggctcccgcaatcggtactttgtgtacaaaggttccttgttgaactccgatttcttaagatacacgtctcctatggatcgtgatacctgcaaacacacagacaactaagctttcaagatttgacaagtggccaacaataatagcttatccaactcagtgaaggaacatgacataataatattggctcagattttatagcataagaagatctctttgtagagagcggcacctgaataatgcccttaacacgccagacattgtgttttaagacgacaatatgggagtcatcagggtgtaaggagtgcatttcctgcctcacagactctatgctcacgttatgctcagctgagagctgaagcgcattaacctcacctgtggccttgatgacctttcccaaaaccgcacgggagtccccaacgttagctacgtaaagcttcccatcgcagaccacaccgatcaggcaacaagagccaaccgctgctatatgtggcttcactgcccactgcttggccaccacccctagaaacccttcttcggttgcctcataggcctttcttatcacatccacagacatggaatcctgctccgctgcgaatcctgcagacatgaatgttcagttccaatggttccctagctaaataaaattcagtggtgagtagtaacaacaagtagttactcttgagatggtgaaagagatgatcgttgacaaaacgggaggtctcagggcctccgtggccgtcatagacgccaacaaaggttccatagggaccagaagaagagagggtggtcaaaggaccggattcgacctggctctgatcctcgaggaggttgttggcctggacaacggccatggagaaatcaccaaaaaggtggtgagcagagtctttgtaccagagaaggccgtcttgtttgcctttggaatcagaataagtgtgggaagtggtggaagaagagggccagagacaagaggtcaaaaagttgaagaaaagggataacatcgggcctcatctcatatcatccccaaccaccgattgttatgctaaaatgaatgaatgaagtatgttgaaaaaacaaaagaagagagagtcggaaacttccattcattcactcacacaaagaggagttttgtttagtaaaaaaagcaacagctggatggagatctcaaggagatatagagaaactattaagttgtaagtaacatgtgtggagagagatagagtgaaagaaaaaaagaaaagactctctctgtttttgatttcagatatttattaggaacagaacagaggaagcccttttccttgtatatgagaacagaggaaaagaagagagacaatttatggatcacaagatttccagagcctctctctctctctctcaaataactcttcttctatatttgaccatcaaagaaaggacaagaagacacacatacgtgtgcacgtgcactccttaactcctcccatgtgggatttacaaacatacaatagctgttctcattattattatttccttcttgccttgcaccaccattgttaactctattcaattcaaagtttcaaaccctttgaccaatgcatccccttattgggctttgattatatgggccctttctatttgatatttttcaatatatggcccgttaataaatttaatatatagcttcggccttataagaagaattcaagcccctcaccgatactctagtccaagccgtgggcagaaccaaaataagagaacaaaaaaaaagtttgttttctggaatcgtcgcgatagttgctgaactccgtcgcaacttcaatggcatctgctcactccatagccgccgtttctgttctcgatgcggcctccaagcaagcaacacttccttcttcttcttcttcttcctctgcgctctaccctctttcttctcttcgatctaaacctcgccagcagcttctctccctacgcagtgtcgctctcaaaggtatcttctcttctttttctctgtttatttggaatacgagttgcttctcctaaacgtaatagtccaattctacctttgttgggtacagtcgcatttccagtttgaattttaatatagtttgggacaacgaagaggggagtgattcaaattagcacaatcgtaatgagtagttgttgatatggttagtttgttgatgagccaacaatgattagtttgtggttagcttaggtcgagtaaaggcgcaggcaaaagaagcagaagctagtccaagtccagtgggagtgggagacgcattcagtaatgtgaagcatcttctcctgccggtgattgatcggaatccttatctttctgaaggcaccagacaggttattgtttagcttgttatctttttgagaacatgttgacaccaaacaaaaaagctgattacacttaatttgataggctgctgctacaacaaccagcttggcaaagaagtatggagctgatatcacagttgtaggtaagaacaattagtgttgcattaatatccccttatgtatcatatgaattatatagccgtgttgatcatctgtgaccaccgttgttgattcagtcattgacgaagaaaagagagaatcatcttcggagcatgagactcaagtatccaacatccggtggcatttgtctgaaggtaaaattgaggaattacttgtaggaaattgtaggtaaactatagtgttggaatcccttattgaagaaaggttaactataatgtggtggttgcaggtgggttcgaggagttcaagctgttggagaggcttggggaagggaaaaaagcgacggccataataggagaggtggcagatgagctgaagatggagctggtggtgatgagcatggaagccatccactctaagtacattgacgccaatctactcgctgagttcatcccctgccccgtcctcctcttgcccttgtgatcgctcccgccaaatgcttatatgatagacataccacttgttttatttttctctgtgtttggttgccgtagaagagcattactaggagaggggatggaaatgtgtcaaggtgtgagatgcatgtgtcaagcatttcctgtcttatcatggttgttgttgttgtgtcctttgttttctccgttactcacatactaacgtgttcggccacaaattaaaaaaaaaaaaaaaaaaaaaaaaaaaaaaaaaaaaaaaactcaattagaagagaaaatctttttaatcttatcccctaatgaattacttggtacatgtagaatagaatcaaattactacaggaggcttaataaacacaacttataaatttgataggcacgtcaaaagttaaaacagggatttgttaacctcagtaattagctacgagggttagttaattaaccaatcaggtgaaatcacacggattggtagcgagaggggtatttaagtaactgtacaaggagcgttggtgtttgtttgtttgcaaagggcaggaggcacacaagtcttccaaacggaggagccaccggcgttgttagctttctctttggctgattccttcttcttcttctctaattcttttccttggtttcagagtataataatccccagcttctttgatcctctctctctctctcttcctctgttacatgatggctacgacggcgagtagtgccgctaattctgcatctcgcttctccattgattcctctatctcgcgatcacgtcacggcgattcctctccctggttgttaccttctgattcccatgatcatccgactctttccctctcccaggacgatcccttctcagcgccttcggtctccccgcccaccggaaataactcttccgactacgacaatgctgataagaagcctcctcctgtctggaacatgccttcttctaatagctcctccgatgtcggccctgtcatgggcgccgccgaatcctggcctgctctctctctttctgctcgctcttcttccatcaagtctccctctttggatgcttccaaaccttttcctgatggatcatcgtcatcaataccgcctccccaggtcgtttctttttgctctccaattatgtcattacagaatattagggattcaccagtatctacctattataggcttgtggtttcaagtttcatttctcaagctccttcttttgcatgtttcgaatccaaagaggataatttagtctagtcgtcaatatgcttgtttgattgcctatagtagatacatatatccgcttttgctcattatccatccatatatattgcaggctacttccaacaccagcaccaatgccaatgcaggctcgagtgtttctgctacctcatctgaaaacagtgctgttaataatagccagaggaaaccttttagacggaataacaacacatcatcttccagtaccagtagtaacgtctccaatgctgcgcctttaaacaccagagatcagaatcacagccaaaggggtggtggctcttttggttcagggaatttccgtaattctcagaggaatcgcaacagcagctcttaccctcgtggggaaggtcttcaccatggaaacaggcgcaattatgagcatggcaaccaaagcggcttttctcaccgtaactatagtgggagagacatgcacttgcaaccgcagaggggtgttgggatgattagaccgcagatgctgatggggccaccatcttttcctgccagtagtgcgcaatatatggcagcgcctcaattaggttcatatggtggccccattatctacccaggtatggttttgctcatcttatgctctctcatacattcccatttctaattcattcattctgctatgttacatcttcagattatgcacagcatgtctttatgccacatccatctccagatccgatgggtttagttggacccttcccacttcaacccatgtattttcgcaattttgatgccatcttgtacaataagatattgacacaagtagaatattatttcaggtaatcgtttcagttttatttggttgtgtttgcacttttctacttgtttatgggttaccccaatgctccattagatgcatctatcagaagtgtgaattacaaattttatcctttgttaatttttaaacgcagcgctgataacctgagcagagatgaacatttacgggatcagatgaatgatgaaggttgggttcctgttagagtaatagcagcattcaggagagtaagtggttttccatcttctattctgaagctgacatgcgttaatcactttacaatgtctactgcagaaagtatttcttattgtatcaaggtgttacttatattagttgtgtttgtttgtttacgtgaccttggaagtagtagtcttagtttagtaagtgtattggtggtaaaaaaaagagtaattctttgaaatttttgcaacttttgcagcttgcggaactgaccaataacatccagactatattggaagcactgagaagttcagaagtcgtggaaattcaggtatgtaagatgagcatccttgtctctcattcattgatggatataagataagaagtaaagtggaaaggtgtaaagataaaaaaaggcatagaaagactaaaggtagaatgtggatgggattgtagggtgaaacattaaggaggcgaggagattgggacaagtatttattgcctcgtgagccttcaaggtccggtccagctgcgggggctagcaacaatgcctcactggtgtctcaaattgagagcatgactctatcagagaggagcagagagggagtgtaagagagatgctactaagagagagaaagaaagatgtgtttgcaagcctatctctcttcctttccttttttgtgttttgtcgagaattggatatgaactgattgatactcagtctcataagaaaaaaaacaataatatgctgctcaactttttttgaacttttctggtttttaaaatttttttggataggaaactttaatagttggtgtttggctgatcattgatttagtcatccttgttaagaaaatgtaatatctgaagatacccgccactcggcagagagggtttcacgtcaaaccatatccgaaatactagagagctctaaattgaaaacagctggctatctcagcagtgacataccattccttcactcgtccacgtgcaaagtgggcatgttggctttactttatgtatgctttaataagacaatttgaagttaccagagaaggaaaaaaaactgtcgtaatcggcgctaatgggcttccgagacatttgttaccggaaacatcacaaaaagcttaagcagttccaggcactcttctcccttctctgatatatctgattccttttttttgcttgtaactgttgtgtaacgagactgtgtttcgtatgatgaaaaaagaaggtggagataaaagtgaagatggactgcgaagggtgcgagagacgggtgaggaagtcggtggaaggcatgaaaggagtcagcaaagtcaccgtcgatcctaaacagagcaaactcacggtcgagggattcgtccaaccgagcaaggtggtgcatcgggtgatgcatcggacagggaagaaggcggagctgtggccttacgtaccttacgaggtggtgccacacccttacgcacctggtgcctacgacaagaaggcccctcctggttacgttcgtaatgcactcgccgaccctctagtggccccgcttgctcgtgccagctccttcgaggtcaaatacacttctgctttcagcgatgacaatcccaacgcttgtaccatcatgtgatcaattcatatatatagttaactacacatgtgactatgtaagtgtttttagataccctttttaagtaattctgaaaagacagtctgaatgtttgtacgagtcatcatctaaattccactgaaattaaaagggagaaacagaagaagagagaggtgagtagatggaggagtaacaagagaaagaagagagaaaggtgagaagccatgaatagactgattaggcaagccatgacccaaacagggtatatcagaagcagtgtgtaacagatgacgacaaggcagtagcagacgagactcgccactttctcgatagcttctcccaccggcatcttgatttgcgtatttgctactcctctggattacatgacttcatttaaataaatagtaagaaacacacacagtctttggagaaatacatgcaccagaagttgtttcctctctaaacgggacaatgcatcccgcatttcagcccttcctctgtttcttctttttcccctctgtttttgcctcttcactgtgtttacataacagaaacgtgctttgtcataaagctcaagtaacaatttcaagaggcaagtatccaaattgaaacgcatatggtgtccaataacggggtatttcttcttttaatatctcattattatcacattccacaaagctagttacaaggtcagtatatatgagtacatatgcgtatgtgaacaaaacaacaccaaaattatctcaaatatgaaatgctcaggatttggagaatgcacgaagcgtggcatccaacgcttcccgatcataatctccagtgaacacgcagtttcccagcgggcctttgagaagaatcagcctcagcagtccatctgccactttcttgtccacctgcatcaccacacacatttcaatgaatttttcttagctcaaaagttgctcaaaagttaccaacttttttccatttacatctggaattcactaaaaactcaccgccattatggacttgaacatgctgacggtcatgctctctggcggagttgtaggcaatttcgcccgtactaggatcttgttcactctcttaacaatcgattcatcgatccaaccaagacgatatgacatgtccactgccattacctgagtatatataacaatgtgaacaaatctcgaatttggagagaagaagatggttagcaatatcgcagatagagaaagataccgtgccagctgcaacagcttctccatggagccactctccataaccaaagccagtttctatggcctgcaaaattaagtgatgggtgatgagtggatctaggcccgaagagaagaaatgtccaagagaccatcatggactacttacatggccaaaggtatgacccaaatttaaggttgctcgcaagccgctttctttctcatcttgtgatacaacgtctgccttgttttcacatgatcgctttatagcaaaagctaatgcagctggatccctgcgatgaatattatcacacaatgttttttcagggatagactcatgatctcaatgtttttgttttgggcacacttgtaacgtaaaattaccttgccagcaatgcctcaatgttcttctcctgccattcaaagaactcggcatccctgataagcccgtacttgatcacttcagctaggcctgatgccatctccctatctggcaatgtgttcaacgtgtcagtgtctactagcacacactgtggttggtaaaatgcaccgatcaaattctttccaagacgatgatttatgcctgttttgccacctacagaagaatcaacctgcagggcaattaaatgaattgcagcgagaaataaaaaaccttttttctggatgttaatgattttagacaagaaattcctacagtgaagtgaaaaatgtacctgtgccataacagtggtaggaatttggatgaaattgacaccacgtaggtacgatgcagcagcatatccacacatatcgcctatcacaccgcctccaagggcaacaaatgtacatcgtctatctaggcgagactcaatggccttgtcgaagactttcatgagagtatcctagaaagaataaaagagtctcaataactcacgattactaatgattctttattataaacagggaaatcaaaatccaagataacatgtaccatgtctttgtatttctctccatcaggcaaaattacactttccactgtcacgtttggatttcctctggttaaagcatctatagtcttgtccaggtagagaggagcaactcgatcattggtgaccacaagcactctctttccgtgaacatgcctaaacatttatcaacaaattatgtaagaccaaactctaaaaaacttgagtattgtatgtgctctgaaatttttttaaacaaaaaccattggcctaaataagctcactagttatctccaacgacatcaacaccttactaaatcgatactatcgcttaaagagaagtcaaaactcgaccgtttgatggtggcgacaattaaagctcaaaaagctaaactaaattaaaatgaaatggtcttatgggacaaaagatgaaacctttgaagaagttctgagtgatcaagcaagccggcgccgatatagatcggataactccggtcaccaagatcaacctcgacgacagtgggagaagagatggagcgttgatcgttaagcggttcgttcatgagctggctagcaccggcgcgcacacgagacctggaaagagtcgtggaagataaagaaagttccccaggtttagactttgcagaagccacagggaaaaaaatagttggtggagcaataaaggcacggctttgaaaggagttgagattcttggaggcggcgacgttggaaagagaaatggtgttggctgccatggaaatcgatgcggatcagaagtcgggtttggggagaagagagagttgaagaaaagaaattgggttggtgaagaagaagaagactgaattgaagaaatacattagaggattgatttcgtggtgttgtttggtgaagccttcggagacggcgtggggtaggtggtggtcactctctcaggccattggtgtaatctcctacaactcaccctacgctaaaacaggttatttattttactcacgtgagataggcggtctagatattgacacgtcacgtaaagacctcactacttgtcttctcatgtacgcctcggataaaaacgatgccgtttgattgacccgcgaaaatatcgagcgatgaaatagtcatttagtggagcgagccaacactcactcctcatttcgagacaaaaacgcggaaggcgacgacacgccgttgaggaggatccgactactcggaagtttcctgctcatctggaaattggggatcgttgctgagagagtttaattgagtgatcaagttccgttcgtcttccataaaccctaaggcgattgggatttctgaaaggtttcggcaaaaggaaattcaatgcttaagaaaaaactatccctagaagatgaagatgacgatagatcgtataacttaaggtcatcgcgttctaatgccaagtcgaaacccaggtcctctgctggtaccgcaacgaatcctagagcgtcaaagagagctcgcctttcgggtgctagtgcgactcaagaagactcgagtcttgtagataaggtctgcatttgtttctacattttttgtttgcctagtgtctgtcatatgtttatgttttggcttgtcaccttgatgaaggtctcgagtttcgctttttatatgtctcgcagattagattgtctttcgaagatttcgatgaagctttaagcggcttcaaggtatcttctggtacgcgccaactttgcctggatcctactccacaattttcacacttttattgatgttccgctatgatgcttcctcttacggtttttggagcttataatgtctgtcatttcattgctctgtggtctcttgtttaggttatgaaaggagcaagaataccgatttgtgggttgacaaatacaggcctcgcaccttggaagagctttctgttcacaagaagaaggttgctttgttctttcttttccttttagctctgctttctccttggttcaccaactcatctcctttcttgtttttgttatctttaggttgacgaagtcaaattgtggtttcaggaaagtttggatttcttaaaggtaatgtttcgtttatctttgaaattgatttatgatttcagagctcgtgatgcttaatggcagtattcacttttttgcctttctgtttcagcagaatggtttaaggaataacgttctactagtcacaggacaagctggagtcggaaaatctgctaccatccatttgattacgtctatccttggagtcacagtgcatgagtggaacgctcctattcctaccatctggcaagaacatgtgcacaacactagttcaggtacttgaaggaattatagttgttagttactcagttttggcactgctattacagaccagaggatggttgttgtactaatccggttataatctactggattttcattaattcttctaggactgaagtacacgtcgaagctggatgagtttgaaaactttgttgagagtactaggaaatacggagtaatggcttcatcaagtactgacggaataaaggcgcccgttgttcttttgattgatgaccttcctctagccaatgggaggcatgcttttgaaaggctgcaaaattgcctactactattggtgaaatcaacgcagattccaacagtgatattaatcactgaccacaataacgcggactcttctgaccagactgcacgacgcatggaggacacacagtcatctcttgagcgagcaggggctttaaaggttgctttatcaaactatttacagtctaaatcttattagaaatatcattttttcaactctagttgattgtccaggtatgtattctcaggttgctttcaatcccatcacgaagaactcaattaaaaaggtacttcagagaatatgtagggaagagcattgtaaggtaacaactatggagattgatcagatggcaactgcaagtggaggcgacatcagacatgctattacatctttgcagctcttctccgttaagccagagctaaatcatactaagataaaatcaccaaggcctggcatggaagacaattatcatggaaacgagcagacaatgtacagtggtttggatagtggaatatcttcctgttttggtagagatgagaccctttcgttgtttcacgctctgggcaagtttctccacaacaaaagagagacggataatgtcattatatcaggtaattcgttattaagaaatttaaagaatgcaatttagagctcaggatcactatcttctaagctaaagtttgtgtagagtgcagcagctctcttgttcatgacgagtttgcaaggttgccactgaaaatggatgcgccggagaaggttctcagccaagctcatggacaggcggggcgggttgtggattttctacatgaaaatggtatcaactactacctcgtcttgactatccagtattgagttagcatatgcactatttcctccttgatagagtgacacatgagagcatacctaaacttacatttgtttgtgcttttcgtactgaaagattttctaaaatggactctttatgttaatgaagtgttagattttgtgagtgacggagccatagaagatgcctggtgtgtttcttcgtatttggcggatgctgatctccttctcgctgatataagaggaaagatgagtggacataacaacacagaggatgttccacagtcagccggtgcctcggttgctgttcgtggtgtgttgtatggaaacaagcagccatgttcatccaggtttcttttacatacggataccagctgactgtattatagtttatttgtttgaaaataatattatcgattgatctgtattgtgattatgcagatggcacgtgattcggaagccaaaactctggcaagtggagcaatcctcaatacaaacaaaggtcagggtctttccctttttttttcaggaatagaaactaattatacatgtccaatacatatcaaacctgtatatgcttacaaatttgatgtgtgaatgcagaagaatctgagagagcagaggaacataagctatgaggggtcaagagtggcagatatatcagtgatggccacagagtatagccccgtgctgaaatggcttagctacagggcatctccagatgcgtttccgggaatgggcgaagagacagatgaggaggacagtgatatttctgaagatgatgaaatacaagactggtgacattcaccatcttaagtgtcttatatgttaggtcagatagaactggtatgatagttaacaacttaacatcaagggaaggaacactaattgttctgcttacttataaatagaaaatggagagtcacttctctatctaacaatgagcaacagcaaatttatccttggtttgatcaagatcaagcgaattttaaaccctttcttcagtttttttttggagcattttcaagttaacaaaacgatggggtcaggttcttcttttgccaaagagttggctcgagtcaaaacaagattgagaaacagaagcagcgaagaaggtaagttcagattgagaaacagaaacagttattgttttatcaagtttcctttggagggcctttcttggctgcttctgcggccgccttttcagcttcgatcttggccacgattgcatcaatttcagcttcttctagctggcgcagcccagtttcctcccgtgtcattacggcaacctcaatgttctttccgccactctcaactacctgcaatgcaaagccgatatcaaaacagctatgatctcaaaggacaaaaaatcctgaaataacaaaatatcagctaggacggagagggcaccaacctcaagcagagcacggatagcgagtttaatagtttcttggccagaggattctttgtagttcttctcgaggaattccctaatagagttggagtttctgccggtagcattagctttccaagcagagaaagtcccagaaggatcagtctgatatagggaagggaggcgagagtaagggtcaaagccaacgataagagtagaaagaccgaagggtctgacaccaccactttgggtatacttctgttgaaggccagcaatgtagcgagtgatgtactcaacagtgacagggtcctcaagtgtaagcctgtggctttgacactcgatccttgctttgttaatcaagactcgggcatcagccttgagccccgcgcatgccaaggcaatgtgattgtcaaggctcacaatttttctggctgatctgtcagaaacaagcacaggacatcagcttcatctaacaaactagatagagaaacacaaatacctctccaaaatatattggttaggcagcagtataagagaattgaacaattaagtagatttcttttcagggaagggccaaagccatcatacatgttagaaaagagtaacaactgagacaatcgcaattaggaacaaggttcaattttaaacaagggtttcagctgcagattccattaaatagggaacaagaccaaaataaagcagtcgtatcaacattgttcagtcaactagcaactgagagtaaaccaagcaggatccaataagtagagagggcaagtctgttaattggtgccatgataaaagtgaagagatggaaataaaacctagaatcctgaagcttgggggtggacttcttctcgacggcgaggacaacggtgtcggtaccgcggacaccgacggcggcgttacccttgcggacggcttcaagggcgtattcgacttgaaagaggtgaccgtcgggggagaagacagtaattgctcgatcgtatctagccatctctctctccgctttttattttcgttttcgttttcagggcaaattataaaaagacgaatcccaacttctgcgacaagccaagaacagaaaaaaaaaaaaaaaaaagaagaaggaaatactctactcagatcttcaagtttttgagaagagagacaaatcgcgcactcatcatttcctttaaatgggccttatatacccaaaacttccataacaggcccattaacacagtataatggtcgattaaaaaatacatgaaccttcctcccgcgctttctaactaaccaaaccgttgatgaatgaatgatttaaaacattgtacaaacatattggcgcaatcatcccacaaacaactttcttcttcgttgtttctgataaaactgaaccacaaatgtacgaatctccatgggaccaagctctactactaaagtcgacttgtcaacgggtccgcctcttagcggggaagaaggttgttccgcttcaccctccactttccacttcatcttctccttcatctttactttctcttgatttgctgacaaactcatttccgtcacttctttgatctgcaaaaatagtatggattcattcaccacctagctagctagtatgttagagtatctctccacatgtagatgagcaagtgtgtttcttaccattttgccggaaaacaacttcttcaactcaactttagcgattttagagtaatcactgtcttctcccgcctgtaaacaacgctcaacactcaattactgtcaggtatatcccaattcaagaacatctaactgtacgtacctcgtagagatgagccaggcgaagaaggacgttcccgagatccaactcctcaagagtgatgagagcaatgttttgaggcaaggtgtagagatgatccatggcataacctttcacagtatttgaggctttccatttctccttgttctcgtgtgcgaatgccattagaagaggtgagtatatttcctgtccagtctctcgtctccaccgccctccttctcctaccttatttatgcttacatagtaattcccacgaatctgcatttacacaagtatgtatcaagttttgtcctggacaaaacacacacaatttctcaattaatcattcataccgtcaatcctgcgcaggtgtcattcacacacacagtttctacaaggctctcctccactcctctcgagtcatccatggacgttctcctgttcccatggatgtttcatcagtgtcaactacacaataatgtttcatgttttaaaaatacagactaatgacactaatgaaatttggaacctgtgaagcatcaactctatttcaccgtccttaatacttgcacccccagtagcccgatcaaccaacaccgacaactctgctttctcgtcttttatgtacattccaagattaagctgaaaagatacactaacaatgcgttagaactgtaaagccattcacaatcgatatagtccaaatttttcttggttttgcaatttctgctggacatcaaatagtttaccggatagtagtttcctgctattggctcattcacttcgagatgccagtctgttcggttgtcccggacctgcaatagagtttaatctatttgttgaaaccgggcaatacgatctcattggtgtttaaaatacgagaacacagaaaaatcttagggtacccgtttcagaaagtctcttccattagagtcagtatagaactccttagctgtagtcatatctgttaccattcgcgtgataatctcttttcctgttagatgtcccttaccaacagaaattggaccaatctgctaaagagaatgagcttgagggatctttttatccaaaacaccttaaataacctgaaatagagttttggacaacactcacagtgaactcaaattcggcgtgctctttttctttgtatagtcttaccacctagataacacatgtacttatcaactaaggattctccaatataaattgtcgttgcaactagctatggttgacaatttctatgggattagagttaccacaaaacgtgacttacctgtgccacccaaggactaaactgctggtgcacctcatctattaaaggccctcgcacaatctgcaactttgactgcacgtttccattgccaatgaaagcactagtcacggtacatatcttccaaacaaatatttacatggattacttttatcatatagattttatgggtttatctgtatttctaaactacaaagacaattatctgcttcctacataacgatgctgtgtagaaaagctaaaaaaaattatgatctaatatcttgatgatagaacctcagcatctcaatgctcttagagtattcatagactcactttggacgacgaaacaggatacgccaaggaaccattaggtcgaaatatatatgcaccagaaacctggggatcttttgcgtccccaacatttgaagcataccagaaatagttctgatccacctttatgtcagcctgaaagatatttattaaaagcaattgtgactgaatattttgtctaaccaaatgaatgaaccaaaaagattcagtgtgaaggagtaaacgaaacattactcctgttctggagttgtacatccgttcgagacgaccagagtctgaagaaaacaccatctttagatttcctggaccaatttcagtcgtattgttcatcggactaagcatcactgaagagtgtttgtgattgttgcttcctatatcatgaatgataaaaaaaaaatgaattatgagggaaaggcaactgtttaactttctatggatagcatgagcctgtgtctgcataccttgtgcggatgctttagatatgaagaatgtgttccaaccaagtggtggcacctttgctttaaacacgagccaatactttggacgctgcagggaagatattcctaaataagcttttgtgtagaaacttctgaggttgctcgtgacattatccatggggatgtattgagcatcaagggtgtttccagatgaatcttccacacttagacctgcatcattgacctgttacataccctaactctttagtaatacattaaagaatttgatctcaaaggagcaagtaaacagaggcatgaaatataaccggaatcctgatgatttctgtacggttccatccaagggagttatacgccaccagaatctgaagatcaaacactgagatagttggagaatctgagctatatcataatgattgatgagagatgtgatggaattaccaagctcttctggcctggaagggtttcttctgtcgatgggcaatagctgatattcatcaacgagcactgctgatttgattccaagaaagaatatataaaccaggtgattactatatagagacacacaataatcgtttactctaaatagaggaaagaaataactcccacactagtcatcaccatgaaagggattcttcaatcacatttctgtaaaaaaaatgaaatccaaaatgagtttcttggagatttaacctggctgaatgctattgcaggctttgtgcagccaccttttggtgctttgttcattaggcatgccagcgcagaattcaccacagcttctgcctacggaataattagatgattactgatataagaaaaaagacaaaaaagaaaagagttttcatatatagtatcttacctcagaagcaccaagagcaaggcgtttcatgtaatcatttgttacatgctgcttggcagttccagtgacagcatcatggtgctgcgctatccctaaagcatccccaagactgtaagtgtttggacctccagagttcttgcccaccagaaattcaagttgccttgcagcctgttttggaaaaaaaacagacaaatgcaaggccatgtaaattcattttgaatttcactaagaaaatgggaaatcggactccgtaagatgcagtttgataccatgtagtatccgctaagagcccgaacatatcgtttaagagcaggacggctggtgaagtagccagtccagtaagcgtatgcccgatccgcatatctgcagagagtagggggaaattattgactattgagaaaatcaagttgttgaacaaaaggaatatgtaaatttatttggtgacagtactaaaggcactcacgggaaaaagtcatgagtcttgagaggccaagtaacattggcaacattcttggcatcaacatagagagatggtgtggagtacaaggcgttcacacggccatcctgttgaatggaattattggtgatgagaatctagtctccaaagacagcgagattgatattgagcaatcacagcaagcaagagatatgaaaaccttgttaacataatggataagtctgtccatctgtctgaaccaagactcggcgaactggtactgaaaatcatcgcccattgtccacatcacatggttccctcgactcacattagcctatgtccacattgactactttcagaattaatccaagattacacacacacttgaaaaaaaaaaaaatactactcaagacttacataaacaagagaagcattgacgaaatcattaaccgcctccttaatgttatagccatcgaaacgagggttgtcctgcaaaatgacgagtgaaccgaattcccctaaaccaaaaaccaaacgggagaaagaagaagcgaacctggaggggtacgtaatcgtcggtgacttcatagtgaaagccagtgggagggccgtaatgaacaaagaagatattggtgaatatctgagaagaagaatccagtgtttttgatcctctccagatgacttcaagtgatttctcggcctttcgcttttctctgtcttggtaatcgattctcgcgaaatgcacagaatccaaccctaactgcacccccaccaaattaaaacacactcataaggaaataaagaaataaatagattagaagggacctctgctccaaggaggtaagcttgaacagaggaatgaccaaagggatcgatttgccaagcagcacgtggagttgtgttgaactgttgctttataaaccgatgcccctttgtggtttggtctatcatatctatgtaatggcacgttgcttcatcattcatagcccatcctccatttctgcacattgattgtgtgaattgtatcaacgctaggtagccaaaatgataaaattaaggtcgtgacctacttacacaaactctagttgcccggatttcactagtctcctcacttgctcttgtctctcggggctttgttcttcccaccaacgcgtaaagaaggcctttttcatgtacattgatgttcacataagagaagaaaacatatattatggttttatgaacaaaaccattattaatgttttaccatttccgcaaacacaaactttctattgggatcacgaagtagagaatccaccaccgagtctaggacgttcctcacgcaagcgttctgaaactcacaattcatttgggatatatagtacgttagactcgtctctacatacatacatatatatgattcatcattcatctgtagataacatacctggattctgttgttagatcctacgtagtactgatcaacagttttcaaccagccgacatcgtcatgcgaatgcggaacaagatgaacatttagtttccccggaaccactttagcttcggttccatacttcacgtatcccccgcctttgacgctctcaaccaacgacaacagaagaagaaaaacaataacacaaagtgatcctttcaataaagacatacccggtttctccattttccgatggcagagttttcagatgtttttctttcttacagggtgtggaggaaacttataacaagaaaatggagagagagcaaaacaagggtcataacaaaagaccaaatccttatcgtttgtttttgctcagatccgtcggtctttgttagagtctctctattgttttactgtgactagattgtcatttcaccatatgtaataattaattaggttctacaataatcttattttcctacaaatttaattaaaatcttgaccctaaaatagtactttattaaatctttttttcttctactttgatgtcaacattaaaattgaagttgatctgttttgagttttgacaatagtcatttaccttttctttaattttatttaacaaatagttttgggaaaaaatctccctttctttgataatacacaaatcaatcaatatagagataattaaaccacgtctttacagagaatagaagcaaatctttgagctagtaacattttagtataaaaatctcaacaacaagtcatttacatcattgcaactgttttgttctcttcatttgacttgggggttgtttgcttgcaaaggaggctttgtttgtacgtcgtcgtttttattccgtatataaaatataaattaacgaactaatctttaaagcctctgagacgagtagaaggttctctctggtgaagaaaccaatgcatttcggcgacagcctgaaactgaaaagccatcgatcgaccgagaaagcgaaaagagagagagatgagactcgtcgtctcaagctgtctactagttgcagctccttttctctcctctctgttacgagtctcactcgccactgttgtcctcaattccatctccgcctcttttgccgatctcccagccaaatttggtcaatttctccccctcttcctttttccttatccgaaacaatttctcgaacaatctggttaaaaagaagttgattttgattctcagacggctccgtgaccaaaaacggaatctgtggagctctatacgtcgcagatcctctcgacggttgctcaccgcttctccacgccgccgcatccaactggacgcaacacagaactactaagttcgctttgataatcagaggcgaatgttcttttgaggataagctgctcaatgcccagaactcaggttttcaagctgtgattgtctatgacaacattgacaacgaagatctcatcgtcagtaagccttttgcctcccacccaagtttaaaattccatcttttcttctcctgatgagctagggttgagctgaatttcattggagttatttaatttagtcaacgcccccataagtttggagattgaccaacatctgttttgcacagtgaaggtgaaccctcaggacattacagttgatgcagtcttcgtttcaaatgtcgccggtgagattttgagaaagtacgcgagaggccgagatggtgaatgctgccttaatccgccagacagagggagcgcttggactgtgttggccatctccttcttctctctccttcttatagtcactttcctgttgattgccttctttgcacccagacactggacccaatggcgagggaggcacaccaggaccatcaggttagatgcaaagctcgtccacacactcccctgcttcaccttcactgattctgctcaccacaaggccggggaaacatgtgctatatgtctcgaggattacagatttggagaaagcctcagacttctcccctgccaacatggtacttactcctattcttctgtggaaataaactggcaacttgccacccttaatgtgttcattgaggtcttggaaatgtatatttatgagacacagatcttcccttcacaggattgaaacatgtgcttactattctaggaagactttgataggtttctcttagattctaactttataaaatagatttctttctagcataaattcctctgttttagggttgaaggtacaatatattccgtttctgtcaattccagtttgataggtaagcaccgaatgcgaactttttggtattactcattgcttcgaatgatatgatgggtcgaatatgtacatcagaagaataaattaaagatttgaccttttttagtttatgtaagtgggggtaattcatagcagttggttgatttgaagctcttatgcagcttttcacttgaattgcatcgactcttggttgacaaaatggggtacatcttgccctgtgtgcaagcatgacataagaaccgagactatgtcttctgaggtgatcctgttagactgaaatgtataaatcctttcagtagttattttgttgtttttgcgttgggttcaatacactgtttgtgttgttttgttgcaggtacataaacgagagagtccgagaacagatacaagtacgagtagatttgcctttgcccaatccagtcaaagccgttagagttattatcggcttagcagctgaacactcatatcagtgctcggttacctggatcaggtccaggtttgcatcttatattgaatggttaatcatggtgggataagtttaggtaaagggaccggatctgccatactggtcgtgctttgctggattcccagatcaaaaagatatgagttgctttgcctctttttctttgcatgtgtacatttacatacgctctgagtcatgtgtacatttgatcattgtgtgtgtgtgtgtgttatagattgaaaaaatgtgtgtgatagtacagatatgcaaacaaattgatagaaaacaaatgttggtctaatcagattttctctctccgatccaggcaaatctctaatgttatcttgttgataatttctttgcctaaagtttgtataatatgaatattgaatctgattcccttacatgggggaatggaatccattgaacgtggctttgattttgtcttgtctgtagtaataataagaaaagaacacgtcatcctcatctctacctaacgactcatccaatacgatgactcgttcatgggtttgttagttgcgcaattccatcaccaaaactttctattacatactcaacttcttttgattactaaattcagccaacatttccttctcatctctaatcagtgaacacgttttctatgcaggctttggggcctatcttaccatagctgtctaagaagactattatcttatattctttattgtagatttcatttacttgcgtatggaattggaaacaaatttctaattgttgaatcatataccattatttttatattggccatgcatgtgtataagtggaagatagaacaatattaaaacaatattattgtgtttggtcctatttattactctctgctctcttcctgaagcttcttcatctttttgtttgacaagaagaggtagagaagaagatgtctcaatcaatctcctccagcacaaaggcagaagaagttgttagtgtagatgtgagccaagccaagactctcctccagtctgggcatcaatatcttgacgttaggtgagcttctgatctattctatcatatcaccatgcatgtaccagctgctgcggttgttaatgaaaaatccttgcacatggcaggactcaggacgagtttaggagaggccattgtgaggcagctaagatcgtcaacattccctacatgctcaacacacctcaaggtaaatcaaatatcaatcacctttaattagagatatcaaccagtacatgagttaaagccttgtgatctctactcttaggtagagtgaagaatcaagagttcttggagcaagtatcttctcttctaaacccagctgatgatatccttgtggtaactcttttcttcctcatcacacccacaagaattaaaatctgccggtgaaaacgatgataaaatctggaaaatgatattgatacaaacagggttgtcagagtggagccagatccttaaaagccacaactgaacttgttgctgcagtaagtgtataatagtccctagtttacatacataatttactcctacttgtgtgtttaatctcaaagaatcaattcatatatacataaaaaaatagggttacaagaaagtgagaaacgtgggaggtggctacttggcttgggtggatcacagctttcccatcaacacggaggaggaggagccatctgctaattaataatcttaagattctcttcttttcttaatcaaataatataactgcctgtgtgatgtagtaatcattttcaatttaaaattccagtttcttgtaatcaaaactttcgtgtaccaaattcaataaaagctgtgtttctctataagtgaaaaccaaaaaaaaaaagatgaacaagtaaaagtgtaaaaactaagtaacaagcctttgtttgtttcatcggtcaaaacgtttgggctttttgagtatacatacaaaaaggctttgggcttcagcctaagcccttatcttctctgttctcgcccggcgattctccgacttaattaattttccgaccgaacacttctctctctctctctctcgggtttctcatggaagaaacgtccaagctacagttaccggagagtttccttagctttctagaggcgaatggccttgatccttcaatctatactcacggagattcaattccacgttatgtaaggtaacttgagacccctcctttgcttttctcaaaatttctgaatttggcattgaaaccggagaggtccgtttgaaggttgaaacctggattcgaggatgctttcgaagagattgaatccgaaattaactgtaaactggagaaggtgaattggttaccaggattttactccatccctccagatgttcatatagccagaaccaaggcctatcagcaaggcatggtgagagagagcaatcaaataccaactctcctctcgctcattcggtttttcttaacctcacttgttctttcttcgggtttcagatgtacggaatcgatgcagcttccggtgccgctgtctcagctcttggtatctccccaggagaccatgtcttggatctttgtgctgctcctggtatttttttacattgatcagctgatttggtttccttagtgtgtcaattcgtccttgtaactgctttagagggaataataatactctcaggtgctaaactatgtatgatgcttgacctactgggtcagaagggtactgccaccggtgtcgatgttgcaaggcatcgtcttgctgcctgcagaactatgcttctaaagtatgggcttgctgaaaggagccggctttttcttgctgatggaaccactttctcagtcccaccaaccagaaacctaccatgtagagcagcaacacttcaacatcgtcaaaacaatatgttcctttaagcttttcctaactttgctgatgagctcatttgatatgctaatattcaggtgagtcatgtgtggacgatcatgaagacacattcaagcagtggacctcccgtagaccttacaaagaaaggaaacaagaagctaaggcaaggaagaattctgttttgccgcagaatggacaggcagaaattattttctacggacagggttctggagtaatcgggctaaaaaagaatgaactttatagatcccttgaccaaaatgattatgcatcttatgggtatgataaggtatagttgtgatccgcggatgcagctacagtcacttaaaagtgacataactaaagatttgaagtggaaatctgcaggttcttgtggacgcagagtgcacacacgatggttcgatcaaacatatccagaaatttgagcaatggggttggaaaactctggaacgccgtgttctggatgctgagagaaccgatacaaacttaaaagctcttcaggtacattccataagtctgttggtgtttcgtgtgtctacccttgttattgcctctctggtgatcattgccagggcctttgtttgcagttgaatctactgagaaatggattcagattgttgaaagaagctggcactctagtgtacagcacctgcaggtgaaaagtccaatcacaataagctctctgtgctcttgcctctccttttttctattcttttagacgtgagtcagtgatctaagtcgtgtaactatcagtttgacgcatgcccaaaacgaagatgtggtggatcagttcctttctgaaaatttctctgcaggtacttaaagtatattttcaacaaattaacaacattcattgtggtaccgttttcgaaaaaaaactcgatactttgtaggtgctataggtcagattttgtgtgattttgtatatttctttttccttacttatggactagtgggaagactaacagaaaactgggttatgacgatgcagagctacaagagattgaaatggccaaggattggccgtgtagaagtggtcgcacgcctaagacactgcggtttgatccttccacctcagcaaccagcggccttttcgttgcaaaaatcaggaaattgccacccaacgaagcaaagaagaatgtgttgtgatacctcgctcaaaagggtcgttcggttgatgactttactgaaaagtgatttagcccttcaaaaagggagatgagaaaaacatatttcacaaaactcactatattgttgcaagaaatataacatgaacaacaagtgagaaagagtagtttggtggtattgatgctctcttttgaatgttttgattgaaaatccttgagaaagaaaaaagaagcagatatgaagatttcacaatgcatcagaagctttttatctacattatataattactccctcagaagcttccttagtagacttcaacattccactgttcactcctcttcaattgcttcttgtactccaaccaatcgatccctgttcccaccccaaacaaaacagtttaataaatacatctggcacagacttctgaaaatcaaatgataatgaaatcaatgtccttaccatctttagcagcaagcgagaccataatgtcatcgatacccttctccatacccttaagaccacacatgtaaacaaaggtgttgtctttcttcagcaactcccacagctcttctgcatactctgccattcttgtctgaatgtacattttctctcccttctcgttcgtctgctctctgctcaccgcaaagtccagcctgaagttgtctgggttcttctccttcatcttctcaaactcctgccattatccacacaattcaacaacagcttttttgtacaagacaacattagtaaaggtgggttggatttcagcttgtgtacctccttgtatagcagtgagctgcttgtgggtacacccaagaaaagccacgccaaaccattgaactgcacatatgattggcaaattcaattggtgagtaagttagtcagtggtataattggcaacaacagtgtctagagagtttgcttttggtttgaccttgtagtcctcgtgctcctcaaagaacattttccacaaaaatgatctgaatggagctattccagttcctgttccaagctaaggaaacagaaaagcagaagtaatcactacaagtgttgactatataccactaaattctgctctctaatctaagtgagcacgccaatatatgaccataccatgatgatggtggcattggggtcttttggcataagcatttccttgccaacaggtccagtgatcttagcttcatcacccggcttcaagtcacctgaaaaacccgaacatcacaaacactaagaacagtttaaaccgtaaacgatccatcacagacacattgttcttctttcttacacaagaagttggagcagacccccttaacaatctctccgccatcatttgtgtaaactagtctcttgacacagagagaaacctgcaaaaggatccatttccagataagagaagatcattttgtaaatcattatttagttagttgttagagggattatttgcttacggtcttggagtctccaaagtcaccaatggcactactcgcgatagagtaaagcctgagcttgtgcggcttcccgttcttgtctattccctctggaatcactcctatcgattgtccttctctatacggaacctcacctaagtcatcaaccaacctaatcaaatctctccctcgaaaaatgcctctaaaaaatacaatcaaaagccccctaattaagggatttaccttcggtggtgaagacaatgtgccaagtctcaccgggagcgtcatcaccggtgatcttggtgttcaaaaggcagcgaccagtgtaagggttcttaggtttgaatttgttgacaacaatcccttcttcctgtttcttagactccttgactactttaactggtggtgcctcggtagtatctgttgtcacctgagccttcactgacacaactcttctgtaacacactgtgctctgtatgcaggtgcacgagataaatagcaattatgcatgtcaagatccagctttacaattagtgattaattaaaacatgataaacgaaatggaaatggaaatgataccttcttgaggaaaatcctttgaggggatacagaggagattttggtgaggagagaggatgacttggaggaaggtaaagagactgcagcacttatagcagcagccatggttgatcagaagaagaagaagaagatgaactgatgggagatcaaagtcaaaaaaataataagcaaaaaaaaaaagatcaaagaaaaaaagattagcgggagatatatgatgaggttgtgattggatgtgtgtggattgtgtgaagggcaatgtgaggccaagtgttagagaggataagttatttctgcttatcattgtcctaatttagcctttcatgcgcctgttgttcacatttcagtcctacatcaaaaaaaaaactgttcacacatccatctcacaatctggtagttactgggctagctaatgggctcaagcacttattgatgggcctcttatgacatctattttgacatggagtcatccctccctcacttgttacctttcttgttgtcttcaaagtttacacacatacatagagctctcatcccaaattacacgaaatagttcaaaagaagctcaaataatcaatgatatcgtctctgcagatatatgaatctgtacagaaaagatcagccagagaaattcaactacaaaaagctcaaaagcctttttgtttttgatttacacgggtaaagtattacacaacaaggtattctgcgttcgctggtcacgaaatcaaaatcgaaataatgaatcaattgaaattgtaaccccttgatcctctttgctggtaaaggtccagtcctctctttgcctcctgcaacaaagcttctaagctctccagctgcgttacccatgactgcttcgaagcccattccaacactgccagaacctcgtccttggccagctgttcgctgtctgggacattgagtgctatgtaacagaggagctctaatgccggaatctgtacgccaccctctccaaagtaggccaactgaaccagatgtttgccccctccagcttctataatgcccctcgagtgatctttgtgcaagtaattcgccgtgcaggcgaacttcgtgagggcagccgcagcttcccctgtcacttcgggctctcgttcgtccagaagcttcaccagaggcccgatcatccgtgtctcggttgctctgaacgttctagcaaggttcccaatggttctgatgcaggggatgagtagctcagaatccgctatctcaatgattctaagcacttgatcaaccacagccttgcaggccggggaattgggcttgaacgcggaacgtctcaggtcagcgtcctgctctgcaacggcggtgatctccatcaacgccatagctgagttgtatctgacctcctcgtcgcccttctcaatcagaacagcgaagcagagaagagctctggactctgtgatgcttttgcagatggtggaattgcctttcgccagcttccacagcgctctcgcggccatcgccttaatctgacacttggtggctgagtcttccagctctcgagtcttggatgcgctcgaagtcgaattctggtgctgctgtacactgctaggttgcttcacaccattactctggctcacaccgttgctagtcgacttcctcggagggtttgccctaaccgccatggtgttgacgaccacattgtgcatctgattgggcatttgcttccctgtaggatgaggaatagagctctgatcctcatcaagacccttgggcaaggcggtggcggaggtggaattaggattttccttggcgagagcgacggcgtggtgaatggaagtagctttgttgttggtggcaatggcgtatttgctgtgctcttgcacggtttcgaaggccaagtggccaacgagtagccgaatggcgttgtgctgagcgaagacgtcttggcacttggggtgattggacacaagctccgacgtagcccacgcaaccaccgcctggactttcataggcccttctttgaggactttgccgaagacggaacaagcgccgccgtgaatcatgtgctccacgctctcaggatcacgtcccagtaaccctaacgcacgcgctgcgttctcttgcccctcgggcttcccttccttgagcagtttaaggagaggcaccacacctccttcctctatgataagcttcgtgtagcgatcgttgtcacgggccagagataccagcgaggcggcggcatcagagcggtcttcaagcgatccggtgtagagaatggcaatctgctcccagatcaggcaaaggatgggttcgttggcggcgattggtggaagaccaaggtagccagcgtcaccacggtcttccgccggagcggagacacggaggagccaggaaacgtctccgatagagttctccaactgaccagacatcttccggaacgcggcggcggggatgatggtgaaaactcgcttcatgaggccattggctcggcactttaagacaagggagagagccttctcaagcatctgctccgtgtcgtcgatgatacggcgagtgggtcgctcgtaaaggtcgttgctggcgcgggcagcctgacggagaagaccggcgagcttctcggtcttagccttgagttcgccgcactcttgcttgaaggaactagcctcatcggcggctttgaccacctggtcagacagttgaatcggcttcgctaggatttgcttgacgatgtctgccatcgtcgatatcagatcaaatggcgaatcgagattcagaaacccgaaagagaaaggactaaactttgaggaattagggtaaaaaggataaagcttttttatttttcttgtcaactgggttttacggaagccgagaaattgactggatcggaaataataagaaagagaaaagaagaagaagaagaggagactccattggagagaagaagatgggtcgacgacggacgaatgattccttcagaaaatgtcaaacgcggctgttgtgttactgccgctgattactgtaataaactactattatgcccctccttgtttactgacttttccaatcttcggaaataaagaaaaagccaaagaagaagacataccatatgcattttgataaacatatcccggatttagtgtcttttcatcaacctttctaattttaaaccaagttatcataatctaatattattagtatctttaaacgtgactagtcaaattcagagactcacccatttacattcaccgaacctgcgaaaatgcacacatttatagaccactgtcacttgcgatgatttcattattttttatatccaataagatttgagatattcccttaataaacatttaatcaatcattgtttactaaattcgttggagccactcagatcctggctggaaaatactcatagaaaagggtttgtttggtgctctcaaaacgaatattataagaaaaatggaaacagacaaaatatatgatagaatcgaaattacagctggctctctatgtttcttttggtgcccaaccattaaaaatttaaaattggatttgtcccccattcagggaatgccacgtgtcctcttgcatctagtgcaccttaagagctctctcatatttcatcaatgggattctcactccactttctctctttgttttgctgcgccttaaacaaccaaagtattacttacttatcactacaaacgccaaaataccccacttatcttacaaccaacattacatataagaagataagacatatcacatcccaacaaattacattctgtatcctttacttactcctcttctagtatatactatcgaagattcctgtgacctgcagggcttggtgctctctgtgaacttatgctcgctgttcttagaagtctcctgaactcatgcaggcttattttcccatctctgtctatgtctgcttcatccagcagtggatctattgatcctcttaaccccgtgtgctgaggattcacaaacaaattgggtttcatcacccacttacctaaacatctactctaccgtacgagaatattgataagaggttagttcagcttaccattcgaagttcctcaggcgttatgtacccgtctttgtctaggtcgaatttctcaaaagctgctcttgaccttagctgccatttctctgaatcatgttcttctagttgatgaacatgtagagctgctgctacaaactctgtgaagtccactaacccatcagtgttgctatcaatctgtgaccagcaaagatacaagtacacaacggctcattatgaaactacgtctccctctgatacccccagagatgcaattgcaatggaaaacaaaaatataactaccgcttcaaggatctcagcaactcgtgagtctttcagtttccaaggaagatctttggcaagtgcctgtagaaaaaaggccaaatggatgcataaagattaactgatcatgcctagatttaactagtaatgttcttaaagcaaaatatcatgagcttttacctgtctcatctcttcaagactaatgacgccatttttatccacatcaatcgcatcaaattgatctctgaggtcagagatctctgcctcgtcaagtgtgctagcaagcgcctgccagaaggagacacaaagcattagagacatgtccggatcactttgtttttatccatccaacaacttcctcatttaacttacccttaaagcaaattgctttagacggctgtatctcacaaattgtcttaagttgttcagaactgaaatgtcgacagggatatcagtagcattcccgccttctctaacccacgcatgtgctacaaaggcaagagacaaaatagcattagtcaaagaatccgccgcacatgaaaaaatcactaactttagtactcgaaagcatacatagtgcttgtgcagcagttagccgtgctcgtgggtcttttacaagtaactttttcacaaaatctttggcgctgtcacttatagttgcccaaggtttacggctgaagtcaggtttatttcttaaaacctatattcatatagtacatattagtaaggaagtgagaaagaaataagaaaagctatagatagaaatccagtgaaagaaagttttcaactacacctctttaaatataccatcttcagttctatcccaaaaaggccgcctcccacaaagtaatatatacgtaatcacaccaatgctccatacatctgattcaggccctgatctgcgctttaatacctcaggagccacataataggcgctaccaacaatgtcatggaaccttttccctgtgaaggattgagttgtttatcacagaaatcaacagaatacgctcttaacacttactttgcttgtgtggattttgatagctagtactaacctggtttgataaaatccgataaaccaaaatccgtagcctttagaggcgaatctagttgagctgatttgaacaaaaagttctgcaagaaattggaggaggagcaaaagcagaagatttattattagaaacaaaaagcacatcctaagaggtataagcaagagaatgtacctctggtttcatatctctatgtacaagaccgtgtagatgacattctcctgcaactttgagcatctgcctaacgacaacggctgcatctttctcggagtaccgattacctttcctgaaaaataaaaaaaggaaagcatcaataatgagaaggtaggttctttcttacgattccaccggtaatagattaaagagtagtgagagatgctgactaacttggataatatcctatccagcaattcgcctccttcgcacaacctagaagaaaggcaagagtaaaatgtgaatgccaccgatacatgaaggatagactataagaaatgaggaaaggagactcactccataacaatatagacgtaatcgtcatcctcaaaggcattgtgaaactgaacaacattctcgtggccagagagagcaataagaatctgaacctcacgcttgacatcctcaacagcaataggaagaaccatctgtgagcaaaacatggtgatgagtgacctcaaagcagagcagaggatgcagtaaaaccacagaacaatgttgcaaatgaaagaacagagaaagagcactaactaactaaacaaagtacaaattgggaatcagtgttaaactaaattaaaaagatccgcaactatttttctgatgtgaatctagtagatggtagtggaggaagataccaacaactagtaaaaggggaaaagaaaccctagtaagggctggaaaaagtgtaccttagacttatcgagtcttttgacggcgacgcgatctccattgggtctgtggatggcgacgtaggtgtagccgaattgaccatggccgagcaacttgccgatggtgtagtgatcgtggaagtctttggagtagccaaaatcggtacgcttgccgcaggggatggagccggttcggcgtttggtagaggccttggtatcgatgggagtaggagcagccttggatttggtctgactgcttcgtctactgctgctagcaccagtgactctaatggcggagaaacagacacccatggctctgatgaatcgagaaagttagaaaagaaaggggattaataaaagaaagagatgaaagaagaaagaagaagaagagaggaaggcagagaagattattagagttgagttggtcaaacccaaagcgccgagtgaacccctccaaggaggatccccaacgaaagatccttctcactttcccactttttttgccttttcttcttctttttttttttttattattattattatctgtgttttttttacctttgttttgttgttatacatttctgagaattttaactgtcatttcacgaagtcaagaataatgaatttgtattttggtgtgaaagcgaagaccactgactgaccacccctgtgggatgtgggaagctccatgtttgggcccgacaccatcccccggtaagactcaattcgattcaacttcagagtttgccattatcattatttattgccactaaattattatggactctgtgtctctcatttattactttctaacaaactccatattttagtagagcctcctcctactagcctggatcttttgtgtattttgtactagtattcaagtccctgtcttcaatccctactcaaactgagattactttaaccttagattattggtctactaaattgacttggtcttttcaaacaagatttccatttttctaaaacgtctatatatatttagtaatgtttataatacaatctaaggcgtatacgttttcttttttcttttctactggttcgacttcttagaattgaattttgcccagaggaaagtaacaaattatctcttttgcaaatccggtcactgacggtgcactgcatcacattcacgtgccattccaacgcacaaccgtattccgatacttttttccttcttctacccgtacgctgttattataagtaagggctcaaattatattttaatcatgtatggtataagaagaagaaattgtttgaattttttttaatgggaaaaccaaagtgtttttatgatgacgggaggcacttacttggcagtatgaactgaaactgatttttcattatttttttacttgtctcagattgaaaaacgtgtgcatgaccatgttattaaacaaatactactacttcacctaacgtattttaatgtttgttttgttatacaacttggatccctctcaccaattatgatcactagtgagcccaaccaaccgggcccaatacgctttcatcttttgggcccaatcatttttttcctcaaacttcaaaattttcattacagcatatcgctggtgtgtgcacggcatgcatgacaagctaaaacgaatggtggatataactaacatatacagcttatactatacatggtatacaaacaaaaatgatgatccaagctaacctactcactcatagttgtccatttattctttctcaaaacaaaatcccatacaccagacctctaagtctaagtctacgattacgagcatagtcacaatgtctctcgccaacagtctcttatcatcaagtaagtttcattattttctccccaatatcactttgtcgcatgcatttccatcctatcatttccccatccaatctcctttaaaaataaaaataaaattggatttatttctttcagtaaaaatgaaaaagttgtaaattagtatagtcttcattaatgttcatggaccttgattataaataaatgtcaaaaaatgaaactagacttgagttggtcttcctcgtcgcccatgccgctgccttccgtgacgccactccacgtcgacgcatttacttttcctccggctgttgagtcgcccgcttcccacaaaagacttttcctcggtggtgcaggttagcatcatagtctgtctatacaattaatgcacacagcagcattatgtggctaattacctttaatcacgcagggatatgatggtttgatattaaaggcaagttcgtgattgtgacggtcatcggagtctaccttgaagccatggcactgccgtcaatctccgctaagtggaaaggcaagaatgcaaaggagttgacggaatccgtccctttcttccgccaactcgtcacaggtgtacactttattacgtgctaaatataattaaaacacttttgtattcgttcacacttcacacgatttgtgtagttattacatggtcaagttaaacacgtcatatattacattttttaaattttcttctctggtgggaaaaggtgagtttgagaaattggcaagggtgacgatgaaaaagaggttaacggggatacaatactcggagaaagtagtagaaaactgtgaggagatcatgaaagcgtcagggaaatacacaagatccgaagccaaagccattgaccaattcttgatggtcttcaaaaaccaagatttccctcccggctcttcaatcatcttcgctatctgtcctaaaggctctctcacagtgagtcaactttatttttcggattatcatttcgaataatattggtcgaatgaatgatcgagatcttttgacaacttgtgatgcagattgcattttcgaaagaggagagagtcccgaaaactggaaaagcggttatcaagaataagttgttgggtgaggcagttcttgagtcgatgatagggaagaatggtgtatcccctgcgacaaggaagagcctcgctgagagattatctaagctgatgaacaaaaaagacccgtacaacgaagctaacgtcaacgttgctacaaaaaattgaaactattccaactcgcccaatcttgaataattttagaaaatgaagccagcggaggatgttatgtgacttatgatgacagctaaaataaagattgttgtgacttaattaagacagttttatgtttttagtaagattctaaagattatgaaagatgattttgtgttaatgaaaaaatcagtgatcaaataaaagaggtgggccttccaaaatctaatgtaatagtgtgggcttttaatcatggcctttttagggacgaaaaagtccataattcagcgaaggaaataacacaacggctagtttgataaacggctccttccatttctgtacccaacggctactttctttcaaaaacccttcacagcgtttcaatacccctgtttatttatactttacccaaattcccaaacgccacaatcacttgtctgattctctcatataatagagttttctttctattctcctctgcttaatttcccagaaattactctttctgtgcttatcggattcaatagattcttagtaaatcgtaatggagacaccatcatcgacaagaagagtcacgagatctcagacccgctgtgctatcaataatctcttatcctcaagtaagtctccatagtccgattccctgattttgtttattgagtcggactattttttctggatctgatcgtttataatttatctcctacagagaaagcggatgattggtcagataaatgtcaatcgaagtcggtacaaagaaacggtgcaaaagacaggtctgcgttgtttgacataaccaacgactcaccgatcgtaggtctggcgatgcagacaccgtcctcaggagttgttgggaagaggaacatgagcagaatcaataacactcctggatctggtgaggctctcttgagaggccaagtcaagactctcttgcagaaggttgaggaagaagcagatctcaccaagatttcgttggaatctcgtcctttcatccatctcgttacttctcccatgggtcttctcgccccaactccggccaacaccccccaagttcttggtttctcagacgaagtgcaggttgtgatcacttctccggtagttgcaggacaattcagagcaccgtctcaggtaaaactagatttgtatatgttttttgctgatagatggaagattcttggggaatgataagaagatgttaacttggtttttattcttgcaggtggtggaaagcaacatgtttgatgagaaagaagaaagctt

SEQ ID NO: 972 - DNA, 47665 bp, Arabidopsis thaliana
ggagttagagaagagcccgagcattactcggtcattgcttctggactttagtgataaatcagaattatgggagagctcagactgctcatctgtggtgactcaaaacccagaggatgataactcgtcggtgtggtcgatgcaggccaatgcaagtgccaaagacgaagagtatgatgatgaagaggaagaagcctattcttacggtgaggaatatgatgaggaatactacgacgaggaagaggaggaagaagagggagggattgtggatgggttgtgtgagggaattaggaagatgagcgtagagactgactttgcagggaaacacactagatttgtgtatgacagtgaagatgaagagattgtggaggccaaagatcaatctccaggagtgttgcgtttgaaaggctttcctacaccgacaggaaaacatgtcagatttgccggtgatgaatgagttcagtttgaatctttcttcttggagttgtgacaaaaagcctcatatgtctcgactttttttttttttttttcttgttgttgcttgaagattcacaaatctgattcttgttattaccttgttgttatttttcaataactaaaagtgtaatcggaatatgactcttttcatttttatcttctcttgcttgttgtgaaaaaaggctttcaattgtagtctatcctaaacacttaaaaataaaaaccggacttaaccgatatcaagattagacatttgcattagaacataacagattagtgaaaagttgagtttcattggttcagccgacactacagctaaaataaagaaaaactatgtggttctctgttgttatcaacataaaccactgtacttggtcaattgatacatacaagatgaatctattgataaagaatttgatatccatgagctgtattttcgacatagacctggtctcaattaacaaatatatatctctttattaaaccatccaaatttgtctatatctagggtgatcatatccattatactattatgcatctctttcaattttggtattggccggtgagtcggctcaaatgttgtaacaaggcaatgaaatgtataaataaggtttaattgtgtatatacagatgctcgctaaaagttatgtgagattatattggtgaattcttgcacatgtgaccatgtgaaaatcatcaaacgaggtcagtaaagactgacccgcattctctattcattaagtatgcaacaaatccttaggacaagtcctttaactctgccccatcttgtaaatcctttcatagacacaactcttcccttgcccattctatataagtatcaagtatgcatatatctacttgtatatgtttttgtgactgttttattttctggaaaaatgagccacctaacaaataaaaatgctttaaatgggctatttgcatgcgaatgagaccatctccattgggagtatctcataagagtttctcacaattaaaaaaataaaaataatgaaaatgaaggagagagagtgtataaagtttctcacttgagaaactctgagatactctgtacaacccatcatgacaattctcatcttactattggttcaattttttaacaaaaatacttttttaatcaaataatcaaattataatataatattaatatttattttgttgagaaactttgtgggtttctcatggatggagatgcccttaaaatgtcccgaccatgttataaacacacacattaaatgtaccattcaccaaaacttaaacttgaccagccttaaaaggattttatatctttgatattggaacttgaaagtctcatcacttagagattgtactaataaaatatgcaaaagacaagactatttgacaataaaactgcgcctcccttggatcataattagattctcgtgtataaataaaacccccacatgcgacagctgaagaggaaggaaacacttaatcatcagagcagcttgtagatgaagaccaagaactctggcgccggatgtgtcccccgtgtaaaaaccaactccagagccactggtaatcgggagactagtgatctgaatctcctggaccgttttcgcgaagctgttctccgcctcatcatgatatctgctgtctccaagtccacatctcgccgtcataacagacagacgccaatccaaaagtactacaaccccactgatacttatcacagcgaagccgtggctgactgtatcgagtttatcagaaccaagaaggccatcatccaccaggaaaacgtcccctaacaccctcacttcttatattcttcattgtcacctcttgtttgattagcaaattataaattggtggaataaaagctaccctacgtgtatacgccttgcttaatatttttgggattatatattagtattaatcattttcttaagttactcttcagtcttcataagttgacatcaaaacaaatcattacaaatttacgaccaacctttttatagtatcctgtaccgtaaaaacgattactaaaagaagaatgaatgtatgttactgtattagttaccaatataatatgcatcgtgtaacttcaaatttggtatagtggtagttgtaaatattggttatcatgttcaattgtaataagtttgtaaccagttgatggtaaagtcaacgatccacggctttgctggatgttgccatgttggaatggagaagcgcatcatttgggcccatatttaaaagcccatactcaaaaagttggcccacatagaaaatcgttggcatcagttaaggcggtggaagacgtcgatccctaaagtcgaagcccttgttagggcttctatacatcaccggcgatattggtttacgcgtcggagagatggttggtgagtgttattgatgacacgagatttcaattctcggcggtgtaacgtgaagtcttaacaatttcattgtccaatggtggaatttacagagagagaggaccgagtttctttggaactcagcgaagaaattatacagagcatggaacctggcgccgttttcagagactatgtaatttttccttcccttctcgaagctttcttcttttgttcctgttattataatgggattttaaaggatggagcttttcttttcagaattgcaggatcagctcaattgactttcacaaaacttcgacttgtatggtgacagctagcgacgatgactcaattcgtctctatgatgttgccagcgccacgtgagttccaaaccccaaactctgtcttgagtattgctctataagacattccaactatattttcagtgttttctgttttcttgtttcagatgtctgaagacaattaatagcaaaaagtatggtgttgatcttgtttgcttcacttctcatcctactactgtcatctactcttccagaaacggatgggacggtgagcccaaattcatgtgcacattgcttttcctcattatctgatttgctttaactaacttttatatctggttggttagactctctgaggcttctctctttgcacgataataagtacttgcgctacttcaaaggacatcatgacaggtttgtttcttttctgattcttgtttgatcagcttatgttttccttcacaaaccggatgaacttaaccaatttatgctgtacacagagttgtttcgcttagcttgtgttctggtggggaatgcttcatctccggttcccttgatcgtactgttttgctttgggatcaaagggtcgagaaatgccaggtagattacctttctctaccctaggtgcttatggaggtcttacatctaataaaattgaccatttgggttaaccacagggtctcttacgagtccaaggaaggcctgctgcagcatatgatgatcaagggttaatttttgcaattgcctttggtggctacataagaatgtttgatgcccgtatgtacgaaaaggtttgttcttgacaaaagctaccaatgatcctgttatgtctctagcagcttgatggaccacctgtgctgtattcacattttcttatttacattgaacgtttatctttttctgatttggataagttgcttttatagggtccttttgaaatattttccgttggtggtgatctttctgaggcaaacgttgtgaaatttagtaatgatggaaggctcatgctgcttacaaccatggatggttttattcatgtgcttgactcgtttcgtggaactcttgtatgccttcagcctcccttgctcttcgctagttatggttttttcatttacacacacatgaccaataaataaactggtttatgtaactcttttgtggtacattgcagctgtccacatttagtgtgaaaccagtagctggagaatctacattggatgcagcctttagtcctgaagggatgtttgttgtttcaggtaaccttgagttttacctgattcggatgatgcatgcacacactcacacacttccttcatgtgaaataacttgttctgtttttgtcatggtttggtaggttcaggtgatggtagtacccatgcatggggtgtaaggagcggaaaacaggttggactagcaatacagccatagtttggtgtacatagtttgtcactggaaactttgcttttgtatagttttgagtgttgattggattattgtatgtgtaggtacatagttggatgggtttagggagtgagcccccagtcattaaatggggtccaggaagtcccatgtttgtgacaggctcttccgaacttgcttttgttatacccgacttatcgaaattgccagcttatgccattcggaaataggacgactatcacgtctgtgccatgtaaatgaggcctcatttggccttttggtttcagactttgttgtgggttatgccggtaacttatcccttgcactctgattaatatatatttgggtcttgtaacatgaagataaaccccaagtctttctaatgttgtaattcgtgtaatttacaagtttgactgtttctgactgattcttccgggaagcaatcgatctgactgagagcttgggtcgaagttaaaatggtgggccggcacaatatttaagtaaaagcccaataaggtccaaactctaactaatttatagcagttaagaaagttggtttagggaaactttatgccaaactaaatttattctccttggcgtcttgttgtgttaatcctcaagcaaacgacccgtttctgtcgccaagtcaacccgacccgacttcgttcccatcggttgatcggccgggacctgattgcgtttagcctcccgaaatctacgggcaaagttgatccctctgggtttgtcatttgatatcctcttttcccgtaccgcgcgtttatgattctgattacgttcttggttgtttgcgattgatccgtttaggattttctctgagtccatcgcttattgaatcgtcaaggctttttcttgtttgactttggaatatcgaatctgctcaatactccaccaaattatcaaacttggtgttctttgttgctcaatactccaccaaattatcaaaacttggatgttctttgtagctcaattaccaaattaataagttgcattcttctttgttgcttgttagccttttcatcgagtttcgtttctgcgatactattttgtttaggatagtatggctgaaaaggaagtggtttctgcctcaactttagaatctaagatcactgaggatcatcatgacatctggatccgaggagcgatggaaaagagccgctcctccaacatcagtgttctgaaggatagattcatagctgctgaggattctgctctagtttccaaggatgttgcacaaaaggatattgagattctcttgagacgagtgaaaactgctacagctttattgacttacctgaaatctaaagcgacaactgtggctgctgccgatttggccaatctttcacttgaaactgaccagctccaagatacaatagacgaacatgatgggacttatgtcactgagatgcttcagcatgtagagaccgttacaggcgtcatggagtctctggctaggcgtgcttttatcgccgaatcagaagccgctatcgagaaaggaaaggttgtgctaagccaagaggaaattcaaagaaaggttggccaactcgagaacatgtccgtgaagttagaggacatggaaaagtttgctcttgggaccagtagtattctctgtgaaatgcggcagagggttgatgatttggttgaagagacctctagacagaagcaaagagctactgaaaatgagctggaactcagtcgcgtcaggagagactttgagtctcttaaatcgtatgttacaagtctcattagcgtcagagaaactctcgtctcatccgagaagcagttccaaacaatcgagaggctttttgaacggtgtgttctatgcactttccatattttctgaaaaagcatatcttgtgtacttcttccttgcctgtttaactcattgtgtaggctctactctctagaataaggaactttgattatcattcatttttttttgcctactcgttgtttaggctctagaacttgtcttgggtagttggtcatccattacagagcagatttatcattgtttccaagtttgcattcatggctagctgctttaggggttataaacagaagtcacccttgggatgagagatgagtgggattttcatcaggtttacactattcttaggtgtttgataacgacttgtttcaaaaaacttcatacgagtcatatttcctttccttttgttattgtaagtttatgggaatgtcaatgatgatgaaacaggcttgttgcaaagacaacgcagttggaaagcgagaaagtgcagaaagaagcagaggttcagaaactaatggaagagaatgtaagactgacggctcttgtggataagaaagaggcacagcttctggccatgaatgagcagtgcaaaatgatggccctaagctctatatgatgcttagagatgaatattgctctacttaatctttcttccacttgtaacataaagaaactcttatttgatacaacttccatgtttgttgatatcctaaaggcaacaaaatatttgtcctggaagactctgtatgtgattgtacattcttagcacatgaaattgcgttattgtttggcttaacgtagcttgcttcggggtttcgggttttaggcttgataggattggctgagactcgtcagcttctttatttaggtagaattgtaaacaggtggttttggtcggaccgaaaaaccggttaatgattggcggctgcacgagactgtatgggcattctgttatatttccgttaatggggttttgtctgtaatacatcattgctccaatttctttcatccacagaacatgaagagccgtcgtcgcccatgttctcttcaacaatttgaaatccctgacatgaattttctatatctatatcatgtggtagtctggtagatgaaatttcttcactcataactatgaaaattacgtgatcttaatttttcatggggaactcgcagtttaatttgtcgcgcagatgccaagattgtatagtggcatttagattttaatatatttaaaatcatgtactgtaacatatatctttcttatacatgtctaaaacggtgaagtgttgcacatggtgagtcccataacgttgaaacatcatgttaacaccaggttaattctgtatgtgtgcaattaacatgtgaatatatatttatatattcctcatcatttatatttgtgtttgggcatataaatatgagtcaccaccactatctctttatctattaagtcaaacagagaaggaaaaacacagtgaggcaaaagaagaaaaagatattcgagatcaatgggagtagaaaggggaagtggtaagggtctgaagcagatgttaaagagatgttcgagtttagggaagaagagcagcgtcgacgttaacttcaacggcgtccccaaaggtcacttcgtcgtctacgttggtcactctagatcccgacatgtcatccccatctccttcctcacgcaccccatcttccaggtatatacataaacatggatcttgttggtctcatttattgcatctatttatgtgatatacatatataaatctattatattcatgaaacagatgttgctgcaacagtctgaggaagagtttgggttctttcaagacaatggcctaaccatcccttgtgatgaacacttctttcgagctctcatttcctccattaatccttaacgagacaaattgaagaagatcatatatgtacctacttgcatgtgttatgtgtatatcttttcttcctaaattaattagttctctcatgtattaatagtgcatcgatatcatgtcctttgagagttgtagagttcacgttacgtacgtatacttttgtttcaacctcattttcttggatatttctaaagcgttatttcgcttcaaggagagaagaagcaaaacaaggacagatcacagaactacatcacagcttctctatcattttttgtatattctgatcggacccccacatttttgtccttttgcaattatctatatatccctaacgtcaacagattttttcgccctcgacactcatggacccttcttcaccaaatagagaggctcactggtcatatatagcgctcaacagacgaccaaaattgtcaaagtttgatatttcataattataatttttcaaaattatgctataattattatattattgttcatttgagaattcggctgaatccgtagttgaatatgttaatatttagatccagtacgtaccattttccatataaataatttacttcactcccaagtaaacgcgcatgtatatgtgtaatacacgacacaaaccctaccttgaaagtagacttttacccaagatggtgtcacagataaaccctagtcacaaaacaacaatgttatataattgtattttcattatacatatgtttaaacaaatcttggaggtgggatgtcaccagactcaccactcacgaccaggcaccactacaaaaacacgacaagactttttccatatcatatgattaagtttcagattaatttgttaaccaataatttatagaagtaaacgtcttctacatctcaaaaatttcggacacttggctcccaaagtatgatatcatcatgatattaatattggtatcgtatgagcggtgacgtaattggtgtagcaacgataaaatgttcttaacaattgatattgactaaaagtatatactatttaaaccaccatccaatcattcatatcgcgttaagaaaaaacttgacataaccgtttcagtttatcgttattcctaaaccacattacacaacgagttttggataaactcgaagtcttttatatatattatatattcatttatatatttggtaacaccaatcacaaaattatattattggtataactatttagcaaaatagaacagacaagaaattttgagttttagttgagcacaggtgtagggatcacatgtcgggtgttctttatgtgagctttttgtgtccttcttcatacagatgatacaattataaccaaatgtacctttttcatacaaatgattatactaccctaagtctttgttttcgctagattagttcaactcattaatgacataatcaacattcaacaaaatagactaagcggttatgtttcattgtttctaatttcactttcttttttatttaatggaattaatatcttcggtgttgttattccagagatttaaaaatttcaatacatttttaaaattatggtagaaaaagaaattgaactccagtgatatcattaactaattttatggattgtaataatccgtctttttctccggcaacaaaattgaccaacttctcaaaactcttggtccaagtactaaaatgataaccttgtagatggccaaaagaaatgttacggcaacgggtggacccaaaaaaaaaaaacatggatgactgactaactttgggaaacttgttaaacaagttatcagaatttggatgaagctatttaccaataatttcagacatgcttggtgttaaattttgagtcatatcgtagctgtattacgatccaaacttgagtctcttagctctgggaaagtgaggaggtgcaacatcagtccataaccttttagaactgtcgtgaagatacaagcaactctcgcccatccgacaccccttgggcctgttaaaatacatgcacggtttctgaatcctaacctttacgattttcttatgatcaactcttcctttgtaattgttagtttcagttgttgccggtttgactgccccatgttccctaatgaggttcttgaagtagtctagatctttcacgggttttgcagaaacctgatcatcccggtttgtgttaccattacggatttgaggatctgtttcagttcgcgctgactccggtaccttattcatattccaagagctgcaagggaaaaggagttgggtcttttgttctgagactacaacatcatcccctgtgcttggtttcaagggagcagctgtgtaagaatcctcaactttgatcccagaagacaatggatagttgtgaacaaccggggtgggtttctggagggtaaggttcattgagagagcactggacatgggctgattgggtttggggagtggaggatctgtagcactggactgaaccgaaacaggtacattatgtggcgcaacatttccaggcatgggaggtgggtttctgtccatggttgtggaggtgacatgttgaggagcaagtctaggttcggtgatgtcagtgtttagactgttatttgcagtttcaagtggtttacctttcatgccattgatcaagttctcaacgattttggggtcactgagtaacttgacaagtaaatcaggatcgacctgagagccctgttccttagttaaggcagacaaagctgcagaagcaagaagacttaactctggtccaagtccagaaacagctgcaggagcttcgaaactgtgggaagattcagcagcagcgtcacgttcatcttcaacgtgagtgagagggatattaggagttttgccgtcgtcatagtgttcttcttcaacagctagtgtgagcgaaggactagaagaaaacagagagaatttgataagtggaaaaacatgacatggcacaaaagcaaatcctcaaatgataaaattaccgagaagggatcacagagcgatgtggatagaaagcttccaagactttagaaatcctaagattctcagaacgagtctcgatgctttttccaccactcccaacaagcaaagcatcatcgaggacaaactattttggcggcgaataaagaaagacagtgagagttatataaaaacaagaagggtcacattgtttgcaattcaagaaaagaattataccaatggtgggcgtttccatttgatccgaggaatgtgtgagatgattcgcttcgttgcataatcagtagcttcaaaaccaggtggaagattcgatgcaactttaacgggacaatcatcactaagaaacaactttacctgtccaaatcctttacttagttagtaaccaaatgcgtgtgtactcagcagccacaaagtccttttttttacatgagttatatatataaggggagtcctacatgtttcactatttcaggaggaacacaatctttctaaaattagtgaccacattggtacattgttcttctttttttttgggatttcttgctgtttatgtccctactatgtaaagaagatttcataacatcaagtcatcaacattcaggcacacaaaattaattaattagattcgccattaccagaaaaaaaaaaaaaaaaaacgtcatcttattaaagtttgttgctttgacggtgacttatggaaaaggttttatctttgtgtaaatttaaaattaagaataattaatcaaaagcaatcaatcaaaatcaattcgtttgttaactgtccgattccaactttgataactggtaagtccgaaccgaacaattacaaatttgcaggtaagagaagaataaggaacaagattgggtcgacgaagaagacgacgggttggctatacctgacaaagcatactatctgatgcccacgatactctccctttcttcgttttcttcatcattactatttctcttacaaaaattcaatcgcaaactctttctaaagtctattcactaaccactttctcagattctatacgaaacgagaaatcagatgttagaccaaactcgacaatgagaaagacagatatgaataagaagagaggcgtcggcgatacgttttgtgttctgtgggagagatagaacagagagagagaaaaccctaaccacactttttatgactttttgactttcccagtggagaaaaataaatactatcaaatagagaggcgctgattggctcccattcctaatcgttttttttattactttcaccgatttaatttccaccactcatattcttttaatattcacaattactccttttaacgttacgtgttttttatttttacgctttcatttttgaattttgaatctaataaataggacatgcaagttgagatcgtgtggggaaaaaaaaaaatcaatggttattataaggccgagtataatataactaaatgggttaacttaaggcaaattactaaagtccacaatgatgtttagtctgaacgcaacccgtagagctatatatatatataagcccaataaaattagcagtaatttaaagcccatcttggcccaatagatagtaaaatattcgtaatcggtcaacgcttgccggcgatttgccatacaagtacaactttacgtagccatacagattcacctttaaagtttacagaagtaaccctctctctctgtcttcttcgtccttgggctttattatatataagtcatcgaatcagttgacgctaaaatcaaaaacagaaagcgcgacgtgcccaatcatttcttctgatccgatctgactctgcacccacccatcaatggcctccagatctctcaatggcgattccgacattgtgaagccgaggaagattgcactggtcaccggaatcactggccaagatggatcttacctgaccgagttcctgctcgagaaaggctacgaagttcacggcctcatccgacgatcctccaattttaacactcagcgactcaaccatatctacgttgatccccacaacgtcaacaaagctctcatgaagctccactacggtgatctctctgatgcctcctccctccgccgttggctcgacgtcatcaagcctgacgaggtctacaaccttgctgctcagtcccacgttgccgtctccttcgagatccctgattacactgctgacgttgtcgctactggagctcttcgtctcctggaggctgtcagatctcacaacattgacaatggccgcgccatcaagtactaccaggctggctcttcggagatgttcgggtcaactcctcctccgcagtcagagaccacgcccttccatccgagatctccctacgctgcgtccaaatgcgctgctcattggtacacagtcaattaccgagaggcctacggtctgtacgcctgcaacggaatcctcttcaaccacgagtcacctcgcagaggcgagaacttcgtgactcggaaaatcactcgggccttgggaaggatcaaggtcggattgcagaccaagctcttcctgggaaatatacaggcttcaagagactggggtttcgcaggagactacgtggaagcaatgtggctgatgctgcagcaggagaaaccagatgactatgtggttgcaactgaggaatcacacaccgtcaaggagtttctggacgtgtctttcgggtacgtggggctcaactggaaagaccatgtcgagatcgacaaaaggtacttccggcccacggaggtcgacaatctgaaaggagacgcaagcaaggcaaaggaaatgttggggtggaagccaaaagtagggttcgagaagctggtgaagatgatggtggacgaagaccttgagctggccaagagggagaaagtgctcgccgacgctggttacatggacgctcagcagcaaccttgatatggggaggtggcaaagaagagtaatcattatctgctttttcattgaaatgtaattttgtttcatttgttgttgttctctttcgttgtttcaagttgttcaactccatacactgccaatcgtccattgtggattttgtatcaaaaggcaaacaaagcatatttattacatatgaattttccccttatcagaacaatggtttcttactggtcacaagcgattgtacaaatcgaaaagcctaaagatgaaatgacaaaagaaaacaatgatttgtaacaaaaagatcaatcaatagcatcatcatgcatctatgcaaaatcagaggagatcagaaagtatgctgtagaactacacgtattcgattcaccaatctaactaccattaagagtatttactcttatgcctcgggtttagaagacagagttgtagtagtatttatactgaccgaatcgggagatgcaagagaaaaaggcgccactgtggacctcagagattcaggtccctcagaattaattctcttacataatgtatcgcagttgctgatcacctctgtcaatcttcctttaagctccccgagctccacctgcaaaccatgaactagaaatatgttccacatatataagatcagtggataatgcagtccagtggcaaatccatctctatcttaatctacgctacaataattaccttgagataaatgctgggcagttgtcctcattgcagaaacagagtggttaaacctctgtaaaagtttagtcgccaaagcatctgcgacttctatcttgttttctatatcttcctaaagacatgatgcaacatattaaaattcatttccctttaattgctacacctaaagacatcatagtgatgcaaaccaagatttcagaccaatgaacacttgtaattttcagtttcaattcactaaaccataagagcaaaagaaagtagaacatctatacttgattttttttcttttttttccaaaaagaaaacattcctttggcaccacacttgcaaaccaaaagctcaaaaaacttacactatcttagtgtctgtttcaatttaagagaacccttaggagtagcctgaagtctagtttaagttctcggctaatagcaaaaatttcttaaagactgcactcatatacatacaaaaaaaggcagaaagagagacctgtctcttggtaatttcttgagctttgttctcttgccattctcggtaaatggagaagagctctacaagtatttgaggatcaaccgtatctgggaaacagttgacaacaaaggcaaaaaattagagttgaaaaaaggagacttgtagatgaatgaaaatatcttttcattatgaagctttaacagtaaacgaatacattagcaaaaacaaaaaaagtccaaagatatgtcttcttctatgaataaattgtcttccacacaacaaacgatcaatcattttgaacatgttacataaaaacagcaagtcctcttcctaaactcagttgagcaaactaatcagataggtataaaactcactggaagaggaactggatagagcttttctcactaagatatctgttaagctactttccgtgggaggagacttcaatattggcctactctgcaattatcatatttttaagcaagagcaaacatgttcaatcgaaaaaacattgaaaagggaaagacaaaagaggagtagtagtaactcactactgtgagagctttaagattctcgagaatgggatcgactatttctgatcgatgagatatagtcgtaatcacatcacctcgattttcctgagaatccatcaaaaattgaataaatcaatctcgcatatataatagacccaggaagatgcctggagaatcaaatcgcgatatatcagttacctgagagcctagcagagttgaatctgatgctcccatttgcttcacagactccgattagggaattttattcaaggaatcagcagttccgttttgggagaaatctggaaacgctcgtagcaaggttttctcaactccgccaaggagaaggaggaggagaccgcaatatgacgtttcgcgcatgtgcaagacaacagcgtgccgttttaaacccccagtgacgacaatgtgttaaaacaaaaaacgccagctcgttggatattcaatgggtaggactaggagacaaagcatgagtaacacaaagccatgcttcaccacgcatggtagacaaaagcccattttattgggcccaccttgagcccacttctttattaaatatataaaaatataaatcaccgtaatttgaacgtatattttcgagtcactaatacattatacgaaacaaactgagtaagtgtaaagccctatatatatcttcttattcgattctcaccttctatttatccatcgaaatcaattccttcggtgaattattacgaccatatatgtaaatccaaaatgcgacgacgtttctagtgcatgcatgcataggaaagccttttttagtcttctccactcatcaaaaattgagacgccacgaacttatctagatatctccagtcagtgatcctcttctcggagctcatgtcatctttccggctactgttctcagaaaaagtagtactatggggagttatttccgacggaagagaggggctctcgagctgaggaagctgggagaattgatcatcatcgatgcattgaaggtacatagatccgaaatctccatcctggacgtgactggcctcggagagtagttcttgcttgaacggtgtggcggtaaaatcaggattatgtctggctcgcttgtcgagaggttccaagagagtggcgtcgtcgtagaataagcagttcggatcccaaagttgcctcctttttgttgggatggtcgttcgtttcttaaatgctctacacactacccatccttcttcctgcttcaccatttaatctagctagatcaatcagaatgtgtggcgctataagtgaataagattccgaattacctgtggaggagagttctggtgtgactcgaggctgtagtattcgtgaatgatccaatcggacttttggccattaggcgctcgacctcggtaaaagacaagcgtttttctcataccgataagtttggagttgaggtaaaccgccttgtcccggcccgttgctttccagaaaccggccacggtggctcggtttgtcctagtcccagtcggatacttcttgtctctatggctgaagaaataccactccgtttgctcctcgtaccctatcctacatctctctacacgtatcacatttaggttacatattactctttcgagctacacagtatagttgcttacatgtgtaggtggtatcgtttaaatcataattcataaattaaccctaacttctaaaacttgacctctctagatgtagccttatatgtagggtcactcgggcacataattcataaattgcacatataaaagacggaaccaattatattatatgaacgattgatcacatgaataaacattggtatcgagaagatataagagagacagatagagagagatagatatataatataccttgtagatcccatggttcgatcttgtaaagatcaatttctctgataacgtcgagatcaatcctctgggaggcgattttcttcttgagataatatccgacaagttcttcatctgtcggatgaaacctaaatccaggcggtatactacacgaataatcttgatcaaccttcatcatattgatagttattttctaggatttatttcgctgcggtttcttcttgatcttagaaagatcgatcatagaagaaacccgatcaaccgactctatcaagggaaaaacaatagaacgagagtcttattgaagatgttggttaggtataggaaaagagagatatggaccgtccacttgaacgatgacatgtgtgtttagacttcagagtgtaatcatatgttcatttcgcgttggcgtaattcaccatcactctttctgtacatatatgcacatttatatacaagatacacaaaaatatatgttagaagatatgaatctacaaattaatatatatatatatatatgaaacgaagtaatgattatgttacaacttagaatggagacatatgaaaaggagattaaaaaaaaaggtgggtggctccgttttgagagaaacgggagagagaagctgtgattatcatcattttgtttttgtgttacttcatgctcaaaatgatgtctccttcaacaatcctgtattctttattttatatcatatattcgtttcctctttatatatgtatttaaaacactccaaattatgaaaagaatgactattggaaatactgaagctcgatggtacgcgcggttgtagtgctacattttcaattacaatctgacgttatgtgtcaaatgtgctgatgtaaaacttgttttgtctgtttgtcgttaattctagggtcagcactctgatctctgtgtttgacaaaacaactacatatttctctctcacacttgatctcacgcctacaatacgatatgtatgtatttttacctataaagctagttacgttggtgaagcgatgacccgatcaagtatataacttaatgttaattggatacaattcctgcctttttttcagccaaaaccaaaaggttatatatgtagaggatgttagagatgaatagagattaagatttttagatgaaaaagacatgcaattgatcttatataaagcatgctttaagcaagagatcatatgtgtttgaaaggtcatcgggtcataaaagaggaatgtatactgtatacagttttagacttgactttgtgagaattggacattggaaaattgtggagcccctccgtttgcgcatggtttttatgtaattctttgggagtcaactactagtagtacagtagactagtaatggtagtagtaaagggttatatttgtcattttgaacgcggctgttgaaaacaatgccaagaatgttcggaaagagaggtgaagtggaacacacgtagccgaatagtattggttaaacggttaagttctttacgtagaagggtgagggcaacaaagaagcgaagggtttgaatgggtcttagcaaattaacatttactagaaataaaaaaataaaaacgttaatggactccaaatttggcggtggtaaaaaatcagatatgaaccagcgcattgacaaataaacgtgatttattaatcatgctctggtttgaaaaggaagtaattaatatcaatttccttattctttaaattatgcatataacaaaaataatttcaatgcaaccattatgaattgggattacatgattgaaaatcattcactctatacacactcctaaccccaaatcaataaaacctctagtcttagtgttttgactttagccgctcataaatatctgagaatgatgatatatatatatgcgtttttattttaaactttttgtttggtatttaagaaggaattgtcccggcttaacatttctatctatgactagatattaacccgcggtataccgcgagcctatatttttattaaataaaaaataattgaataatttttaggatgatttaataaatttatgctattgtttgatttaaatgtataattcaccgcgagacgaaattttataactcaaattttaaagttttaagttgtatttgtttattttgttaaatgtttaatattgtataattgtattttgattgttgtttctcggatttcacccgtagtacaccatcccatattaatatcgaatcaaacccgtcaattctagaatttcacccgtggtagtatttaattgtataattatattttaattgtcatcgtaggatttcactcctaattctatcgcaaattattatcaacccaaaccagtcaattctaaaatatcacccgtagtacaccatcccatattaatatcgaatcaagcccgtcaattctaggatttcacccgtggtagtatttaattgtataattatattttaattgtcattgtaggatttcactcataattctatcgcaaattattatcaacccaaaccagtcaattctaaaatatcacatgtagtacaccatcccatattaatatcgattcaaactcgtcaattataggatttcacttgtggtagtattttattgtataattatattttgattgtcattctaagatttaactcctagttctatcgtaaattcttatcaacccaaacagtcaattataaaatttcacccgtagtataaagtttaaatatttataatgtttaaatttcttataaaagaatcaaaatgtgttttaaaaaaattaaagttttaagtttttttttttaatattgttaattttgtttagtgtttaagattatataattatattatgattgttattatatgtttttttccatagcatactatcccatgttattatccactcaaacctgtcacaccatataaccccgtcccgtgaaattaaacacaaatttgtcattttattataaatttcaaatatttataaaattagaaacttcaaaaaagattaatattgacccaaacttcatcattgaattttgagtgttatatctaagatttctctcgcagtatatcgtcccgtattaatatcttttatattgtttaaatttcttgtaatatttaatttataattttttaaactttttaaagtttcaattttttaaaataaataaccctagtaaacaaactattttaattttggacacctcataaatcaagtttcatgctcattcgtaatcgaaatcattttggtcttttttatagtatggctcttgaccattgtccaatttttttaagcgatatgggacattctaaaatcgtaattattatccacccaaacccgtcctaccatataacccagtcccgtgaaattaaacataattttgtcattttcttataaatttcaatattataaaatttgaaacttaaaaaaatacaatatcgacccaaaattcatcattgaattttgattgttatatttaagatttttcctgtaatatatcatctcgtattaatatattttttatatatttataatgtttaaatttcttgtaaaattcaatttataatttttaaaactttataagttttaaaattataaatatttaaagcattttttaaagataaactttataaaaagtttttaaaattataatatttaacttttgataaagttataatatttataatttcttgaaacattttaaagtttcaattctttaaaataaaaaaatccgagtaaaatcggataactattttaattttggacgcctgataaatcaaggttcctgctcattcgtaatcagaatcattttggtccttttataatatgggtctgaatcattgtccaatttttctaagcgatgtgggacattgtacacatattatttcttcataggttgaataatatatgtccgttttaaaaaatttgaattacatcatattcagaaaaaaattaatattttattaattatatatattttatataaattcaaaataaataaagtataagatcaaataaaattgaaagaagaattatatatttatgtttaaattaggtagaaatattttaggaaattagttaaggtaaataagaaatattgttagtttagagatattgtttatattaaatttggtaattaaatcattaattttcgtttttaattattagtttttaggtaacttttccaaaaattaatgttatccaatatcagaacagaattaaacatgttatccaggatccgaacagagttaaaccgggtaaaacccacccatttgaattaattgttgaattatggctcaaatcttcaacattatcttcaaaaatcccctccaaaaatgtatatataactgtcgtgaattgtttctttcccaaaggactctgtgttgttgcctttaggttttatgctgttttagggattatagcttttatattcctttgagggtaacgttttatttttgtgaaactttagaggttggtttcatcaaaatctgattttccatttccatgcctatcattaataatcgtaacgccattaaacggtcccgtacgacgatcataatcagatatacgagatacgaagattggtaaagaaacagagtagatgcgctaatcacagaaaagaagccactaccttcaaattcactaattgtgagagacgatttaaatcaacaggatcagagagaacaaaatatttggtaagatttgtttcgtggtctttgtatacagtagttacaaaaaggagagggacaaaacgctgcgtttccaaagactagatttcttgggacgtggtggtctgaaagcatagttgacgccaaacatctctgtggaagtcaacttcatgtccacgaacccattgagcttaccaacgagggaggcgctctctcggacatgacccatgtctttgtaatccgaccagagacgacgcgccagctggacccgtctgtgattcgtgttgagcccaatgccccatctcaagaacaagttctctctctcttctttcgacagtttcctctgcatcagcttgctcagcttatacctctccctcgtcaatgccctcgtgctgcttgtttttatatatattacattactttagtgtcttactaaaccaaaaattaacgaggtaacaaaaaaagatacaatgtgactttaccaggagattagggtcatattgttgccatcgttgctattttgggcgaaagattctctgatgtacttaagtctacggagctctacctccaagtacaagcaatctttctgatctcctctgaacagaaggaagaagtagcttctgtgtgccattgagactttacacacgtgccatagctctattatctccctctgtagcctcttgaactccactggccaattcaaggccgtgtctaagtagtcttgtattgggtccattgctgcgtccttgaaactcttcgttgaattcgaggccaagaacttctgttccctttcctccatctgcccacacatgtcagatcaatcacacatactaattaggtgatttatcgaaagcaagtaaagcaaaactaaccgatcgatgaatgatttgcttgtctttttgagcagcagtctcctctgttctgtcctggcttattgaagctctaccacttgtctggagctcaaacacagaagcatcagatggccgaaatggtgattcatttggcgacatttcgttgctgacaccatgtgaagcagcatccaccgtttgagtgtcactcaagcttctctcgaaccaagttgttggcatgctcctcccactaaactcatcctgcaacaatctctggttcttgatgtcgcacattgtcaagtttctctcagctgttttgataaattctttgtcgtaccagcttggcggtgtatcagcatctttctctaaccaagaggaggaagggctcgataataagcttggtcggcagcttcgacttctagtcagcttcattcctctgaaaagttgtgaatctctctccataatccaagagaaaggcttttcaggagagggagtgataagggctggaggtgttgagattctactcaggttagacatgcttgtatcaaactcatcaggtgaacattccaaatcacacaatgcaggattttttgtgaggttgctttcttgttttggttcaggagaagcaccactgacttcctttactctttcttcttcttcttcttcttcgttttcagcttctgtgggatgttgtaagttctttgtctctgtcacacatactgcttcttctgtcggatgttgtaagttctttggctctgtcacagatactggttcttctgcagttacagcctcgtatttgtctggactgctctccggcatattttccactggacctatactaatatctgacttctctgtttctatgcaccgaacttccctgcagttatcctcagaatttccgtcagtgtgttcagccatttcataaaaccgttcctcctgaacatgaggttcttctatagcttcctctttgtgaacatgagattggtctacagtatctgtcacgtgaatatcatcaagtggaaccttaaggaaaggagttacaaacgcaagctgttgcggactacttgatgcagaatctatcctgaaatctgatagctgaaagacattctcttcataactatattcagttgatcgtggagatatactggaacggtgagctgatatagggctcagtggtgttgtattctcagagtcccatgtcctgcgcacccgcagcttggggtattgatgttccatcagaacctggacaaaagcgaatcaataagcagtaaaaggatatatatatccacgctcagtaaaattaacaagtgaatataacatacatttaacccttctgtttctgttgatagcgtctctttttcttggtttttttcttcttcaaccattcgtcgaagatccttaatctcggaacgagcttgctctagttgttgtgctagttggaatacctctttcttaagctgtaggaaaaaggatagatcataactcaaacctccaaactatagatcacttggattgggagcaataaaaaacgataaacgcaaggaaaaggtaagtgtagctgcaataccaaggaagatgattgctataatagtgaattcatggtactacctattttctaagatttcaaaagggtgattggagtacatccagctaccttttcaacctcaaggtctttctccgtcagtaatgcagttgtgtcagaaacaattgaagcctgactagggcttctcaactcactttccagtttagccaactccctctgcaagtgctttactaaagctttatcagacatgacaacattgacttgtgcatttgttgtcacctcctttgcgcagcttgcaaataacagtgtgtttcttgattgttcaacatggattctcgcaggactcatagtgcaaattatggcagttcttgcatttcctcccaaagaagactgaagtatgcgtgtcagttttgaatctctgaatggaatgtgcccagttttttctttactgcatgaagtaaaccacataagcaagttactaagctattgaatcgtaaaaaagagagccttattcataggaactgatcaaaggtaaaaagaagaacaatacagcaaactaacataaacaaggtaaaaaggtgataacagatgtatgtaagccacgtttgagccagagaagttgattttcaagacagaaagtggctgctcaacaatattaatagaccaggaaatttactttcaagctcaaagaacaggtattaatctaaggtggcacaaaaaaagaaaactttgaggaagctaagtgcttacaagcttaccttagcttacggatcacagttcccagtgttaacaaacttcggtttatatgacaaccttcttttaaccttgtgccggctgataatgattgagacgcacgttcacttccagcaagatcaatgaagttctgcacgacaattatttactcaatggatccccttcaactgatattttagcagattatttgatgggaggttcaaagatatgtaccactgtcgctgttagagtactaaacttatcattggtagaaaattcacgagctatgctttctactgtctgtaagaaggtaagagtgcaaagatataagttttaaaacatgatgaagaaggcagtgttgaaccatatatagaaatcaacaagatgccttaccaatctcaaaatctgatgagaccgggagctaacttcatttagagctgtctcaccaatttgcctttgtgctgcaaatggttaaaacacttgtcaatgttgttgcaaaacatcactagtataccattattgattatctatacctttgcagacagataggagctccttgaaatgattccagtctcgcagagtttcctctgtgagtttctcaacaactgtccctttctgtcaaaaagaaaaagcccagcatgagaaattgcaaaaagatcagttctacaaaataaaagaaagtatcatatttacctcagggtcatctaaaagtctgagtggactagtatctgtacttaagagatctcttacagactcattgtagatctccatagcagagaacttaagaatgaattctctttccttgtgctgcagaaagcaaatacacaactacataatgggctcggaagtaaagtagtaagatataaggataatgtttgctttctttaccttgtcaatgtagccatatatatcaaccaaggcgcagtcagtaattccgctcatagtgtacgtctttccactgcttgtttgcccatatgcgaatacactagctgaaaacaatgcatttgaattatatatgcaagacaaggggagagaaagagtagtaacgcagagggaaggatgacaaaccattaacgccactgacaacagagaaagcgacttcctttgccccttgttcatacacctgccttgtacaacactcagggctaaacactctgtctagaggcagagaaaaatctcagtaagatagaaagaaggatgagctatgttgcagaaagggtacaaacaaacaaagacgaatgtctcttaccaaatgtgtaagcagaaggatacatggaacgctcggagatagaaagatgactcctgtaaatgatggtagtattgttgatgcactcccagtcagggacatcattcctaaacttttccttgtcgtttaaaggtcgcatacgaacagaaacatagatcttttcctgggtgccgcttggtcctagcatctgatcatcatcttctgtagtcatcttctaccctacctctaccacaaaggaaacaatgacaacaacattatatatatatagagagagagatagaggcaaagtctgtaatatgagagacaaacacgaataattgtaatcaacaagtcaatgattgcagctggaaagtccagtcaaattccaaagcaaagtcagaaaaccaagattccttagtcatagaagtgtctgagatagagacaaacacaagctcaaataataaaaaaagatataaggaggagaggaattggagttatatggagataattggtcccctataagagcagtctgtcaaagtgttgttacataaattacaattgcctaattaagaggctataaatattataattgcatttgctagaaaacaaaacaaaaactaatgaatgaaatgaataattaccttagaagaagaagaagaagaggggaggacttaagaagatgatatatcacagcctcttctgtagaaagttcgatctggctctctcaaggaatcacatgtgcagtgaattattcgtccttgtttcaaagacacctacctacctgcttccaaacaacaacaatccaaattacatttagccccttaataaaaaacagaatcatctggaaattgtgacatgcatttgctatagcatgaacctctaagcttgggtgaggagaggaggatagccgataatcatttataaaaaagggacaatgactcacaatggaccttcaaattcgacgattacacatccggaagcgtaaaattagccggcattcaaacaaatttcatacctcagaggacgtgcgtagctccggatgccctataaagtataaaccccaagaaggagatccaggggaagcgacgaatttctcctagtatctctctctctcttcgtggacaaatcagcctttcaataatcggaaatgcacaacagctcttgtaatcgttgttaatggcgttttctgcaccgtcatcgttgtgagatttttgcaatctggcaaaatcctccttccctctgctctctcattccatttattattattagccttctccgacttggaaactgccgcgctaaagaaagctcatattatttattttgtacctacctgccattaactaggcatctttcaacctttttacccctatctgccattaactaggcatctttcaacctttcgctgtatctgtttaatacattcccaaactttttccaaccaaatatttttgtttttccaaaacatttacctcagattaattagctcatcgttttcctgtaccgactcattggcaatttacatcatttctacttgacctaatcacctatcgatgatcttagtagcacatcacaatcacaatgaaacttgtaatatgcttttgcaagcaatatgattcattcttgattcttctaccaactaacattacttttcctttcatttatctatcgttaaggatttatagccttataattaatactaataatttcttacaaaaaattatacacacaaatttaaaaagaaaaacagaaaacacacagcacatgggtgttccgtttttgtgcctttaaataatgctatatcgctgaggcaatgcatgtgcacttctcttttacttacttacaccctaagtacatttacataaagaagagctttgatgcccactttaacatttgcattataatgtaacaatgacgggtttcatttttccaaactagtttaagaaagttacttgaatttttttttttttaatgcctcgttgttttatcaattgttttgacaaaaagagtctaaaccagggtaattcaagttaggatttattggatacagatgttggttcatgcatgaatactaatctatatcgtggtcggtagttgaagtattgaagagacttgtgttttttgtatcgtttaatattgaaagcaatgcaataatttgtattatttattaattacatgatgggtattctttttaaaaaagaaaaaatcgttctataattccgtgacagtgtacactatatacactacaaaattaacgtcaaagtggatctttgggagatatagacatgtaataaattagagggccatgcacatgatgtggatgtggacaaaacctaacagtctctcaattatgagatgtcacatgatgatgcggacaagtcaacgcttctacttccttttactctctttttttttctaccttagggcctcgtcacaaatgggtcggctcttctcattaaagcccatattttaataattaagcccacaagataggccttagtacaccgacagatcacagatgagacccagccactcggtcctttttctataaacgaaattagagaatcgcaaaacacacatcccaaaagagtcaaaacaaacggaagaaatagtgtgccgttcaaagagggaaaatggcacaaaatggtaagtccatggaacgaatttgtgaatcaaaagaaagtagaaaagtaacggagttatttttgttggcttttttttaccctgccatttacagcaacaacgttgagccgttccagaaaaacacagttggcctacagaagcacctcctcccattattgatagttccgttgatgggttagtgctaaggcccattatggtgtgccaacgaaagtaagccgttgggaatgaaaaagccgaaaacacgttgacgtcgtacgattcttctaaagtcaacaagttaggcgagttcggtacactggcttgtctctactccattttttctccttagtataaaagaactcaaccagaataacaaagataccaccttaaaaaaaaaaaaaaaacttttagaaaataatgtgctaatgttcatttaaacagtgaactgatttctaaatatcatagttaagtacttaatatgactacatgattccattttgaaagttgataccattatctattagactattactgttcatttgaatttgacagatactgtttcaatatcgatgacttttcttattattccagtttacatctgtaataaataaggtgtgtctcatatactggtgaaaaatgtaggtcacacataaaccaaacaatttgattctaactacatatattaaataccgtgtttgtccaaccctaatctagatatatacgttgttaactcgaaatcacatgttaaattcatgtgacttgtacagtcacttgaaaatacacattggcaatcacatatataatcctttctaagtgtcgtatcatacacagataaattcatacaaaacaaaaaaaaatgaataagaatttgtattttgtataactaaatatataaggtttgatgttttacacatagtttgttttttttttaaagcttcttcttataatatatagtaaattaaattagtctttctccatcgctagtttccaaatttaagactcggtacttttctccgaaagagttggaacgtgaatgaactcacgaacgatgtggaagtcacgtgactctcgtcctaacatccaaaaatcaaaataaagaaaatcttaacgggtgaacggaacctactttaaaatgtatgcgttcaaataacttctccaaaatgtaagggttgagtgtagtaattctaatagacggatcgtaaaatgaacgaagataaataatgtgacgataagaatgttgctccctcacatgtcttgttggccctcactgacctccctaatgtgggcacacacctcaaaattaaacttccatgaaactaactttttcttatccattgcaaacaaattttcagactttaaaacaacggaaacaaatacatagcttaatattgaaactctgtatgtgtcgtctaagtttgccttttttgtttgtgatcttttaacaatgacaatttggaccgtaatgaaattgtatgagtctcaagtagtcttttactaatattttatataaatgccaaatgaaatggttaagcaaatttaagagacttcggggtaagggaaagtggttggatggagcgggtaggctatgctaatcacgtgactcccaagctttccatttcaatcttcaccatttttaattccacttttccaaataaatctatacgactatatccttttgatttcctctcgttgaaatttttagttgttaccaataggtttgttaactttttttgttactcttatttcctgcttaaggtttttactttttagtctatgaattgtttggaaatcaataccaaagcaatttaatagtagtataataataagaaagtagcatccaaatctttcaattctgtcccaaaaaaggattgagctatatttgattacaaatctgtaccttttcttttacagcaacaagtctgtctgactgaaagaactcgattaagtcttataatttgtcaacattaatttattccatatttctgtttataaaatccccttaagtcttcaatagatttggtatatttgtattcagtttttttttttttttgctagccagtttttggttaataatttgtggagttcataaaagttgcacttaaaatccaaatttactgttattagtttttgaatttcgagtttagagtcttatacattacacacgagctatggcacctcgtgctaatcccaaccaacagtcaacgagtacattctacatataacaaatgcataaaagcatccaatccgttttttcgattatttaatgagtacaattctcaatctaggttgtaacaatttcgtagaaacaataattatcatctgacactgtcggtgatttctcaataaatataaggttatccatgtataagacagttctatgatttatgatttcatgttaatggaactatactactaattaactgacgaatagtaactttattatattgcctttcatgaaacaaatacaattgacgataccgcattgactacgaggttttgttcttggagtgttaaagcaattaattaatcttacaaatacaagagaattgaagtgtcaataatgagtttgactaataaaacaaaaagatttattttctttgacttcagaaaacatgaagaggtttgatttatctactaaaaatcgtcgaaactgaaaattcatttacgaaattgatgttaccgagtcaatgttaagttatagtcaaccattttggccgtcaaagaaggcctcttcctcaattagtcgcgtatgttttaagcaaaaaacgattattactaatttactataactatgaaattaaaaataaacttataccattttgggtttgacgctagtcaataagcaaaattaaatgattagagggtgaatttaacgattccatttattttcttccatctgtatagacctaaagaaatacgttaaaccaatatatacacatagatataaattttttttgatcaaaacacatagataaaaaacttgttttggttacagaaagtttcaaaagttattttaggtttcagttcaaaaattctagactatagaaaaaacttaagaaagagacaaggccacatgtcgcgtgaccatgaaacaaaacatattggtgtcacttttagtttggtccattcattaatgcgatggtttgtagcgttcctaaaatcaaagctataaaccaattcgaacggtttcaaattaactccatatttcccattatgtaacgtatctatatgtaaacaaactttaagctataacgcagaactttgaaatggggaaatttaaactgaaaaaattaacgcgaaagagtacaatacaaacgagtttttgacctaatcagttactaagaacttacggatactcctagcatgaaaaatcaaactactgtaacaaaaaaaaagtaaatgctaaaaataatgaaagtaatatacaaagaaacaagtcaatgagaaactaacttggggctaacaactgaaccggttcggatcctaaatctctgctctaattaaggccctatttcttcaaaaacttggtacagcttgtggggactgaaccagctggtttaaaccggtttcgttgtcactggttggctccttcttccgcctcatctctatgactttccggtggtggttcgagtgcagctcactcgagaatgtcgggctacaagcgggtctgtattccggtagcaacctacccgacttgtaccggacaccgcacgcattgcacagggtcttggctcccattggcccggctctccactgcggagttttctgaacgccgcagtggctgcactttcgctgaggttgcagctgctgcagctcaccggagaaaacagactcggctgaccttttcttatgcttcttgggaaacggtggcctctctgacgtgaccacaggctcgagcagctcagcgccggagaaccacgggctggaaggacccgaagaggaggaggaggtcgaaccggacgaggaaggacccgaggaggacgacgaaccaagcgaccagaccttgaggccattgcggttacgtttgctacgggctttagccggaacaggggatttgaaacaggtctcttccgtgactgcagtcacaggatgtttccggtcacccgttaaccacgccggtttctcagtcggggttccggtgaggtttggacccgaatattccgtgaaggagtcctccacgaaatgagagagccactcaaggttcgctaaatcatccgccttcaccaaaaagaaacaaaaatcagatacaaattcgtgggaaaaagaatcaaaactttaatccaatggtttatctaattaccggaagagagagttcgcttgtagggagagaaccaaagtcgtcacagccggagaaatcgctgctccggcgaagagcgtctccgtcgtcgttgggttcctcagaggaaacacggaccatctcatgttgagccttgaggtcagtttcttcgtcggcaaaaacgtcatcgtttgacaagtcaagcaagtcgtctacagagaaatcgtcgacggaaaagccattttgagcggtggtgacggcaagaaactcttcgtaaaccggagaagtcgttttgagagccatctctttcctgacgctgctcttcaacgcggcttgttccattttcctatcgagaaaaaaactaaacaacaaccagaaaaaaaatgaaaaaaagaattcaatacttatgtccaatttattcacattctttttcaaacgaaacgtaaaaaaaaacgttcctctttttcgcaattccaagagagagagaaggaataaaaaaaatcacgaaccccaaaaaaaaaagacgaccggggaaactcaattacgaaaacgacccacaaacagagtcagtcacgagactgaaatgaaaacgcaacgaacgaagcaaattcaaaagaacatgaaaagagacatacgaaacccttaaaagaaaaccctaaaattggacaggaattaggaaaaagtacctgatacagagagaaggagggaggaaggagcggtggcgagaagaagaagaagaagaagaagaagaaagagattaaagattaaagaaaagggtcaagaagagatggttatgtgagtttggtaaagcattcaatttggtaatctcagcctctcccttggctactaaaaactcctctttttcttatctctagaagaaacgctttttactctctctctttctttcttttaaaacataaaaaagggcaaccaaaaaaaaagtgttttttttttaagataggaaataactgacaataaatctataaattttatgtatcagtagaaaaaaacggcactgttcaattacagagataaaataagatcttcatcagtcatcatcagagtatttctttcctaaagcttcgaattaaaatcatattcactcgttttcttttatttttcaaagatttggttttaaaaataaaaataaaaagttacgtgtctttcctaatttgcccttgaccgcattggtagccgctcatcttgggaaattaatacttcccgctcattggtttttgatttcacatctttaagttaaaacgctttatttagaataaaaaagttaaatgtccccaacactaaagtatttttattgtaagcagcactaagcagtgtgaatttggattaaggtgaaataacgaaaataaccctaaagagtaataatggagaaaagcatgtcttcggagtaaaggcaaagtgaggaactgagatgatgcagaaaccgaagacaaatggcgggccagcttttgtccttctaacacaccacgagaaaatgattctccctcactcacattatccttcaaacctttcaaattaaaaaacattattcttcattttacaaaataaaataaaaaatatccattcagacaaaatagataaaagaaaaatatctttggagattctcttttcttctttctacaaatttctgccttattattcaaattgtgtagattctcttctaatcttttggtaactattagttgagttggtggataaaattttattagttagcattatccaattcggagtaaatattactattgcttagcctttaattttaattgtttgtttggttgaacaatagttttggcattttgcatttatttgtatcatatacagaatctgcatgttgtttaaaactgttgaattttagagcaatggaaatctcccccctatatttggaaaatgcgtgatgattatgacttccaaacaaaggcatcgttgtaattatacatcaaaatgaattggctatactttatttccaaaatgtgcatacaaatatttttaaacatttttgtctcaatcttaaaggattaaaatgcaatcctaggaaagttttaaatttaggtgagataaaaaaaaaaaaaaaaaaaaagtggaaaaggtcttcggagccgagccgccggcttgagaagtagtagccacgtgtaatgctgacgtgccgtgctctgtttggctgtatctcatgcatttgacgtgagtcgaccaatcagaattccccgacggctaatccattgatgttttgttttcacaattatttagggtggaaaatcatcacactcttgcctaaattaaaacacgtatattcataaatcactctaattctgtcaatgaaatggataatctgagaagataaatattttgtaacaatgctaaatattaaatgacaaaactagcctcgacgtatccgtcggcaaagctgcgtttcttgatatggggtctttatgtttgttgtactttttttttcttttaaattttgaaatgtcaaattaagaagaagaagaagaagaagaagaatagtaagagaagctatgacagagagtgtgagagagaggagctaaaaagtcccacgagaattgttagccacttttgaatcttccatctcccatttttttctatggaatggatcgtaccaccaatgatatgaatttgttcattaaaaatagagaaaaaacaaaattgacagcgatttgttaatgtaaataagaaacacttgtttggttttatgcattaagacatagaaagcaaaggagacaacatatcaaattcgaaaccttggagcgggaaaatgaaaatcattcaattttgtcacatactgaccgtggtagactattcaaactatctcaccttcttgcattacgattttttttttcaaatataaaagaaaagcaaattttatttgtcttttgtatatgaaacgagtttgaggaatcaaaactatctaaaaagacgtaccgaaagtgaaaactaagaatatactgtatgagacattagaggaggttgtcatctactcatagtgttgacttttgatgaaacccaaatgaatgaatgaatggtggcgccatttcctttatgaaggaacaccccttttgttttgtcattttctatttgtacagcctaattgttaggttgttttcattttgaagacgggcctacgagatcactttcatttgtttatcgtatcatatgggctctataaatatgacccaacatgtaaagcccaagcaatctgcatatagaattctcatagctcgatattgttggttatgagattgttctgttcatatgacctaatcatcaactgggccaccagcctacaaaatgggcccaaatcatattcatggtcgcacgtgctgaccatagcacatcccgtgtatcttatccatttttgttacacaaacccatttgtcattagttaataacaagatcgtctagttggctagttgctgtctctccaaacggcaattttattaaattaatcacaatttaaccgatgcaattatcgggttaagcaattgccggaaaaactcgaccggaccggatactaacaaggaaagagaagattacgggacgacgcggctaaactttctacattccttcggagatctctgttcttgtccttggcagaagaataacgtcgccggacaccatgagaagcagtttccggcgagctgcacgttcgctgatccaggctttaacgccatcaaaggacccggtacgactccgaataagaaatttccgcctagtaaaagtctctgaaacccggcgaattcggatccgggcgatacggttttccagacgtactgggtcggaatcataccaaagaacttgttgttctctaacgacaatgctgagagctttggtgatagacccatgaacagaggtaacgcaccgaggatctgattgttgctgagatctacggatatgagctcgctggggagacccaagggagaatagtagggtgactctaaagaggtgaagccattgaaggagagtgttagctgctgtagagactgatgagtgaagataaacgatgggattgagccactgagtttgttgtggctaagatcgattacttcgagagaatttagaagtttgaagctttcagggatcgttccttggaagaggttgtttcgcattgagatttggactatagattcgggtaaaaatgatgggatccgaccggagatgcggttatcgctcgcgtcgaggtaatacaggtttttgagtgagctcagatcagggaattcgccggagatgttgtttagctggatttccagtcgtttcaggctggaaaggccattgaagctcgccggaatggagccgtagaggcggttgctgtctagcacgagctcctcaagaaccgtcattgacccgactgaatcgggtatggatccggaaaaggagtttccggacacagtgaggcgggtgagacgggtgagattggagagcgagtcgggaagtggaccggagaagtagttgccggagagatcgagggtctggagataaggaaggttgaaagagacggaggagagggagcctgagtaaccggcttggtccagactgagctccgtgacccgacccgatccggtaacgacggagtcgcagcggaacccacaagtgaatgtgtcgctgaatatattgtcgcagggatcgacggagaaatcccaagaactcaggcaagagcctggactcatggatttggcatccactgagttcttgaagtctttgagagctgccacgtcaccccagaaagtcttggactctgctgaagataaagtgagcaaaagaagaagaacaagggaaataagtgaagccattacaaaagagagatggttagctctgctgagagatgtttggaagaagaagaagcagagtgggtttggagtgaataatgaccgttggatgagagggtcaaggcgtgtgatagatctacagaaagttgctctgaaacttgaaagacagaggaatttatatatagagagattgagatattaaaatagatagtgtaaatttatatcatgtgtgtcattgtccatcagacatatgcgtgaagacaacaacatctgtacagtgaggtgtggttggccctatccccatccaccataactcagaggttatgagttttagattctgttgagattccaaagcagaacaactcttgatttaggattatttgacatattaccaattcacatgtcataaattgactaataaactttacaatttatttcattttctcccatatgtgacgtacccatttgaccagaagttgtcaaaatctaaactagtcttggttgatgacatagatagaagaagtaattatagccttacaggaagcaaggttgatgggttaatgaatgtgcagctgttgcaagcaaaggttccaaatcattggctctaactaactttaaatctatggaagacgacgaaaatgttcatatatgataggatcactcattagcgttaggtgtctaaaactctaaacctaagccatgtgggacactaaatcatcctaacgggtcactaagactatgcagagattggtaaaacaaaaggtactaacataatctattggcaccatctgaatttgttgtcgtccttgcttttcgtcggtatgttgttcttaacgaataattgtctcactgtttctttgttaatcttgaactcaaagaccatccctataatagttagaaagatgcacaattacaaagcagaaactagtgcttacatcgatcacgatactctcttctctgaccttctattttcctctaagctgtgatttatgcttatccagattactattgaaatcgtcgacgaagtgcgtttgttgcccaatgccatctttccagtctccggaagaagagataatggagaaagacaaacaggggagagaagagtggatcaggaacagagtcgaatgtatccaaagttagttatgtgatttgctcgtgagtctcatggagagagaaaaacagaggcccatacctctagggcttagtagttttgttttacccagcaacagcatggcttagttttgggctacttcattatttggtcactgaggactacagtgtcgtcttctctttatgcagcgagcctgcgacactcaaattaaaaattcggtttggaaagcttgatgctgtggacctgaggcttctgttttgtccccttgaaatgcaatgatggaattgcaaattgtccctcagacgtgttactctcttattggttcacagtgaaatttcctaaggccccacttgcgttcggagtttaaagttgctgcttttatcaccatccgacatccgtcttcaagatcctttctacgtgcaacaacatcaaactcttgagtcttgcttgaccaagaaaataaaaagcaacttaggttttccaaaagagaaatttcgaagacatggtgcgagtagtacggaggaaataatcggggacaaatcagcataagcaaggtgggattagctgtttaaggtttaatgggaccaattcaattatagaatgatataaatgtaaatcacaaaatgcatgatttgtgtgcatcttttttacaagtcttcacaactccatgcaacacttaattaaattttaatcctaatgagttattataatgttagctcgttttccgattctttttgcatctcgttatcatcatggctttcttgaggtgacgtaaattgaataatgaaaaagagagcctaagaaatgaattgggaaagaagagtttttttaggtccaaacataaacacctgcagaaataaagatgcataccaattttacacctttttctgttcccccactcactcataatctgccgaatttacagcctcactcgttgtaacaaaagaatcaaaatacacatacagtctcactgcttgtcagattttggggattgcatttgagatttgtatagtaaagccccttcagatgtggctaaaaaatacaccgtaacgtacgatgtgaaaactatgtaagatagaaatatggagaaactggctatcaggatatatatatataaaaaataatgtaaagagtcggatgtggcagtaagtctctcttcaaatgtaagtgtactgacattatatcaatcataggaatgagagcatcactttaaaaacggctcaaactgaataaaacttaagattagggtatggcatattgccggatatatagtagtcgtagacgaacgatatacctgtgctagtgtgtctgatttgttgaccaaaagcacaagacacctaaatacatgtcttcacccaaatttcaattttgtaaccttgtttttcacattaatatttctacaggcaaatcataattgcaattaattgacctaaagtagtaatttgaaaggtaaattaatgttaaagtaaacctaaaaaaagagtaatgtgaaaagctgacaataaaacaaggctgagtttaacgatcacagttgaaaactgccagctgcaaatcttgcttttgatgtgagctttcacagagacagggtcgttgacttttgtaacagttgaaaattggagtatactattacattaacattatacctacaaaatttgaacttaataataaaagatcaggtaacaattgttttaatagaacattatctcccttagttaattacttttgaaaaccaagattagtacgttataatcttcacctccgaagatgttttaaaaccctaattctaccgtaagaatctaaaaaaaagttatgatttgttgtactctctctgtgtggaattcaagatcttgagttggagaagaagtgcgtaccagtcatgaaagtgttaatgggagtaggataattaagtgaggcaggatcgatataatgatctgaagtggagccaacgactccattgttgcagctcacgtttgggcttgatgatgaggccgatgggcctgcggttatgagattcaacggctgagatccaccgcccgaggagcttctctcggccgggccttgatcgtagagaacacctttgaagacgtgaccgcctatactcacagctgttttatatgcatactcttcttcttcatcatctacggaactcacacgcacgcaccgaaaaactgccgacgagctaacttccggcggaaaattcccaacctccaaccctagatagaaaacatttaattaattattgttaattataagaaaaaatcgtaggagtattttcaacgtatgatttgtttgtttgtttttatcttaactcaaattaataattacagcattaacaaacaaataaacaaaaacttaataattacaggatataaacacaaatatcaagatcagtgagaacagtttcttcctgtcattccaagagtcagtcttactgatctacagtatttccatattaaaaaaaaaaaataggaagaagaaaatcgttcaccttttttttttcttgaaaatgaaaaaagaagaacaaaaaaagctgatcaaaatagggtttctgtttctgcaattgaaactaataactcaagttattcaaagctcattactttaattttcattcaggggtgaataaccataaagagatattatgaaatacctgaagtgttgttagaaggtatacgagtgtaggccatggaagtcgatctcgccgggatacgctctctctgtcgtttagggacgctccctcccagttgctgcggttgctgaccggtagaaagctgctgctggcgttctcggcgtttagcggcaggaacccacgtgctcttcacgtgagtgggacagtcaaggccacggctcttgcagcaagtcctacatctcatgtgagagcagtctttcttagattgattcccacaatcctggcagcttggtccgccgctaccgctaccgcttctcatcatcatcaacgcaccgccggaagtttcaattaagctccggttgctcggtccaacacctaaacccgcagcggaagtgtaaagatccagcctttgttgctgttgctgctgctgctggaaaatgatttcttgattgtttgggtgttgccatagctcaagggttcctttgtaagaaggaccagcttctccaccgtcagcgttagagttagggtttctgcaccaaagccaagattctgttcccgatgaagaaggattattagtgtttgttctgtggttgtctggagtgtttcctcctccgccgtgtcctaacgagaaaaatcctgccattttccgataccaccagccatatatgaccaatttcaagaagggctttgctttaccacatatttacttgcctagactaagatcttgactttcagagagtgaagatctatcaaaagattttaacagaagaagacaataaaagatctctctcttgatagagatctttaattatgagaggatgaagaagaagaagacgaaagagattaacttaatggaagaatgtagagtagtctatatctagggtttgtttagaaatcgaatagaggtttcttttagtactgagaaaaaagttggtttgtcggtatggagtgtatttaagaggggatagagagagagagagagatgtatctcagagaggtttctttctctgtctcgcgctctgcaacgccgccatcaccttaatactcttcctctcttattaaattctctgtctctcttttcttttttgtttgttttccagattttccttacaccaattaatatcacaaaacacttctcggacaagatatatcttaccgttgatcatcacgtgttttagatcctgcggtcaatatgttgccacgtttacaacttcggcttttactctctccgtcttttctctaccggaaaacacgctgcctcttcctttgtttgtctgtttgtgtttgccaaaatgctactataattaaatcctacactatttgtttatatgatttacgtttagatattaatctgtgtattatttgttcgaacgatattttagtgaaatgaacggaagatttctttatttatgagaaatctatagttatgtaatatctaaactaaaactttataatcatatatcgtcctacacaacgttggggactgggtatacttgtatttttagattctttagttagattcgatgcaattttaattattattagcgaaatcttgctttggttgcgtagtgtatacctgtgactttaaaattaagtgcctaaagttcgcagctggaaaacagttgcttatccatgtttccaaggaagcaaattactactctgttatttttatcattatatatacaaactttaataatgaacacctgatagtattaaaatatttaattatgtatacaatacatacactgatgtatatcaattgtcccgtatacctataccccatgaatcttaatttaattgaccaattaatcattccaaattttaacgaatttcagttgtttcagaatatcaaactacagacaaagtaaaaaactgaagatagttcatggatttttccaaaaggatatggagagttgactaataagaagaggggcactatagtcatttcctagtggaaatacccactgttgtgtaaaagagagaatacatttaatgaaagtgaggttgtaaaaaatacatgtatttatgaaatggatgaaagttattgttgacataaacaatcagcaaaatcatctatccaacctcttcaccgtattgtaaacaatgttaatgtgtatctatgaaatagagtataaaagacaactttaaatttgatctagaagctgtaaatttcagaaatcaatttggatgttttaatggttttcttgttatgacaatcttaatgtatgtgagggtttgtactttgttgaatgcaaaaattatgagtgactgaaatagaggagaagaaaattggggatagagttcgatgaatatatgcaatcatttaggaccgagaaattaagagagggagtgggcaaaagggacagtgacattctctcggattttattcttgtatataactaaattacaaatccataaattccaaatgtattggtaacatcgattatctttgcaaatagcaacaaactcgcataatgaaagactcaccatgagccaaaactattaaatttcttttattttggagtttgaatcttgaaattagtacaaatagaatagtcttttttttccaaaagaaaaggtttaaagtatcttctcgagcactgtgttcttcttttctttaagttttcagtgtcataatttatacaaatttaggtaaagttactaacattttcttaactatttaaccttccatttcatgtcctagcaatttttctaaaaacgttgaaattgtttccactaccttttctgccaaatatctgcacttcaaacgcatctagtcatctaccattctacttgaccccggtaccatcttttggagatttagaatgtatgttatgcccattatcaataagaaaacatggaaatgtggaaagaactttataaactagagaataaagaaaagtaagtttggagcatagtgtttgttggcttctaaatatcacttgtacacaattacacattattaccaataaagagaaaatcacttcttaatatatatttttcttacataggcagaaagagaagagtgtttactacaaaagaagcacgcactgatttgtttttttcactttcacccattcattgctcttctacactcttttaaatctctccttttctcttcaactttgaaactgaaaaaggacataaaagatttggtgggttatgtttcttttctttggagccaataacggagcttagagattcttgcaacttttttcccccttgcatcctcctttactcaatagtaatttatgtgtattctgtatctcttcacaaaataataaacaaagactgtctttcaccacaaaatctcttgagaagctgcaaagttgggtaaaacttaaatgaaatgtacacttttttatatactacatatccgttttcagaaatagatttcataaactatgtgttccatatggatcccatttcaccttcaaaggccccctttacatttatgtatattaatgattatatgtttctcattgctcaagagaagattgcatcattgaataaaggaagaaagaaaaaacatagagagtgatttggttcatgtgggtcccaaggaagtggagtcatggttcctccaaatgccatgctcatgctcatgctcatgcacatgcagagacgcgtatagtctttctaagctgatatatcaactgagttattagatgcgacaaaatctacttatataatccactcgacttactttaacccaaaatttcactaaaacaaacgtgaatcacataacaaactcgcaaaactcaaccaaaacagttttgctgttgtatgttgaaaaatggcaagatataactaagttgatagatcgggtgctcatgggttattgaaaatcccccacactagaaacgaagggtggtatcaaagttatagtatagaggctgctgtaaaaaaagtggaccactatttttcacgcctaattttcttaattactctattattgttaattccgaagttacaaaccctaaattataaggctagcctttatatttatagcatgttcttctgaagctgatacagttttcaacacatgtatccatcataggagaaataaaaacaccaaaagaaactgaatcgaattgtgacgctttttcatgtgataatacacattattttgttttttgtgtgtgtttattttgcttaattttaacattttcatatgagtaccatagggaattaatcaagaaaagagtggtgtgtgactgaggtgatataatgtaaagtagagagtgttgacagatgtcatgataatgaaaaaatcaactgaaagatatatatgtttacacaataaatcaaaatttggatggaagggacaaaaggaagcatatataccgtccgatcatgtagaaaagagatagcaattacaccgacgagaatagtaacttggcaacgtcatgctttcttttcaagattatatgaattttcaaactttatgttcttccaaataattagacgacttcatggctctcacgttaccatttgagtacgtagtccactagcgtggtccaaaattctatatccatcattttttgttctttttcttttattttacaatcaatcaatctatggatgtacatataagtaaaagtctacgccaattggatgattaagaattaagataagcgtcgtgaagaaataaaaaataattgggccttgggctaaaggaatatttgagaagcatataaacaattggcccacaaggccacaaggatctccttcaaacgctcggaagtttccgctttggattcctgtcaccggcgatttcgtgggatgataacgacgccgagctatatttcgtgactgaagcaaagtgatgattcttcgattgaaagaccaaacgctcatcaaaatcaattcaactcgttcgtacttatcttccttagttttccgacgagattctcactcgcaggctcggacaaaacccgatcacgaccgccggagaagaggatacgagagggatgtgagaatcgaggagaagaaggaacacgatggattgtttctgtgcaagagcaaaggccaacaccttcttaccaacactagaatcctcgactccattgttcgaagctccgatatcaggccgactgatacagtcttggagatcggacctggcactggaaatctcacgatgaaacttcttgaagctgctcagaatgtcgtagccgtcgagctagataagcgtatggtggagattctacgcaaaagggtttctgaccatggttttgcagataaacttacggtaaatcctgctacttcattgagatgccgtcgataaattgagaattcatttaggtttggacatgtaagggccttattgttgttgctaggattggattagggaacgaaattatttgtttttgtggattagtttctaagcgcacacaacctgttcgataaaatgccgaagagaaataatagggaactacattcactaacgctctctctttttcacttattctcttgtggttggattctatagattattcaaaaagatgttctgaagacagattttcctcactttgatctcgtggttgcaaatattccttacaacatatcttcccctcttgtggcc

SEQ ID NO: 973 - DNA, 83511 bp, Arabidopsis thaliana
aagcttgtatacggctccaatacttttcgaagcgccacactcttgcttcaaaaggaattctcccgccggctcctggcaaatccaggagattccgatttcaatagattggcggtgaacgttaagttagtagctgatgttaaatttgtgatggatgtaagtaaaagagagtttgttccacctcctaaagttgattcatctgtaattaggattacaccaaaggagataataccggatgttaatgttcaagaatggttggcattcactcgcacgtgtttcgggaagaagaataagacgcttggttccatgtttaggcagaagaaaaaggtcatggaattgcagagtttgtctgcagggaggcatggctcgaatgttgaggttatgaatcagacaggtggtgattctgacagtgatgttgaagaagatgggaaagatgatttgttgtgtttggatacagatgcaagtatgttcaaggaaagggtaattgaaattctgagaacaaatgggttcgaagagaagagaccatccaagctttcacatcgtgagttgttacatttgctttctttgtttaaccaagctggaatttttttccatgatattacatcattacaaatggatctacacgaataatgataagttttctttaatgttttatgtttttggtcgaaccctttgaatttatttttcttacaaattggaagattacagtaaaagctacttaatgcagtaatttcggaagggaaataaaatcgtatttttgttcccttggcagctaaacaaaattgtatttaaattaggaatgtgagaaattcccgccatgataaaatcatgaagatattcagaaatgataatttctgctattcagaaatgaatccatgataacatctggagttaaaattaattagatactgtaaaatattttaaaatccatatctgccaccggcatcttacaaaaaaaggtgacaaaatctgagaaaatttcctcgattttcctctgctaatacaaaaaaaatagcagaaagaaaattcaaatggaaccaaaagaaagtgtttcgtcggatacaagcaataaaccctaaaacacaggttttgctcgatctcggctgaaaatcctaatactaaccgtagatactataacctggatatggatattggtgatggtaaggttgcatcgctagtgactgagaataataaggcggatgctggcgagagtaacaattatcactcggccaataactgttgtaagatggtggctggccgtaataggagtcggagttgtaatgaagattaggttcatgtggataatgatgctgatgatgatgatgatgtccaccggttttcacaaacgtcatttcagctgccttgccttttaccgaacccattagttttagtagtttatgtggatctcctaaacccgaaatgtatgctcttccttcgtccgcgtctaacaaaaaatcccctccttaatcacaagaaaaacccaatgtaagaattagattaacaaacataatcaaattgtaggataacaaaacctacctttgaccttctttagaatccttgtgatgctcttataccactcagaggagttggtgttcaccttaaacccacaagtctgcccaaaaaaacggttgaaatgtcatgtttagtcaagaattaacagatagaagaaacaagaaaatatgttttgtcacgagaaactgaaaaacaaaccagttgtgtagaacgattatttgatgaaaacatttctgataaatcttttggaacttgaggaagctagctagaaacaaggaaaatatgttaatactatataaagtattgcaaaatgatgatgctgtctcctagtttatataaacttttgattgaagcatttttaacggatccttaagaaatgtgtttttcaaaaaagtgtttcgaattaggaaatggtttcattaattttaaaatcctttcatccctgatatggcatactttaatacagatctttggtatggacaaagtgatcacagctgaagtaactatggataatgaaagttttaaagtatatctttagacaatattcaaaacgtaatacatgtaatctttttcatcttttttttttaacgtgtaatctttttatcagtgtaaacatattgtcaccaaacaaatataaaaatcgagatattgaaataatcttattagcattaatttcgttatatattaaaaatgattagcattaactatcatttatttctctacatgatcttgattttggaaacagatccttagctactactacactcggcgcctgatttcgcatatcttaccgatttatgggccattcgaaacttattgggccctaatagcagagggagactataagcccatctatcttctcttattcaacagatctctcccatattgaatcggtttgttgtgttacttttagctgtgatcgtaaaagttagaaccatggaacgcacataaaatatatgtatatcaaagaataattctctagtattgggagtgacaagtcaaccgcgtgcgtgttgagtctaagaaataacggtaaaggaagaggaagagtctaatcttttgttgttggatgctgttttagcaatttcagaacgttttcatagacgatgaatgtgatggaagacgcaggtacatttttcaaaagattagccgttagtcccctgtagaaacccctgagaccttcatatctgcagagagacccaaaagtgttactcagtgaaactaaccaaaaagatcatcattccagacataatcgagaccaagaatatgccctgacctcgcggtttctctgatgacatgtaagctgtctatatatcttgggattccgttggtactaggtcgttgctgaacaagaaaagaaccatgtttatgaaatcctcatatattgcagaaggtcaaaggtagaaagtaaggaagctcaaggaatttagatttgagctaacaataataagactgaagaagacacggtcgataggtacctgtaatcgtgctcgtataacttgaaatggatacgtaagaagaactgcagcgactttggaggagccaccaagtgcagcataatctgctgagttctaaagaaaaattgcaatggagtgtgttagaatagtatatatccgtgatgctggaaatagccgtagaattaagattaatgtggctatataacttaagaaccgcaatgtagcctattcagaagaattactctgtaccaatagattgtcagtggattcggactttcttctcctttctttcaaatccacaatgattttacggagttcctcataagctgtgaactgaatagcaccatgagaaacctgctgaacccaaaatgtaaaccattcaatctgtaaggcctcctctttcgcaactaatagtcatcttttatagttccaaaactgtggatcttgtggtagttttacgaacgaacgttacaagagatagatcaggatagttactaaccagtacaagaccagggacaatacccttgtagagcgccctgggtccttcctctttcactatggttctaaaggcatcttaagatcacaaaatacacatttagaatgaaacactagaaacaatgaaaactgaattttgtgtgtgcagcatattgcaaacctaatagccctgagtatggttgagtttgatgaagaggtgtctgaagctgtaaccttgttttgacaagccaaataggatttgtgcataaacagacctgaaagcatcattcccttgatactgagatcgaaaaaacataggagaaatgagatgtttatggcgcctgttagactcaccaaggcccctgcttcagcagcagaagcaaggtggagagcagggctgagtttctcatcgtccctgcctctagcgtacctctgcttggctcttccataactacagagagataatatatttgttccagaacattttaaacaagatccacggctaaaaacattaaaaaaactaacagaaaactgtttgaatagaaatcatgaagaaagaagatatgtgctaaacgaaagtaacactcacaaaaagaagtataagccccaggaaacagtagaaccgataactgcagggaagaagcctgcataaagccctctcaaaccctacagaagatttaaaccaaatgagtcaaccacataacatagagaagataatatggaagatgccagaagagagtttcatctgggaaacctcgagacgggcaatggtgaagacagcgtgagcagtgttcttgtacgtcggcagacttgaccctcttccgtcgttgactgttgttcaatcaagttagcaactttttaaaagcaaaatcgatgagttaatccaggagtgaaaaaccagaccttggaatctcgtacgaacaacatcaagagagtgcatagcagctacggtggcgaatccagcgacggcgccggcggtggcattttcccactgccacgacgccgccatcaacgaatccttagatgcaatccggactaatcgcgattgtttacagagctaatctgaagttaaagactcatttgacgcgtataaaaaacgaaaggacagtagatggaagattcgccgtcctccggtacgatctccgactccgagttctgccgtccgttcaagatatgcttccaacacggcgccgttttactcggaagctaaaacccaaatcagaagaggtttcgatagttatttgaggcccaatacgtttagttaattctaaaaacccaaagcccaacacttttagttcattctgaacaatatatgaggcttactatttaaaacgtttaggttaatgttggttgtaccattgcaagttcaacgctggaaataaagcaaatagtatatagataatctttttccgaaacaaaatcagatttgagtaataaacatatgatacacactcatgcaaacaaagccaaaagaaattgaaaactcaatgagaaacgaaagcattatattgtacataaattataaagatggatttgtattaataagcatggttaaccctccgacagatacgcctgatctctcccttggcgcctgtcaacggagagatatttcccatcttcaccatcgatttagcaaactgctcaaagaaggcctcttgattctcagcgtatagctccaccagctccttggactgtttgttcttcgtgaacagaatctcatcagagctcaatagacctttgtacattatcaggttcttgaagtagtggttgtcaaacttgaacggtgtcgcgaagtcgaggaagaatagggtctggtcacctccggatctcggacatcgttgacgcaatagtgttgcatagtattggctaagagtcatatcaggctttccgttgccggattgattgtataacctctgtcggaaacttgtgcacctcgagtttccaatggtgtgacttcctataaatcatatgtatccgcttcttaaaagtgtaataagttattgaaaatgtttcgtgtaataaagatggatagatatgtatacctgagagggagacaagatcgacgagatcaaggccttgacgcttgaacttagtgaggatggtttggaaagtgttgtttggagcaggaatgtcgttgttggaaccactcaagcttgctcctctcgcgtctcttcttcctagaggtacttcccagctcggtccacccgtctgttatttcatttgtcaaattattgataataatcaactaattttgtgtgtagtgaattgtgatgagtacttacaataacagttgagtctctagcggctagagccaagatatcagcgcaagaaactgtttcaggacactcttgttctaaggcatgtttgatttcctcgatgagttcgaaaccacgggctgagtttctgttagggtttgatcgtttctcgctgattatggttccactgctgtccaatagtatggaagcatcacatccctgcagcacaaatatatatcacaaggataaaaatatattaagattggaaaatttccgtatgtttttaaacgttacgaaattttgctaagcttgagaccttgacgaaacagtcgtggaaatggagtctgagcaaggaggcaggcatgcgaggatcatgttcgaatgctttagcgacaatggactgaacaatctcttgagctttaggacacgattggtcataaaactgaggaaagagatagccgccacttccataggctttggaacacaaacaaaaaggagaaaatgcaatgagcgagagagctgcaataaggatgttcaatgacttggccattttttggggggattctttctcttgatgactcgttgtatataactcggttacttgtacttggtgattgtgtgtgatgccaagggttgcatttatagagtagactttgtggacaattgagaaagacgttggagttggtatctaattttagctatatattggattagatggatacattgatatttgaattggtatgaatacaagatttgttagaattcttttcgtatatttctcatgtatgatcactttatgcacctcatatcaatagattattcgcagttgttgtgtgggatttttgttccatgcattagcaacacttaaagcacaattttgcttttaatagtcaacgcggagaagatttctatggggatttatgttttattaaattgagagatcagcctgaagatgattaagctacgcaaaacaattacatccatagggttttacttggttgaccgttgaacaaatagtcaaaaaaaaatgctaattattctgcaagcaaactaattaacattgtgtgcttaacaaatagatacggttgatagagtacgccaaagacataataaacgctagataatgacaaaatcattgagaaacagcttcaactgctctccttcacaaaaccaaaccaactatgtccttttcttttcgtgcagtaatggcaaagaagaagaagtcgtcattttaaagaaatatcaccggacgatgtattgagactttttcaatgtcttttgatcattttctcacgtcttttacctacgttcagaaaatacagatcactaataaaatctctccatttcataggcccaagcatcaaattatgattcggcccaaggttaaacccagcaaaatggggaatacgagttcgaaaacaggcctaatcccatcttaacatgtacgtctacactctactacactaattgtagtgcgttaacggagttcacagtggacgagaggtgtaacacaaactaagcagaagaaagtagatttatatagatgtgaaattacataacacaaacatctcagaacataaaaagagccagatgctcattacacactcatgtaagtaaacaacacacatcgcaggacgtacatacataaaaagcacaatacaacgaccgaatgcgactgcgttacaaaccctcattatttttatttaatatgtatacacgattgttcgaagcttaacggccaccaccgggaagcttttccttgatcttgtccatcatccccttcttctcgtggtgctcaccaccgtagccaccagcatcatatccggatcccatgccgcccatcgcttgagcttgaccagactgatcatgatgacctggcaacttctccttgatcttttgtgttattcccttcttcctcctccctccttgtccatcatcctcctgttatacatataacattcgaattacgcttcacatactaaactaaaacatcataaatcttctttatacacttgatacgtaccgagctagagctggatccagatccggagcggtgaagcattcctcccaagccaccaccactttccttgtggagttgctcttggccgtggtgcctagctcctccgccagttccaaagccttcagtcccggtcccggttccgtatccttggccaccggttccgtacccttggccacctgatccgtacccttggccacctgttccgtatccttggccacctgtagctcctccaccaccaccagttccgtatcctcctcctcccatcggatttccgtactcgtcatactgctgctggatcgggtttccgtactcgtcagtggcctgacctcctggacggttctggtaagacgccatgttcttcttgtcttaagcaaacactttgagctaagctagttaaaaaaactctttctttgtgatattagactttgatgagtttgatcgatgaagattcgttaacgcattgaagatagttttatagtccggtttcggatatggatcaactattagtttaatgaatcaatatttggaaagtgacgcgtggcagcagcagaaaatgtcggcgtggtgtttcgccatacgtgttcgtatttaaaatgaacttctgatatcactaaaggaatcggattgaatttatttttgagctttcatgtcgataccaagtacgtgttcatatcaatcccatgacagggtgctggaaagcaaaatatctatccttttctttgtggcggtactaacattatcgtagctaacaggacacgtaatgctcctcctcgaaagcgatgcgtcgtgttaatgattttcatacacacgtacatcgtcgttgattgggtgaatttgaagaaacttggctgggtctgaaacatttgggctcatgtgtgggccgtaaatcacttactaattagcccatggactaaaactaagccctaacaaaatttactcaacttttaccaaacgccgcgtttagatcgttggtgttcattgtcggggagtttctcctctctgcaccagatttcaaatccttgtttacaatctcttctctggctatcttagagggatttttgattgagattttaaaattttctgagttggattagttggttggtaaagagatggatccggatacggtgaagtcgaccctctcgaatctggcattcgggaatgtattggcggcagctgctagagattataaaaaggtaatttaatcttcattgtttatttcgtacttcgaagctgttctccataaattcttcttggatcttgatttcgcgtattttcaaagggtaaataatgtgcttggttttccacataatcaatctcatgttgtttggtaacccaattaacagagataggctagattctatttgtgctgacatgaggtctacgtgtcaggaaatttgatagtgtatagcgaattttaagtgtttttttgttggttacaattgcaattagagtttgatgttcttggatcaaaaacatttccgtatttttgttgtgcaggaagttcttgcaaatgaaaaggcacaaggatcaagacctgtcaacgaggaagttgatcttgacgaattgatggatgtaagttcaatgggggctctctttgaattgttcttttataatctgtacaatgaaatgttatgtttctcttctgtctctatgggagactgacttgctcttgttctgtaggatccagagctagaaaagttgcacgcagataggattgcagcactcagggttcaacttcaccccccacattctctcattatctatatttggttaacacttttgtcttcattagtatggactatgatctaatcccaagatgtgtctggacagagagaagtggaaaagagagaagcattcaaaagacaaggacatggtgaataccgagaagttagcgaaggcgacttcttgggagaagtcacaaggagtgaaaaagttatatgtcacttctaccacaaggagttctatcgctgcaagtaagatgaaatacccttctctccctcgcatcacttttttgatatgtgaatattcagaatttgaagcttatgcgtttgaacattctaggataatggacaagcatttgaagacccttgctcctagacatgtggacacaaagttcattaagatggacgctgaggtcagtaatccacttccttaactcttctttgaaactccattttgccatcttctaatacttgggagacacttcatgtagaacgctcccttcttcgtcaccaagcttgcaatcaagactttgccgtgtgttatcctttttaggtcactcctacatttttcactcattatttcttagcgcagttaggtctttatgtgtttaaactaacgaaaacacgaatgttgaaatcattattcttcagcaagggaatcgcgatggataggcttgtcgggtttcaagatctaggtgccaaggacgatttctccacgacgaagctggagaatcttctggtcaagaaaggtagcatcaatgtctcacattctgggcttttggtacttatagtttacagctttggtcgttgaattaaggttttttcacaggaatgcttagtgaaaagagaaaagaggaagatgaggaagattacgagtatcaagaaagcatacgtcggtccgttaggtcttcagcgaatgtcgactctgattcagattgatctcgaagcttttctcatagtagacctccgagcctttttgtattttgttttcaccgctgctctgtttgaattgtttggtctatgaatcttatgcttctataagtctttatagtgggaaatttcgttccacaatgtttttgtttatttgaaaactgcaaattatggtgtctaaccatataaacaaaagtcattaggtgaatgacaagatttgaaaagaaatgataagagttgagcactatgaactttattaaaatacaaaaacgtgtaatacagaactagagatcatataagatcctgcagaggcaatcaaagatgaccagaaaaaaaaaaccatgcaacaaaaggaaacatccacacccataggccacaacacatgcaaatatactagaaacaccaaagataaaggtttctaagtgaacttattattttgacttcacttgatcgatatggacttgtatttttgaacagtgtttgttattgcttgttctacaggtagcctttccatgcttgatgctccgtagaagccatggacacaaccctgtgttctcttcaacacaaactctgcctcttctggacccgatatcggacctaaaaacaaaaagcttactacaacaaaacttctatatcaaacagtgaatgatggattttagaagttactatacctccgtggcagaggacgataatgtctgggttgaatctacgagcagcatctgcaatagcttgtacacgaacaacgctttcttccactgaaactgcggttttcgccccaatatttccggatgtcgttagacccatgtgggctactatgatatcagctcccgcttttgccatttcttctccttcttttgggttgaaagcatatggagtggtcaacagccccattttgtgcgcttctgagatcattttaacttcaagactgcaatatcggacaagtttatgtggaaatttaaacacaatccatacacaaaaaatgattcttgaaacctgctttgtagcttacccatatcccattcctgtctcctcaagattttgtctaaaattaccatcaaagagaccaacagttggaaagttctggacaccaacgaacccaatggactccaactgcttcaggaaatagtccatacgacgaaatggatctgttgcgcacaccccagccagaacaggcaccgccttcactacctgcaagttaaatttgacatatgaagacgggtcttagaaagaaaatgcatgaataactaacagaagcaactggaaagagaatgcaagtttcttgggtattgtgggaatgaaataagaaactgacaggtaaaacttcatttgccatttcaagcacgactgcattggcatcagcaaatggaagtaagcctgctaaggatcctcttccagccatacgaaaacgtccagagttgtatatcactatcaaatcaatcccaccagcttcctcaaactttgcagatattccagtaccagcacctcccccaattattggtattcccttctctatttgatctctcaaccgtcccaaaatggcctgagttcgttccaaggtttctggagccagtgatgataataagttttttaattccaacatgcaagttccgtatccaaatactagaactaccaattgatctggtcgttagtttaaggtaagtgggaagcaaaaggaaacctggctttgcattgggaaactctttaggactgtatggaatcctttcaagcctcgatctcacatgtccatcatcatgctctccagtactaggtttagtcgaagtcgtttcagagggtttgatttgtgcgtaagtttttggacaaatctcaagaaatgaagcaaccaatgcctctgcaaactcagggtcattgatgtggtgagaataaatattgacctgtcaaataatacaacatttcagtacctaaaagtagatgaagcaaaacaaaacacaagtagtaacaaggaaatacttgtctgtcatcattagtttgaatgagcccctgtaattcatttatgagagcaccagtagcttctggatcacagaaaggcttccctggagcatccagtgcagataaacctttctctggaatgcaaacccttacttttgatgttgatttgttcagtttatctgctataaaccttgcaaatttcttattctcttctgctgtcgttcggatgagagaaacctgtcaataacagttacaatttgaacagataccactagtaaagacaacttaacatggtaacatctttgtaacgattcctcacctgttcgttgtggacgtgaatctttctcgtttggaaatgagaaggtattgtatctttaccaccaaagttcaccatatctaaggcacctacacttaaaaccaacggtattcctttttctatggtgatatcaaaacgggaactatcgcatgccatcacccctccaacgagatggtcggcaacctcggttgttgtaatatccattactccctaaggaaagaacaggtagaggaaacattaaaagtaaccaacaccacaaccaaaaaattaagactaactgcataaatcataataacaaatctcatctgaatgaagagaaaaagagaaacctgtataaatccttctttaaccaaagattccattgctctgccaccaacaccagtggcatgaaacactagtgtctcataaccttctcttgttaatatctcctggactgcatttacacatggagttgtcactccaaacatagttatgcccacagtacatttgccgttatcgcttggggagcttctaaacaactcaagcctcccgactaccataccagcaaaagaagccccagcgtttgaaaagaccaccctgctaacactgttgataccacaaacatctactaaagaagggatcaaaaccaaatctgaggtcccaacataaggttcagtttgaccactggccacagtggatacaatgaccttaggaatcccaatagggagagacctaaaagcagatgatatgagcgatgttcctccgcttccgccaaggcctatagccccagcaagagaattatcctcaaaggcttgcctaagaaaattctcaagacatttgctcatgacaccaactgcctcgcctctatcatccggaagtttaaccggtttttcctcctggttcgatccaatgtagcatgagagaacttcttctcttgttacaaacgcaaagtctgcaacattatcgatctgcttctgatcagcacccgccgaaacatccacaatcacaacctcaacctgttattccaataaaacggctcacaaaaatatcaaccattcacaatcttccaattctccagaaaacttaaaattgagtcaaatccttcatatttcgtaaaattggtcaatagtgattcaggtgagtctttcttcgtcagagctaatcttaccttggaagacgagtttttggagaatgcgccgatatttgatcgcactgatccagcaaggaatcgtagctcatcaagcttggtatcggcggttccgacacagaacactcgataagtttcacctttcatattcgtctccacagatcaaaatcctccgatccaacactgccgtctgatttctatgcggtgttgtttgttggatttgaagcaaaaaaacgtagtagcaaatagtagtaagttgttaagtcagctgttcttattgtcggttggtcacgttcccaataattcgccgtgtaaatttgttttattgcaaaattgcctaaatgtttttgttttgtgaaaaaacattcccagtggtttttgtttttaacgaaagtacctttaaattttgtttattacataatacaccctgtaattttctgtattagaaaactgcccttgagttatgtttaattcccccagagtacagtttattacatatgtaccaaatacacatatcatataacattttcctagtctcaacatgaaatctaaaaaatctacattgacagattactttcgtatcaaagaaacgactagagtaacagtcgttttgttcgtgcagctagcatgttgtgacacatggtatgcaaatttcttaaacaatgtgtccataatgtctactccgaagtcagctacaagcattgattcgctgaccgctcttatacagttggcttccctctgccctgctttagatatttgtgaatgtaacatgtagtcctcgtcatggttgcttaggccaagctcaaatccatgaatctccaagtcattgatctcgaatgagccttcgtttcgaatcatctccatcacttcttctttgctcggatcataaaacggtatgttgaaagagtccacctttgacgcactcacaagaccctatattgtggatcataaaaagtttgaatcttttcttgtttgacccaaaaaaaagtttgaatctttaaagccgataaatttttaaatgtcgaaatttggtacttttatatgttacctcatagactaggtcgcgtagagatgtagataatagtgtccaaaagtgacaacaatctctatgcaatggatcatcgagagtctttctaccgatgaaagtgagaaccatgcgtccattagaaaccatctcctcagaacgcatttctagaaatgacttaaagtcactttggaattgatttaaataagccttgtatgcatttggaggacttgaagtcgttatgtacacagacgaggaattcttctccagtcctttgggaacctacaaatctcacagttccattatatattatatataacctttaatttgctttctacatatttaagcaagtactaggcaagtaagtaggtgagaccttagagagccaatggaggctataagatgaatgtacaaaatggagacttttgcgaggaaagagcctcgagtagaatgaaccggggactccagacacgaagcacaatcttttgcttttgacccttttattgaagaaaggtacgaacttgaatgtcgtgttgaaatcgttatccggaagatcattcagacagcaatcaatttctggtggcttttggttacattgttgacataacacattgatcgtgttcacgatctcagccatcgtcaagaacgtgttttctccagtagcacatcccaaatcagctactttgatgtaattaggaaaatttaagtttatcatcattccttttgtgttcttaaccaaaaccggtttggcctttgataatacttttttctaaattagaaaaagaaatagattaaagaaacttttagttatttacttatatatataacaaatctgtgtgggatataactaatggatcaaacagttatatggaatatgggagaaacctgaagaagagaattggtggagtaactattatctccatctccaccgctcatccttagagcattcacaaaactgtacatactacttctctcatcacccccgtcacacctgcatcacaaatatacatcgatgtcaattcaacatagactcacacacacacgcttgcatgcatgccatccatattgggagagaaaaacctcgaggaaggattaatggtgtggatgaaatcaacttctcccattattaagttttgtgtccagaaataatttatgttgttcagggatgctaacgacacttcagacaattatttatagaggtgggtgggaatttgatgtacgtaaggtacacaaatgcatccatatatttttactcgaactttcagtaatatagcaaatgcatgcatcttgtattttgaatctttcatgttttatcctaattgatccaggtatgtcacgtaatatctggcatgcaaaacacgtaattcatatatagaaacttatcttatctaaccgtctaatttcagacaaaaaatcgataacagttttgagatttctttctccatatttagaacgtttgaaataattaacgctcattcgtatcagatgacaaaacataatttctagcttttgacttattaaactgtgtccattcttttacccgagaaaaaaaacacactctaaacatgttatttttctaattacaagacaagatcagatattcagatggaatgatgaaattgcctctttgatatattacttcaattttcctagctgaaatttttaggcttcgaccatacgatgaacaatggattaatgtgggccattttggcctttcagtatcacgatatttctatgctcgttatcaacctctgacttcggcccatataactaaagacgacaggtctcatatccgtagcagaatcttactcctacagttcaaatcatgatgaagtgggctttgggctacgctttacatgaccattaatacaagtgataactgataacattatagatctctctgtttggaaaatgatcttgaattaataaaggtgaactatttggttagacatttctagatttgtgtgcttatcaagtacgtcactactatataagattatttctgaatttagcgctctttattttcaaagtagaaattgcttaacaattaacatcatacatatattgcatgtaaaaagttgtcaatgtcaattatacgagactatacgcttagtcaaaggtataaaaattaagatgaaagaaaacaagtcgagagtactcgatgtcatgtccaatcaatttattgtctttttatgttatttaagaaccaaaaagaaaaactttaaaccctctatctatctatgatgaatgaagcatgtcgataggcacataaataatcgaacgctagggaaattcaaaaagtctatagtacataagtttcgacactgaaacaatgtgtgggcagggtccgatatgaggcacgttggcgtttaaacacgttgcatatgtataaatgatgatactgaaaaaatatagaataagtaaaactaccctaaatggatcattgataaaaagcattatatcttttcgatcgaccgttgcgattgataatattgcaaactatataatccataggtataaaaaaactacgtgtgcgctaatttacgtcagcatcatatcttaaatttgagaaaagttgaaaaggaaactaaagtgaagacaaaattcagcattgcgagtcaaaattatttaattaatatcaaactgaaaagaaaatttaggaatatatctaaaaataacattaaaaaaataatcaatgaatttaagaatgatattttcaacgtaccaatgtaatatttgctaggctttggtgaatgaatttaagaatgctaatcgctttaaatttcttttatgcgttgtatttgttttattcaatatctcaaaatgttacgctgtgttgtgttgtgttctgtacttgtgttagaaataagggtttaatgacaaatccaacaacaccaattacagcaatagccggtcggggtggaaactatcatgattgctcctaatcaaagagtccgccataagaattccaacacaattctttaaaaatactccactaatatcattcaaaagatggatcggctcaaaaatatcagagaatccataaatgtcaaaagaagggtagaaaagaaccgacttttattttggtagagcagagattacgggacttagtgaaaaaataaagtcacttttcttcttaatttttctgcgtgggtgtctgtctgcattaaagttaatttttttgtacttttggccattcaaaattattacactatgattggtgccaatacccatcagaagaaacacggccgcttcagcaaattaatattacttctttaatgattttttattaaaacaattaatcttataattgaaggctacaagatcattgagatgactgacttactagaccatcaatcattcccgtgaagcattagaaatgaagcttccttcaattttaaaataatggtacaaaatcaagcattctctttccaattgtctccaatcccattataaacattcactattaatcaatttcatttacataatatttctttttttaaaaaaaattatgtaaccacaccatgtgtattggtgtgtgcatgtgtctacctacggtctacttcggatttgaatttgatacacgcttataatttattattcttctggatattgcatctaatctatagatttaatgtacaaatctccacgcttgaaatccatgagtctgactgagtacattcttgcatagttaattattgcaggcatgagacttagtcggtgtaaaagtccaaaacgccattatgagcgaaactgaagaaagatgactagattaagtcttttttgtatataaggattttgtcatctaccaaatagaaagatacagtaaatactaaataggcatacaaaatataattgacaaagtgattggctcgtgtttagttaagaagcttgaaaccaaatttccgaaggatgtagggattctagggtttggaacatcctaggttaaagtctggattgccttctggaaattgtaggtagctctagtattagtttattaatgctattgatttttacttttttataaaagtaaccggaagatctcatggcaagagaaaaagacagacccaaatcgattgtttcttggatatcactaaagcttattaaaaaggtttttttggtaatgtcataattttgagtgtggcgagacaacatttctactctaagtctgtatcattaaaactgaggaagtgacactcacttgagacaagtagattacatatctttcttaatacataagcaactaaaattactgtacatagagatgatatttatactacatacatggaatatttttataaaaaaacaagattccataatggttaactttcacaaaactttgtttgtttgttgtttgattcgatttatattagaatttgatgcttttttgatatagatataaaaagatatttaggctatgttatggacaacgacggctaaagattcttgacgacgaaacatcctctgttttgctatgaaagcttctatcgttttctgaaactcttcgttgctcagatcatcctctggatagttcttctcctcctcagagtcatcatcgttctcagtttctttgcagaacttctctgtctccgatctctgaagagaacgtttcatcatcatcatcaccatgtttgaactctgttttccagacacgtctgatttgcttcttccatagaccttactatggggactcgaatctgagtcaatctcgacgtgaggcatattctcatccaccgttagattcggatttgaatccaaatcagtaacgatcacctgtttgtcgtcgtagacaatcccctccgtcaaatcttcatcggacggtttggaacgattctctacagatctgacgaacgcctggtagatttcggtttctgcgcttgcgacggcggtggttgtctgatcggaagacttggtgagaagaacaacgacgatggagttcccgaggaggaaaacgaacagaggagtagatatgacggcggcgatacggcggagaaacgctccggagatttgaacgacgaaaggaagttgcgaaaatgtccaaaagatgaagagtagagcgacgcaaacctccgccgcacggaagaaacggccaattctacagaagcggttgaaacgccgcaacgccttggctttctctgctttcacgttatcgaaatcaaacgaatccattgcgatttgcgagtgcaagaacagagagaaagagaaagattgagaaaagaagaagaagaaaaagtggagcaagcttcgtctctcgcatctatcttttatagacacactccactcctaaaccagactcactttttttttttttttccttcaaataattgaactttttcttttatttatggttaatatatctaagttagatatacatattccatttattattcctcatgtagacaccacttgtgcccctgctatattatatattatatccatttcaatattccaaaataaattcaaaattagcagtaatttactaatttttgtaaagtttagtgtaatttttttatgtaatcaaatcaatagaataaaattcaaaaaagtcaattaaattttgcaagggtatagtagcatatcattttttaaactttgtgtaaaaagtatcaaaaccatttttaccaaaacaaagtagcatgaaccatacttgtatacaaatggagtatagctgaacaatactcttctataatttaaggaaacaaatttgatatagtttgttgtttgtttgggtcaattttgtcagtgagctcattatatatttatttgggtgataccttaataccagtttagtagtttttatccagatttagatagacgagtaattgctaatcaaacattgcataagcgaatgagtactccatttcaaacagaatctgtagactttgtttgctatagaaatttaaagttagactgattcacaagtttcaacaactcgttattattatacagctgttttatcaaataaataaaattgtaaaaaaaaaaaccaaaaatatttggaccgagcaaaattgtaaaaaaaaagtgatgtaacagagaatcaatttttatttatatttttgttctttcacgtgagacgtatgggatccgtataaccaccgctcttcgagtgtaccacttcgtatttgcttaactctctctgtttcattctcgtgcatttcaccgtttatattttcttactttttcttactgtaattaatgcaaactctttttatccaattaaccgaaactataagcctatatcttaatatttgacatccctaatttatttttcataacaataatgataaatgagcgggtggaaattatggtttattaacaacatacactctaattataattctcgacaaagaaacaatattaactacttaattataagatgtattcaatgaggagtaatatgggtcggtgtcttggtgggtgtgggtcatcagacatttgactggatcggagaaaaacacaaaaattagagttcaacgcgacgttacaactatgaaacttaattgagaaattgacaaaaacaaaactggagttataaaacctgacccttatattattataacatgaaacagattaagttttttttttatatatatttttgatttcttcttatgattgttgtaacgtgaatagataagttataataaaaatgtgaataaattaagatttcttttatgattgttgaaatgaatggcaagtgagacactcacactacttgttgactctctcattcattcccttttcgactaaataacgatatctcggccggactgattatatatataaagtaaataaaaattattgaatccaaccaaaaaataaataaattattgaatggacaatagttttcttataaagatactcgtggccaaaagatcatgacaaagaatttcgaatggtgttaattagtactagtagtcaattcgacaaagttataagaaaaagagggttaattaatcgataatacaggctggttcgacccatgcataacatatcatatttcctctgcttcctttataaattgttctctttaaaactatgcgcatgtaataccattcttaagcatcattcttatatccgcagacgcatacctgcacgcatgcgtagatttgtacgtattagtatcaattaaaagttatgaccataaatatcttggtattcaatttatgtatacactaataacttggtaaaagtgttgtactagatatgataggaggagactagaaggaagtagggctgaagattgtttccttgttggggtcctggttcaatactttgaccactgtaaaagctatacgttgtcagtgataagaaaatcatcatgaatttcaggactatctggttcgacacgacaccgtattaacccctttttcactttcaaacttgaatatgtattattttttcatatttggctctcaagtcatgttcaatttctgccacaacaccgtgtataactgtactttgtagattgagtttgacagagtgatagacgcatcaacacatcttttatctacgagaataaatgtatttataaacgacacccagttttcatctccaatgacaagacgctctggcgtgtggtaacccacactccagcctaacttcagtttaaaacctcgtgtaactactaactaccagtattagcggtttacttttctccatgtctgtatcactgtatgtatgtaattaaacatgacaacaaatattaaaactagcacgaagaagcaagaccttaactgacacatgattttcgacgattactttaaaataagaaaaataaaattaaaaaaacaaaacgtctatattttacagatatcaaataaaaattctcaaaaacaaaagtattgatgttataatttaaagagaagaaaacatcgttctactataaaccatgtcctttaaaccaagaaacataaggatatttttttgttcgagacgatattcgatcgttgcttttgtgactataatcatttttaatccacaaccaaaagctataatcgaaagtaaatattattttgaataaaaggagtatagattaaataattaatatagttatgttgtgcaatgggaaaacttttttatgcgagaatctatttacacatcagcctgaatgtataaaaactaaaaaggataaccaagaatatatttctaagacctaagtatacgtatagtaatttaattggtcatcttctttgttccaccttttcttttttccttagcaaagtttgttaagcatattcgacctccaatatactccatataatgtatactccatataatgtatttttctccatcacatgtatgtatgtctataaaattccaaaataagcaacaatgttctaaaacgatgagacattaataatattcctaagaataaaaatcgtgtacacggctttcccaccgttaaatgccattattttcgatcatattcgggtttcaacagttcaacttgttaacaaatttccttttcaatttcatcttttaactttagattcttttcccctaatatccattggttaagataaaaagcacaaattccttcctataatccacaagaaaggtagaagaaaactagaaaccgagagataaaatggattcatcaatgggcctattttaaagcaaattgttaatgagctttttatgggcaaatttaacaaagaccaacagaagattggatcgcaattaatgggcttttatgcataagattaagtgattatgcatttaatatttgaattactagaaattaacacatactttgtaataataaccacaacttcccaatcttcttcatcagattttgctagttcgtcacacacacggatcatgtaatctgcttcttcttcgtttttacgatttgatcccaaagtttttcaattctataaatttgtgaaagcgaatcgtttgatttgacttataggttgactcttttctttggaaatggcagcgtcatcatcttctcttcttcttctccacaagcccacctacaatttccatttcgccgcttcctctgttcccacttacatcaattccgctcgatttcgaatttcgagctcaatcttccctttggatcgaagaagaagaagaagaatctggtctgtctctggctttaaatctatggccgatttggttaaaaccaatgctcgcagagacggtgaagatcgattccaagcgctcgagcaagaggctttcatcagtaattcgtcgtcggagctccagaacgagttggtatccgacgccggcgatggtattgaagcaatcgctaatcgtctggttggtattcgaattccctgatgcacacaacctgtttgatgtaatgcctatcttctaagaaacacaaagcaaacatttttcttttgttgctgcatttttgtgaaatggcagagcaaatggattgtagcagctctgtttggatccgttctgcttctacgacatgatggtgcagctttgtgggctgtgattggatcggtttcaaattccgtgctctcagtagctttgaaacgtatacttaaccaagagagacctgttgctactctccgttctgatcctgggatgccttcttctcatgcccaatccatttctttcatctctgtgttttctgtcttctccggtaaacaatcagtcacaatgctcatctgtttcttcccttgcatttgatcaactcttaaagatgactttattactcttatttccacagttatggagtggcttggaaccaatgtactctctctgttccttagcggcttcatcctcgcattgggttcttatttcgtaagtcttcatatcattttaggacatgaatcaagttaacaattatcgttgaaaacgaaatattgacactgatgttttattttggggtatagacgtggttaagggtttctcagaagcttcacacgacaagtcaagtggtcgtaggtgcaatcgtgggttctgtttactccaccttatggtatgtaacttggaactctcttgttcttgaagcctttacctcaacattctcagtacaaatagctctctttctggttgctgctgcgtctgctttaggttttgcagtttatgtgctacttaactggtttaaagatgacagatgacagaatgataattatcagtacttaggatgtataaggaatgcatttgattctccttataattcatattgattgagctattttaacattcaatgataccacttgtgctgctattgtatcaagggccaagtttgttttaacatattagagttaagaatcatattatgagcttctgcaccggatactactaattccaatatactgtatatatcttcactttgtgaatgagaccaactgcacgttgaatccctatccatgatcttagttgatgaccatccaggcactttgatcacgccgtttgatttcattactttccttacatgcgcagcttcttccaatttccctgtgcttgaatatatattggctagtgttacaaatgcagtttcagaagtaggatccagctctagaatcctctcagccgcccttcttccacgttcagtgtctcctttcgccttacacgcattgagaagtgtggtccagactacatcgtccttcttccatggcatctcattgatcatctgctctgcaacacttggccggcctgctctacacagcagatcaaccatacatccatagtgttccttggttggtctgataatatacttctcttgcatcaagttgagatagtgaaaaccaaggtcatgatgtcctgaatgagtaaagggcgagagaatgctgatgaaagttacagagtcgggtctgagaccaaccttcagactcttctcaaacagatctatagctttttaggtctttccatgttctgcatatccattgatcaaagaaacaatatcatctctgtctatttctgcgaatactttgaagcttcttcgatacttccacattttgagtacatattaatcagagcactacgaatagtagagttctgttctaaactaagataaagagcaagcgcatgaacttgcctgccttgctcaagaactgccatggttcctgaaacactcagcaaactagtaagagcaggatttggttttgaccctgcttgtctcatccatgagaaatacgtaaaaacttcttctcctaaacctggctgagtgcctgagagtaccctcgagtaatcgtgctccacgaaataatgtgaacacctgattcgagatacggacaatgttctcgaccggtttctcgagtaatgatgacgcatttgtacaaaaacatgttgaatttgtggaatcgctaatgattacggttaaatggtgggatccaaaatctggttatatttcaaaacgtcattttaatttagtatgtatagaaaaaaatcaaaaagaaaaaaagagttgaaaactttttaagaaaaaaaaattaaaaataaatgctaaatatacatgaagatgtgaaaaacatgttggatttgtggaatcgctaatgaccacggttaaatggcgggatccaaaatccggttagatttcacaacgtcatattagtttagtatttataggaaaaaaaaaagagagttgaaaacttttaaaaatcaaaaactttgagaaatatatgattagggttagagggaaataatataagacctaaaattcaaattggattagaagaaaactactttgaacatgggaattcgttgttttgcgattaaccagaataattagatactaaagattaacaaaccatataaaaaagacgttgatttggcccaaaattccaacgagatgtagataagaaaataaaataaaagagaaacaaagataccttttgagaacagagtgttggagtcggcgcaagttgatttgatctcttgaagacatcctttgctttttgcttctgatcgtcatccccaaaaaacaaaaaacgaccttttgttttgtttcatgaatcaaacattgtaaaattcacgactaatataggtagtgctatcgaatgaaaaagagagaaggaaaaagcgtaccttttgagaacagagtgttggagttggtgcaagttgatttgatctcttgacgatagcctttgcttttgcttctgatcgtcatcccaaaaaaaaacaaaaatcgatcgtttgttttgttttatgaattgaacacagtaaaattgatgaaagagtagagtaaaattaacggttgatcacagatctggatagaagaaaaagacgagagaaatagagtaaacaaagaacgtttgtacgattagggaacgagaggaaagtgctatcgaatggatctctgactctggattttgtatttgtaaaggaaaaaaggaaacttggccgagagagagacgaaaatacctaaataccccttgggaaaaaggaaaccttgtgtttcgaacgttgaaaaattcgcctacgtaataacggctagtgggtgagctggaactccaatgatgggctttgaaagtgaccaatgggcttccttgaggcggttagtggagactgattctttcatgaaaatacgtttcttttggacttgtaacaaaagtataacttgaagctaaataatttttttttgtctattttcttctttaatcattaaaccgtacaaatcgagaatataaaatacaagtttacgccaagacctacccacataagccatggaagtaacaaatggagagtcttgttctctccggcgatgtctgaaatcaaacgccgacgacgttttattgttctgaatcttcttcatccttcaaattatcaacgatagtcatctctttcacagaatccaaaacaaacattgttgaatggttttgcccatgttataactcacatgtggctggagaaattctaggcccttgtatttcatagtgggcctaataagtaaagcccattactaaataaccaaccttttgagttttgacgggttattactaataattttcgtcgcactaataaagttcattcattccggccaaaaaactatatattatgaaatctatcactataactttcgtggacgagctgagatcgttccattcgctataaaaaagtggtttaattagtatcatttcagttattgattttgtgacctcgtttcccaacttgtccctgacctctcgctctcttccatttctccacattgatcatcctagcgaagattttcctaatcaaagtcaacttccgcgattgctgtgaaatgacgttaacggtcgacgagctttggctaagtatgatcccatacccatcttgaaaattatcaattccgtttaccagaagttgccagaacaatcctcctgctgctgcacctcctcgttttgcagacccgtaaatcttgctgtacacggtgttgaagacgatgtctctctgcgctggggtataacctggtttcttcattgatttaccaaactctgctaatattattggtttgtgaagaacgttctgtgcgtcttggatgtgtgcgtctagccatttgttcaagaaatccatttgggattgctcgcttgagtctggaaacctgcacaagaaaataaaacagcacaaaagtcaaacaaaagtgattaatgattcaactgatttggccaaaacttaagttttgtggccttaccattcatcagggtaagagtgaaccgtgacgaaatcaatgccgggaatgcggttattggcgatgaaatcggttccaaactggccaggtgggttaagagtcttgctttgaggtgaagactgaccatagaaaccttcgaggccagcttcaagcagatggtttctgtctagtgatttcacatgagcagccatttcagtaatccaagcctgttttcataatgtaaaaaaccaaaccaacccaaacaagtcagatcccaaagaaagactagacaagtaacagagtcatggtgtgaaaatgtgtttaggtgaaagtgaaacctgaatggctcttccggaaggatcagaggggcaacggggctcgttcatgagctcccaagccataatggttgggtcatctttgtaatgaactttggtaaaggtattgaatctgttcagcacagcctgcaggagcaaacaaaaatccattactttttgcacttttttggttgaatctgcacaagagagaagattaaaggtttgattttgaaaccttgatatggttcttgtagaaatctttaacaagagagtcagtgaagaagtcgtcttcagaagaaacgggacggcctctgcttcgagcccaatccacatattgcttcctccctccgaagctctcgtagttattggcaaagctgagtattatctttataccatgccttcttgcctcagctaacgcaaaatccaaacccttttcaccagaaatgacaaaagaaacagattattcacagaaacatcaacagagagtctcaaaacttggccacaagatcaaaaagccaccaactttagcttttgtgtcagttagtgtaaaacagccgtatcatcagataaacagagaatctcaaatttgtccaaaaagattcacagaaattaattccataaacaaggagatacccaaattattggtctgatccaactggtgcattgataagtgtatattcaatttctgattaaaccatttttccaaagttcttccaactgaatcaaaacataacataacacacacagacaagttgggtttaatggaggttacctgaaacatatcctcgttgtaggagccaggggaatactgaagagccctgtaaccgccatcgctgaaagcccaggttcgagcaacggtcaatccatggcgagaagcatcttggaaagcggtggagatcttagaccgttgggatggatcggaggctacgtacatgagccagtaggcattgaagccattagcgtaatatggatagccattgagactaaactgaacacctttcgtcctcacgaacccaccgctcggtaatgcatctgttcctagctcccaacagctgagttggatcacgatcgctagaaatggaaacagagccagaagcttcatcttcttcttcttcttcctctgttttgttgttcttgtgtgctctcttctttcttacactctttatggcttgtctttgagtggggtatttatggactaataataattaatcataacggtttgggaaaaaagcattaatctcatttaaggtagtgttaaacacgcatactcatgtattagggatttttctcgttgtttgttgtattagtggttggttattagtataaatctgtgatgctctctcttactcaaatcagctagtgtaacaacacttcaaactttcttaaaaggtgtttaagtaagaaaagcaaagcaggtaattccgctaattatcgtaagcgtgaaaccagcaaatggatcccacttaacacgtaagcgtagtaaccgtacacatgcttcactgcttccccatcggatcgagttacacgtggcatcattctatgtggttcttacgacagcaacccacgcgtcttccgcttcatggatacagggcccttgcccttgctcttcattttattttatttatggggtcggcctctcaatttaattaaaaggccaagacaataataaagaaactcatgtgccgttgctcttagatttttcggttgagttcacgacaaaacaaaggacacaaaaatttattgtgcaatcaggaaaatggttttcttgttagtgagagagcactttagttttttgcttcttttgacttactttcaaacaatcttaagacactttttttctatcaacagaagaagcataggcgcaataagtggatcttaacttccaccgactccactcgacccaaccaaacacacacagcaattcactctacttatcccccgccataaattacgcttcacctttttcatttcttttaaagcaaatttaaatgcaattgtttaattataagtctactacctgtgatcatggaatgagatattcagtggggttggttgaacaaactcttaaggacaaaacaaaagaagaaagagttcaaatttccaaaggaatcaactgattgagattaaaaacaaaagctagactgagtggcatcggctaaatacaaaaaaaaagaagggaaaaagctaacctgagccgccgagtcatttgcactttctcatcttcttcaaggcccatttgaagcccacatactacatagctcggatctgtcctccatagccgtagtacttgagaagcccctcgtcttgtctccagttctctttcactttcacttccaccttcatttaacatcattcactcacgttgttaacttcctatacttgaaaataccattttatgtaatcaatcatattctatgcaaatttatgcgcacctcgaggaagactttcttctgaaggaaatcttcaatgtcgagccgagcagccgttgctagtgttttcagagcctttccttcctacatcattacattgacattcattcagccaaattattcagcacttaacttatcttaagttgagatcttatggcttaaagacaatctttgagcagaacagcttttaaatccaaattgcagtctcaagtcaattataggcaatgcactttttgaatgtccacaaaatctaactatggaatttcagaccaagaatgcaaaatcagaaattacccgttcggatgttgagggttatacacttacttttcctataaggatgatcttctgagaatttttatccactactacttccacttgaataaaatcttttgcagctggtctagttttgtagctcagcacgttcacctgtagtgttaacaatgattgattaataaggccacggcttttcacaggactcaagagaaaagaaaccaaacttgtcattgtacctgacatgcataaggaacttcatttcggtactgcataaatattttctctctaacaatctcagaaacaaaaaatctctctggatgctcgctcacaatatcctagaaatcaaatagccgtaagacattaggtaagtgaattgttgcatctgaagcacaaacctcagaatattaagcaaattagactataagctttagctatagcaaggagaggaattcaatactgaagcagggaattttcatgcatagtacctttggataataaggtggcccgaagggaagtttggataatatccactctttgacatcctctattccatgtccatactttgcacttacaggtataacttcatcaacatccgtaaatttttcataccactgcaaggagttgcagcatctattaagcaaagaacatagcaataccatgactccaaatcttgatctcaagtttatagtgaagcatcttccaccactgcaagttcattctagaatggtgggattttaataacaggacagtattaccaaggttcaaggatagcaacgacagcatactcacctccagtttcttggcaatctcaccaggtttgatcagatctttcttattcataacaagcaacatgggtggctttttctcaaggtctcccaaaccctctttcaaaacttcttctatctaagcacacaacaccagaaattaggacaggaaactaaactaacaaagcatgagaaacaaatcaaacagagaagcatacattagtaggcgttttacaagcatcaacaagaattactacgcagtccgcattgatggcagcatctctgacattcttcatcatcattgtatctaacctgtgcatcttcttctcaattacaccaggcgtatcataaagtatcatctgcaacacaagcttgtatcagtcgacatcttaatttctatatcaaaccaagcaatgaacacctggttcttttaagagtcaaaaatcaatgaggcttagataaacaaacctgatattcagggctagaacaaataccaagaatccgatgcctcgtcgtttgaggtttatctgtaacaatcgatattttctgaccaatcatttgattcgaaagcgtgcttttcccgacgttgggcatccccaccaccgccacatatcctatataacatccgtaatcaccaaattcagtttcccagtcgtaataaccaaatttcaatttctcagtaagaatagggtttagggagaaaacaaacaaaccgctccgatgatgagtattaggcgtgtgtccaagctcctccatctcataatcgtcgagcaacgccatgtttctgtccggtttcatgctcagggagagaagactggcttcgtcgacgatatcgatctccacttgttcttcatcatcttctaattgtgcttgctcaacctccatttcgctgaagcttcgttgcctaatccatagcttcttcgaggaggagagttccgtccggccatagctagtggtactgttgtgcgcctggagatgtgatttggtaactctccgccgactatagatacgatacggagagaaattagggttttcaacaacggaagtagagaagaatttgtagcgggaaagagtaggcgaaatatgcggagagaccgccattgttggacttggtttttcaaattgatagctctcactggttggtttttcctcacaggtgctttctttagtgattagcgaaggaaccaaatatgatcttcatacgacgccgtttcagaatttgttatttccacttacaccccttgttaaatataattcccatttcaaccgcctttatttttctttacccagttacccccctcgttaaatttaagaaccaacataacaaaagcaagaatcaggcacggaacttctggctaataataacattgcaagtcaataagcgacacaaacagaaccaaattggtatgaccttgatcgtatgaagctgagttatgtcgtcatcatgaatgttctatacattctctagaaaaggttaaaacaaaacccattttcctatttttattcacaaggcctgaagctttgattcaacctcattatgaatcttttggagacagctgaggttgagcttcatctgatgataacattccgggaggaaggtacgaccaggccaagactccactcccgagtgtgatggttgcagctattgatccccaaatccacctctgcctcctctttctcttttgcccgtctcgccttgccacctctgatatcaaagagagttgaagcattgagataaagaaaaataagataagacattcttgtaaatttaacttgagtttcttctacctatggcctcttggttgcgctgggacatttcctggttcacagtctcgtaataatgaagacggtcagacaaccgggtgatttcaaagttcttagcttcgagctcagcttccatctccatctctacctctgtcttggccaagtcactgcctagtgtgtcggagacaaacctggtgacctcaagttgacaacgtagctcatcagctaggttcatgctgtattggcttctggtgggatcaagaggaaggaacatacccacatcggccaactggtcacggagcctccgccaatgaacttgcatttgctctagagtcgcctctgcctgcctcctcctttcgatttccattagtaaacccaatctcatctcccttacctcagattcaatgttgttagctgaactctgcattccactgtcagttgatagttctggaagccaagaaacagtaactgaataaattaaaaccagtttcttagatataccagtgaatcatgcatgcagattttctatgtctttggaaatctgattcataactatcacgaattcaagatgactataaacacaggaatcccaagcctaaaaggccacttcacaaccaaaatcacatactgatatatgcatataacacttaaaactaaaggagaagaggctccaagaactggcaaaaagtgatgatgctagaaatgtcagacatcataagaattttctagctatctcgtggttaaaaaagttagtaggaagaaacagtaccatcgcaagcatcataaaactctccaacatgtgtagcaagactgtgtgagctttcagctctctcgaaatcttctacctctgtgttacttgtgaagcttactaattcacctgggttatagaaattttcaggctcaagctccttgtctgcttttattcttaccggctccaataagtaactttgccattctaaattactggtagcattattacttccaatcccaccattgctgatatctcttcccgacttctcgttcaaaaatgtcccaagagggggactgcaatcccaaacaggacgttcatggatgccttgggtgtgaacaccattggtgtgatccaccgcaatagcctcggtgataggaaatgatagggatgtggacttgctcaaggaggcagtagcctccacatctacattaccactaatcttttcctcaccagaggttatcgggtgagaaggcccatccacctcagagtccctattgaaaagaacaggcccacgagctttgtgattgatgatatagggagatggagggtaggaagaaggcgaattgggatgagggatttctttagtagtggcatatagagaaggtgacatctgaggacgagtgaatgtcttttctttaggttgcttactttcatcattcaaaatagacggctttgactgcagtgtgcttggaaatttactagataaggacgtccctgaatttagtgatctacccaaagcggcagcagaaaatgtaggcatgactctgcatcattgaagatttcaattagaaatccaccaatagggatacacaacagcgagagagcgttgttcaactaataaagtaatgaacatcgagagagtcgataacggataaacaaaaatccaaatcaatgtcaagcaattaataacctatacaaacaagctaacaatctgagagttcaatttcgggaaggagcaaaccatagagtgcgagattatcaaactaatcattcaacatcaagtagcctaaactaaatttaacagagattatcacggaaccaagaccttaatcatcaaatcgaacagtcagcagctagcaaaatcactcgatagaaatagttacctcgcgacagagcatcaatcggagaagacgaaacgaaaagatcaacgcagacggaggaagaagagacgatcgattgatggtagattgatatgacatggtgcgaaaaaagagcaaacagagattagatatatactgaggaggagagaaaaaagagaaacctcttctccaaggctttagtcgcaacaaactcttaatttaaacctcttcaccaaggctttcattcgcaacgaccgcgtatcacgctgggttttggggaatcaccggaacggctgcgttttgatggggttttgtatgtttagtgacgtggcatctcctggtgtttcgggtaggcttttgtagtcatcaggggccccactgtgtttattcgtaaatttgtaaacccagtctgattactgataacaagtaataaaccgagaatttttcttactatcaaactgtaaacttaaattacatggatttgtccacaaagaagcagaatcatggcttatggacgagctttctactttgatgtatgtatgtattcatccttcttattcaaatagaaaggtatatcacaaatcgaaaataaatataaacaacctctgtgaaatctctttctccgatctatctgtaatatatggcaggtccatttgaagtgttatcccaaacacctccttccttgacatactccaagtacctagcgaattctggttttgcagtcgtcgtgctcttcttcttcttcttcctctttagactcatttcgaagaaactaaatagagggtgagccgaacccctggttttctccaccggtttattcaccttcggggattgaccatggggatttgtaggaacgctctccggtttcacttctaaaagccctgcgcctgcttcttcttcgtcgccgagcttcttgtagctgcctcgaaccttcctcgtgctcagcgctctaatcattatttcttgtggttttgatcaattctctctggtgatatgtttttaagaaaggatagattttgaaaaggacacatcttttgacttctcttctccttatcccaacgactcctttaacttaaaccttatgtgacattgccctttcacctactactattcgtgggtcaatgctactttatttttgactatgtcttctttggtgtttgacttaattaggacaacgagacagttccacaacaatgctttagactttagtggacttgctctgtttcttgacacaaaaacagtagctcaagtgtagtgtaatgctgaaaaaacaaagcaattcatatgaataagctgtgtcctgctgttttaaccaaacctttattcttcagttttcctctcaattcttcaacgacatcccacttccccatcgctgcatagaaattcgaaaccaacacataaatgctcgcgttctctggacccgtctcttccataagcctccttgctacatattcgcctcgcgtaagatccatattaagactacaagcactgagtaccgctacccatatagcacaaggaatgctttgattatcgttctccatcattctctcgactaatctccatatctcttctgtctcaccagccttgcttaagatatcgatgaagcatacgtaatgctctgttccaggaaccaaccgatacttctccttcatcataccaaaacattccttaccttctttaactagtcctgcgtgtgcacaagccgatataacaacaagaaatgtcactgaattcggtaaaactccgcttccttcttcacacatttccctgaagatttcaagagctttaaccccatccccattaaccgcatacgcatctatcatactcgtccaagaaaccacacttttagatggaatagctctgaaaatagtacgcgcttgcacaatctgaccgcattttccatacatatccattaagccattgcatagcttagaatctgaaacgaaaccattacgtaaagcgacacagtgtatctgtttaccaatccacagatcagagttatcagagcagccagcaagagagctactgagcactctcacattgggtctctgcctactcataagcagaaacgcttccttgtaatttcggtttcgaatgcaacctgatatcaaagaattcaacatcacctcgtccgtatgaacattcaaactgttataaaccttcatggcttcattgatcaaacctacactcgagtaaaaactaatcattgcagttcctaaaaccacgagatcgcgtccggtgaccaccaccatggcatgaacttgcttcccttgctgcaaaatcttgagagaggcacaagttttaacaacagaagacaaagtgaactcactgatttctactctttctctatacatagctgcgaaaacgccaagagcttctttgcctttaccgtttctaaggaaacccgaaagcagagcattccatgagacgagatctttttcctcaacgctttcgaataccctaacggaatcaaccaagtgtccgtacttggagtacatgtcaataagcgcagttttggatatggttcctgtttcagcgccttgtttgatcatcaaggcgtgaacttggcgtcctgtttctgggtacgacaagagggaacaggccccgagaaccggagtgaaagtgtgcgagctgagatcagggctagccctatgaatctgaagaaagagagccaaggtgtcatttgggtttccactgcggaggtgagacgagagttgagagttaagtgaggagaggtctcgttgcggcaattcgtcgaacaggtggtcggcatgggtggcaaaatttcggataaagacacacctcagtaccaaattagtggatttaacggtaacgttacccagacgaataaagcgtccaatacgcaaacatgcgaacatgttttacttgttaccgctacagacgaaacttattgaagcagagctatctttttatgggcaaaggtcaacctaaatgtctgtctgatcaacaatttattagacgacataaaaaggaagaaaaggttacaacttttctttctcaagttacaagagaacaaaacccctcacaatctttaacagagaaatgaatgcctttaagccgaaaactttcccagtgagcactggccaatggattttacgcccaagaaaactttattggagaagcaggaaatcaagttctttgtttttacttttcaaatccaaacaaatcaagattcgcaaggcggcacaggttaaacgcctcaagctgcttttggtacattctcagggagcgtgagatcatcgagtactgaatcatattctgtatcgcgagcgttcttcttgtttagaagcttcttgaactcagcctcgtccaagttctttgcgttctctgtggcgtgagcttgagctaagttggagtactccacagccgaactggagaagaagactctttcttcttctgtcaccttcctcagaaatttagctgggttgcctccccaaacctgcaaggaaaaccagaattgtaatttcaccagagcttaagcgaataacaaacgtttgagaaggtcaacatataagagcgtggctaagaacctcgccagagggaattctagtgttctgcctaacaagagctcctgaagcaaccatggcatgtttttcaacatgagctccatccaagacagttgcacttgtaccaatataggcctcatcctcgacagtgcagccatgtaaaacagcactatgacctgctccaaattcaatttgctttatccattaccctgactttaatattcacacttcaattttatgacagcaaatgtattgagaatttaccaatggtgacattgtctccaatgacagtaggtaagaccttcccacttaagttggtcttagcaacgtggacaagagcgttgtcctgaatattggtcccagctccaacactaatgctgttagcatctcctgcagagtcggtcattaaatcaaagggtatgtctgaactaaagagtgcctatcctctcaatgaaagcacatttgaatcaacaatgtcaaatactccagcagcttacctctcaagacacatccataccaaatggaagaacctcttcccacatggacatcaccagagagagaagcgttaggagccacaaaagcccccttatccacattaggggttttgtcaaaaacattcatgagtgtgcggtgccttgatactggaacaaaaaaagagtttcagaagatagacaagtgaaccacccatcatagcacaggctaacacataacagacttgtctaagtgaagaagatttcaactaggataataactagccaaatacagagaacataagaggaacttgtaagagaaaattaacgagaatctctcttcgcaaccacagaaatggataccgtcactagcaaaatgaagaacatttgatcttaagctctaaggtttctaatcaaaaatgccataatcaatcatcaacataagaggaaacgcatcaatcaaaactatgacctgattccagagaaatacacaaacatttcgaagacccgacgagtaatgaaacaaaaaaaaatcatcaccaggattcgaatggaactaagagaagacaaggcgatccaaaagacatacgctgttctcggaaatgatttttcccttggaggcgacaaccgagccgatcaagtgcttgaccagtttcacggatccagaatcctacgctgtagaatgctttacccattgttcccatcgtgttcttcttcttcttccacacgagagatcgatttgcgttttatcaatgaaatcgaaaaggggtttttcgccggagccagaggaagaggagagagtgcagtctttgacgactcatccccatttgttggttttgtgctcaattttcggtcggaccgttattatccggttcatgttatttcaggttgctgttggtaaaattaggaggtaaatttatggtgattatggtaattcttcgccacgtcactttatccttttaagtctcgaacaaacggcacacactttggcgtccactgagaattgagaatatagttatcatcaacatcaaccaaagaagaaccttatctctcaagaggtctctctgttttatcgaatgaactacaatgaatgtgatctcatgctccttctcattggaacataatctctacgagacaatgtcttgtctccagagatgctcaaagcaagaagaactgaagcaaatccacgctcgcatgctgaaaactggcttgatgcaggattcttatgcaatcacaaagtttctttctttctgcatttcttcaacgtcttccgactttttgccttatgcccagattgtgtttgacgggtttgatcgaccagatactttcttgtggaacctaatgatcagagggttctcgtgctcagacgaacccgagaggtctcttctcctgtatcaacgtatgctctgttcttcagctcctcataacgcgtatacttttccgtctcttctcaaagcttgttcgaacctatctgcatttgaagaaacaacgcaaattcacgcacagatcacgaaacttggatatgaaaatgatgtctatgcagtgaattctctgattaattcatatgctgtgaccgggaatttcaagctagctcaccttctctttgacagaatccccgaacctgatgatgtctcgtggaactctgtgatcaaaggttatgtaaaagctggaaaaatggatattgcattaacgttattcaggaaaatggcagaaaagaatgctatatcatggactacgatgatctctgggtatgttcaagcagacatgaacaaggaagctctgcaattgtttcatgaaatgcagaattcagatgttgagcctgataatgtttccctagctaatgctctctcagcttgtgctcagctcggagcactcgagcaagggaaatggatccattcctatcttaataagacaagaatcagaatggactctgttttgggttgtgttcttatagatatgtatgcaaagtgcggtgaaatggaagaagctttggaagttttcaagaatattaagaaaaaatcagtgcaagcatggacagctttgatttcaggatatgcataccatggccatggaagagaagctattagcaaattcatggagatgcaaaagatgggaattaagccaaatgtgatcactttcactgcggttctcacggcttgcagctacacaggactagttgaagaaggaaagttgatattctacagcatggagagagattacaacctgaaaccgaccatcgagcattatggctgtattgttgatttactcggtcgagctggattgcttgatgaagcaaaacgtttcattcaggagatgccattgaagccaaatgctgtgatatggggtgcgttgctcaaagcctgtcgaattcacaaaaacatcgaattgggagaggaaattggagaaatcttaattgcaatagatccatatcatggcggaagatatgttcataaggcaaatattcatgctatggataaaaagtgggacaaagcagctgaaacaagaagattgatgaaagaacaaggagtagcaaaagttccaggatgtagtacaattagcttggaagggaccacacacgagtttttagcgggagaccgatcacacccagagatagagaaaattcaatctaaatggagaatcatgagaaggaaacttgaggaaaacgggtacgtaccagagttagaagagatgctgcttgatctagttgatgatgatgaaagagaggctattgtgcatcagcatagcgagaaattggctattacatacgggttaatcaagactaaaccaggaaccattattcgtataatgaagaatctccgagtatgcaaagattgtcacaaagtaacgaagctcatctctaagatatacaagagggatattgtaatgagagataggacaaggttccatcatttcagagatgggaaatgcagttgtggggactactggtaaaatttgggagaggaaataaaacttttattgcttaagaaaatggatccactggacattataagtttaaagtacaatgttttcaactgatgctgagaagttgtgttgcagtccaagactgtcccggctctagcttgacatccccaagctgagaattaaaaatgacaaggaagagttataaacttttgagtctataagttttgtaaagaggaaagacttaagtgtaaactgatatacctttgcattttccacgcacacaaagtctctgtaacaagcctccatctgagtatgcgggttccacaagaccgcatccgaccaactgcatttttcaaaaacaagtagtactcatgaggcacagaacgaaacatagaccctgtagaaagccatataagtgtctcagtaaatgtactttgtgtttttgatgattattttatcacccaagccattatcaaactgcaattcattgggagcatcaagatagacggtatccacaaatccaggaaaagtgactgcatccctgaaatgttagaaattaaggagttacaaccatgaaacaagtgaaataaaataaataagatctgtagttaatgaagaaaaacaaataccaaaccaacctgtcttctttaccctctattgggttcttagggtctggatccttattgagagttttacaaccctttagacctctcacggaggcccccgcagaagaagcctgatgaacccaaaaaaaaaaatattagaagaaaaagttgataacatggactcaatttgcaagccatagtatcaaatcataggaaaatgatttagtggacctacacggaagtaagtatgcaacgcagtgctgaaagaaaatggtttatcgtctgtgtttgtaatctttagctcagtggaaagggagtccgcgccaacaatgacctaaagtatcaacacaaactgttatgaaatactataacatacaagaatgccattagtgaaaggcatgacacacaccttgtatagagcctggaaagcaaagtcccacatggctcgactatagggaccatccttaagctcaagagtaacagcagcattgtcatctgcattctgggaatcgacaacagaccagtccatgttccttccaaacccatgctaatgattccaaaatggttcaagaccaccaaataagcataaacaactaaaaagagatttgatcaagcgaggaaacagtaaatgagagtacctgttgaattagcccaggtccaaactgtggaaaacaatgtggaatccctccgctaatccaataacaaacagtatgacgaaaaaaagaaaagacattactcacaattttatctggtttaacaacaattgttgaagttcacacacacatacctaatgggcttaatcttattgaagacagcatctggtctgacaaaaagaagatctttaccgctcgcaactttccaagaagtaatgcagcctccgaagagatatatctcagcctcgctgcatccaattataaatcaacccagatgacataaagctgaacctgacttacttagtatgagatggtcaatagtttttgatacctgttctgaggagaagtaaggacaagttttggcaaattgccttctccttcagcgactctcactccagtagttgaagaagccatggcagagaatcttcttctgcaatatccaagatcgagtttttttttgtgtggatcaaatgcaaggtagagacattagaagcgaaaccaaaagaaaaaaaacaaaatgcagtaagaatattaccggctaaatcggagctgattgggagaattgaaagtgagaaaagagttagagacggaaacaatcgccatttttgtttttctctccttcagtcactctctatctagtatcctatatattgcgtccttcccggtcctctcgtactagggcaacaagaagaaggaaaaggattgaatagagattttgatttgggtcgatgaaattgaatactaaacgcagcaaaactaatgtaattttttaaaaaaatatcggacatttttatttatatatctatccggaagagacaaacaaacgaatgacgagtgacgacgatggagaaaccggctcttcaaatggcggtcgggacccaaagtttaacgttgaccactaacttgagaataatatcgtttatggattacgaatatccttcttaagtccgactaacttatcaataatatctacaaagaagggtatgggctgttcaatacattccaccaggtccaatattactaatgggcttattaaaaattagtgcataacgctagagagaggggtcgaacctctgaccttgtggttaacagccacacgctctaaccaactgagctactccagcttatttgttctatctattacctttttactatttcacttctttgaggcttttagcccaatcgaaagactatagagtggttacacttaaaaggaggaatcatgctggactcggaaaggtaatgtatgctgctgctgctctttcattatcttacgggtgtgcctcattagttgtagctaacatatcaaattcaatcttaccattaggattcatgttggtgttaagaattttgcacatttttgttcttttaagatttctttggaatttttctatcgatacaaggaaaatggaactactcatacaaagagaaaaaaatacaataaaattcaaatttgtgaaagacaaagtttaaatatttctctcattcaaaactgttgttttatctaatcttcaagctgtctgtgtagcaatgctcttgaccgagatcttatcatcttgaatttgcctctgtaactctctcctttcttcaacatgtaacttcacaaaagtaagcaacgtttaattttttgatgctttttgaatctatagtcagtcatgtaagagcacagaaaataccagtttaagggttcttggtacttgtatccagcgcctttttaggcggttcatttgcagattcagctgtttcacaagtgaaaagcaaagaggttattatgcgtctaaaatgcaacatgatgcactcagattttgtattttttaccaattgagtatatattctttttgttattcacttccttacccttaaactttctcttcttattcgctctcctcctctttctatcttcctgtgtgagctcagactcatccttaatgtcacctttcccggaaaatatttcctctggggcaagcattgctgcatctgagacggccacgggcgcaacctacacagtacacatggaacaagttgataagtataatggtctccaatcccaattaccaaacaaacaaacaaaaaaaaggaaagggcttagaattacctcttccattgctatggctgaaacgtttggtatagacatttcttcaatcacctgaaagtttggagaaaataaaaagtttcagtccagaacagctatgtctagacacttgaggtgatcatcatttaggatctaagcaagaaacatactggtttaggtgtgaagtggaagtgggagagagcatccaacttcaggcatagtttcttgaacaacatgcttgcctgatttaacgtttataagtaagagaatgtgatatatacactaacaatgaaaggagaagataaatatgcaaacacaaaaacccaggaaaaataagtatcaaatcaagttggaacctctttctttagttcatcagagtgagttgttggggcaaaagctggattagccttctgaaagtattctgcctacaaataaccaaatggaccaaaacacatatgtaagtttggttatctcacaaaaaatgcaataacacaatcaaatattgtacatgatacaaacctcgtaaacttcggcaagacctttcttgcttttgctttcgtcctgcatatacccaaaagtaacaaatcaattgtaactattacaccagagcaagaaaagaggatagaagtaatagttcttcaataaaactcaccaattccttggcttctctttttcctttagtgggtagacgaggtgctcgttgaacatcatcgaaacgagcctaaagagtaaaaagatcagtcatgcaaaaccaggaagaaacaagggagacctttgttacaaattactgccacaagtagttacctcaatgattctgctcttgatcaaatcttcaagtgaggctgtgacttcttctgtgattacaggagcaggcctggcattgtgctcaaaatctaaatcaacttctagagcactattcattggcctctttgccgcagttatcttacaacaagtaaaatcagacataaatttagctacagaaagcaagatgcctcttttacagtttaattgtgagggaaaacatgtctggctacctctccctgcattgtccaatgttttgggtccaagtttgctttctccatctgttcaatcttggattgaagctttagtcgtgctctctcatgggtagagagtttttcattgccctaaaggtagataaattagttcataaatcagaaatgaattcattacatatcacaatgccatgaatagttaagtattacagtactttgttttctatttcagcttcctcatcttcactcaaatctttcaacttcatttttgtctcctttttgccaccaaagaaatcatcatacctaattaccattgaaaagaaaaaacatcttagaacaaatctacagcgctgcaaagcgtggtgtattctctaattagttcaattagtgtgtgatagagactagagagcatcgaaaccataccttgcttttcctaatttatctgtctcttcgtcgtcaccaccagcaaaagcatcaaactagacgacaagaacaataaaagatcattcgagagaaaaactgagctaattgtaatcactcactccacttttcttaaacactgaggtatgtgcttacctcaacatcttcttcttcatcatcatcatcttcttcgtcttcatcatcgctcaaattttgcttctttctctgtgccactccttttttgtttttgtggtctatcccatactcttctgcttcaccttcctctaaaaattcctccaattcttttatcttgaagaacttatcctctattccttcattgtctccatccttctcctcctcctcctcctcctcttcctcctcttcttcttcctcgtcctcttcctcttcctcttcatcttctccttcgctgtcattagattctatctctttatcctcatcatcaacatcatccgagtcaaaaccatccatatccatctcatcaatatcatcttcatgagaaaccttaagggccaacttcccaagtttacgaatctcttcagggtttttagcaaatctcttgacttcctgccgcaagctagtcaacaaaggttgagattgcatatcaatttgctgccaaatctgctccgcatcaaacccatcagaagagagctgatcaaatggacatttagggttatgcggcttcaacttcatgaatagatactgagatgcagagcgagcatcctcagatattgaacttggcgctagaaaaactggtggctctgttgccttaagcttctcaagggcttcaaaccccgaatcctttaccgtagccattgattgagcttcctcagtgccctcgaaattagggttccttcgatttgacgaaaacagtagagtatatcaatggcggtgccgaaggtggtttaaacggcggttaggttttagaagaggaacagggacaagagaaacctcaatggtatctctccaaaaccctgcgagttttaccccttagtcattgggccaatatatgggcctttaacattgtgaattggcccaaatcgtaattcagacattaaaaatccacatttgtctgaaacttgtttaaactgcaaaaactttgacacatttcaattgctttatgagagtttgaaatctgaaaacatcatcactacttaaaaacatgatacgataaatctgtgttttaccaaattacaaaataaatgattgattagagagattcaaaagtattcctacataatcaaaaagggacttgagctacaacaacacatcgtttatgaatttttctgtgagttctttaggaagtcccatgactgtatcaacccctcccacctacaataacattacaacaaaactctttttagtggagtgttatcatataaacatctctttgaacatctatcttaatgatatgctgaaacaaaactaatcaaacaagtgtagatcaaagacgcgagctttttgtattaagggaactaaccacagaatcgataaagggtgaaatgaggggatgctccagtgttaaacctccagcaaccttataagttattgcatcatcaatctgaagattgaatagaacacacaaactttatatgtcaaaacaaactaagttcaagagatcgatagtaagaagaagagtggttttagaagttttacaagaccgtcaatgacttgttctggtatctcatggaaataaacctgcatcaccacaacattcacatcaccacaaattgttcaatccacaagaaaatttgacaaaacagaaagaaaagtttatatctgcgtacctcagctttgtcccatcctccttttttaactccagttttcaagtttctaacaagaacagatcccacaactcctccgtgtgaaccggaatagcctgtgtagattacaaacaaaacgcttaaacacaaccatgatcagccttacaagtggcttatagtatcatagaacacatgtacatagttaacttgtacgaaacctttgataaattcacgagcttcttctttagtggttggtttttctctaataacacctttgtacacaacaacctaataaactccatcaccataacatcagctaaagataccaaaaagttaacattctaatcaaaaagtgttgaggcatcaaagcatacagtgtctgcagtaatcaaaagagttggttgaggatcttttgcaaactggctctcacctcccaatttcgatataatctcatttgcctagtcaaaacaattaccatcatcataaattgaaaagacattgaatcaagattacaaaaccctagagtattattatgtaccttggcttcagcaagagccacaaccaaatcttcaggcttctctgtcctaatagctttctcatcaatgtctgcagtcttaaaaaaaacataatccccagccaaactcaatttatgttatgaacatccatagcaaaacaataataatcacaatttgaacataccacgatagtgtaatcatatcccatttcagccaaaatcctctttctcgccatggattgagaacccagaatcagcttcacgtttgagcatatttcgcatttcatcagcattttcccattgattttttttcaaatttctaccaaaaagggaagaaatagcagagagagagacaaaccttaaatcctctctccatggccttggtcgtcatcgtggtgttgtgctctaagcggaatagtgaagaaggaaatataacaaaaattaacaaaattcgtagaaagaatttgtgtgtctttaagcccatgtccaatccacacgcttcttctactttcaagaataactcttaacaattcccttcaactttatctttatctttttttatattttttcaatctatgaagaatattattgtaatactccattttcatttatcataagttttaactatagctttattatgaaaattttaaataaaatccatcttttccatgtacagttttttactatttttaacaatagtttaacattaccgttacattatagttatatatattttttgtcatctcaccaatcacaaccaaacctttcacatggaattaggctatctagctaattagtcatggaaaattaggttatctagctaaaaaatcttcattcttgcaatgatagtaagaaattggaattctttatattggaatttttgtcttcccgaaaatggtgtttgtgaaaagaaaaatatgtaaagttgatcctccattctttatcacagcctgtaatctgtatgatccaataagaagatgtcacatgtaaatgtaaaataggtattcaaattgtggaaaagaaaaataggtattcaaatggggcatagttatcgaccaaaaaaaaatggggaatagtttacaagccataaaaacaattgggcctatttgtaaggccttacagctatttgaattattttataaattatcaaacattattggtgataaagcaatttacgtttttcaaaggggttgcaattataaatacccttgggcctgtttttgagcttctcgcacatatggaagttattgtgaaaatcgtacaactactaggactattttataaatactaaacactaccggggagaaagtaacagagatagaacaagtgacatagactctgagtgaaggagttgaaacgtgtatgaccagtggaagaaatgggacgcggtggtgatcggcgcccacgttgtgtatcacgaccatctctacgaacaaacatctcctcaaaacgatgtgttttgatgatgacaaggatgcagccagaggggaagaagttaacattcctgatggctcctctaagaagatggcctagaagaaagaatatgtcttcttcaagaaagctcgaaagctcttcgatattgacgttatacttgactctgatgttcctcaagaaggttccagaatcagcgttgtggtttaccgtttcgccacgaaacagccaaatcaaaatggtttgattgtttcgtgtgtgcagttgcaaaaatgtttgtcatgtctattcaagtctattcatggaaattataagcatttaagactattcagagtctacgtaaagtccaaaagaaaaaaatcaaacgaagcagcctctgaacaagggtaacttcctacccatagaattttagattcttaaatgaatgtttgcttcttttggagtttgtggtctaaactttcgttgaccgtttattgtatatcaaatggtttgtttaatttaagcgagctactagactagtagtttgtgatatagtgtatgtcaattaaggataaacacaaatgttacatttatgtgattgatattctgtttttttctaaaaattgacagaagcgttttagttgtgaacaaatttcaacgtatatgttaactaatgtttaatggtgtgaaagtttgaaatggacgagacgatgtgaggagaatatgaaaccacaattgtttagtctttcgtaactttataaagccaacattccatcaaatgatatttctcctaacacgagatcataaggaataagataaagcaaaagagatgaaggaaaaatgaatgacttccaaagttctcttcgcaaaagtctacgcttactttgattgtgtttcttttgttgtcttgtgctattagtagatggagtccaagatattgcatccatgcttaaaaagatcaagaatacaccacatgtttttgggggaaaagtatattaaagcccaaaagaatgttttggaataagtatatatatattttgatacgatttttgtttcataaatggaaagccaaaaaaatgaaactatcatactaagaagttacatattaatagacgtatcttacatcttcataaactcccaaaaaaccctaaacctaagtgaagaaaatgtgtactagtatgagatgatagatgaacatatttagataagcattaaaaacatgaaaggaaatgtttgtaacaatcaattccaaagaggggtctactacaaacatatataataaacacgagcaaccgtaatgtttgcttccacattcaaaatttcaaaaaggtcgaattattagtgtattgtttttgtttgtttggttttagactgtggatgaacaaatcaatgcattgataattgcacatacttttttcttttctcttgctactcactttacatctgtaaatattgcaataaatttcatatatatatatatatataaatttagaaaaacaccaattaatgtctccttgcagtccacatgggcttcctaaacgtcaaattttcccaattttcagaattaggtgaaacgttattatatctaaaaaacagtctagataatatgtctgccacttaaacaaaaagcagcttcctcttttgtttagttttgatgatttatcaaatgaatatcaataaaaaaaatacgaataaaatcaattaatatactttgtaatatcaattgaaacaatgcattacacattaaaaaagaaatagtaacacataaaaagaaacagtggaaagcagaaaacgagaggggtgtgtatatattactaaagaattagtttaaatgattaacaaatgagtgggatttttgcttctcccaaagcgtaatttatctgaaaatgtgtctcgtgttgagagtagttgagattcttgctgttctccaactaaacattaacttttattaaaattaaagaaaataaaaagatggatcaaaaacgagatcccctttttcgatatccgaataatgtttttctttgcttttaatgtgtctctttcttatgatttaggattccaattccttccctttccccttcttgttctctccatattctcctctttagaaagagatagagagagtcttgtttttttcctgtcttgagtgatatttttttcagagccctgagttgttgtctccattaatggcgtcagagaaatctacctccaagggccaagcatggtgaagatcagctaacacttatcttaacaataataatattttaaaatgttgcctaaagaaattttctcatttccttttttttttcgttttggtatcgtgatgcaggttttgtacgactgggttacctagtgacattgaaatcgaagttgatgacatgacattccatctccataaggtgcgttcacaaaagcctgaagatttgtcttcttctttggcactctctgttttttctttgattactcacaagatttgtgttgttgtctgtggcttttccagtttccactcatgtcaaagagcaggaaacttcacaggttgattacagagcaagagactagatcttcctcttccatggcgctgataactgtaatagacccaaaagtagaagagactgacaagaaaggtaaaggccatgaaatcgaggacgataaagaagaagaagaagtggaagagcaggagatcgaagaaaatggttatcctcacatcaaactcgaggattttcccggtagttcagagagctttgagatggtggcgaagttctgctacggcgtcaagatggacctctctgcttccaccgttgttccacttcgttgcgccgccgaacacctcgaaatgacggaagagtattcaccagataacctaatttccaagactgagaggtttctctctcattccgtctacaagagcttgcgtgaatccattaaagctctcaaagcttgtgagtcagtctctcctttagccggatcgcttggtataacggaacagtgcatcgactctatagtctccagagcttcctcagctgatccttcactcttcggttggccagtaaacgatggcggcggaagaggaaacatctccgccaccgatctgcaacttatacccggcggcgcggcgaaatctcgaaagaaaccgagtagagattcgaacatggagctgtggtttgaagatctgacgcaactgagtcttccgatcttcaaaactgtgatcctatcaatgagatcaggagatctgagctccgatatcatagagagctgtttgatttgttacgctaagaagcacattcccgggattctacgttctaaccggaaaccgccatcgtcatcttcaaccgcagtttcagagaatgaacagagagaactactggaaacaataacctctaatcttccattagataaaagctccatctcctcaacaacgagattcctcttcggcttattacgaaccgcaatcatcctcaacgccgccgagatttgccgtgatctgctggagagaaagatcggatcgcagctagagagagccacgctcgacgatttgctcgtccctagctactcatacctcaacgagactttatacgatgttgatttggtagagagaatcttaggccactttctcgacaccttggaacaatccaacaccgccatagtcgaagttgacggaaaatctccgtcgctgatgctcgtcgggaaattaatcgacggatttctcgcggagatcgcatcggacgctaatctcaaatcggataagttctacaatctagccatctcactcccagatcaagctcgtctctatgatgacggactttacagagccgtcgacgtatatctcaaggtataacaataaaattcaatgtgaagagaagatcggagaatttggatctgatttgttttgaaaatttcgttttcttcaataggcgcatccatgggtatcggaagcagagagagagaaaatatgcggcgtgatggattgtcagaaactgacgttggaagcgtgcacacacgccgcgcaaaacgagcggcttccgctacgagccgtcgtacaagttctcttcttcgagcagttacaactccggcacgcgatcgccgggacgttattagctgctcaatcgccgtctacgtcacagtcaacggagccaagaccgtcagcggcaataaggaatctaacgataacggaagaggacggtgatgaagcggaaggagaaagacaggtggacgctgggaaatggaagaagacggttagagagaatcaggtgcttcgcttggatatggatacgatgaggacgcgtgttcatcggttagagagagagtgctcgaacatgaagaaagtgatcgcgaagattgataaggaaggttcatcaccggcgacgacgactgatcggccgagaagttggtcgattaccaaaaaattcggatgtaaattcaagacacaggtctgcgattcacacgaagcaacgatggttgatcatagatcacgacggtcttgaattgttttcgattgattttactctttttagtacagaatcagaaagcatattgttgtgattcttggattttagtttttgttaatccttcgagattcttgctatgcgactgctctacacaaatgtgcatcgttttgagtcttgtactcgaattagtaaaaccagaaatgacatacggcacaaagcccatcgttaaacgtttcgaattgagcccttttctcgacttcctccgaatgggccgtaacaatgggcttcagttgcccttatctatcgtaaactgggcactgttttggagagaaattgtttcatatttgtggaatgtgcgccgttttaacgtaggaaaagagggacgaactactcgctgttcagaatcggtagtaggacttcatgtcgttttataaaggagagttcctaaaaacctaaaccctactttagttctactatataaatcaaccggctttggctgagaagaagccattagcacaatccgagtaccgaatcaaacctaagtctctgtaaatttcctcgttttccgtagatttagttctttgtcatcccatcttattagggttattcgtttaatttcgtttgaatcagttgatactctctgattttccaatatgtgtttgaatcggcatattaatctttgatcgactcgattttgtgtttttagaaaataatttagatttttttagagaaggaaaaatattctcagtgatgaagaaacaatagatgacgagtccgatgaaatccattcataaaatcgtggggacaaacgaggcatttgtctgagaggattatttttcttcgttttagcattctaaaatatctaggttttaggaacgtgtataaaggggatttctcagtgatgaaggaacaatagatgacgagtccgatgaaatccattcattaaatcatggggacaaacgaggcatttgtctgagaggaatcctttttgttcaattagttttgttttaattagacttagcaggaagaagaaaggcatgatgaggattgttttattgtcatctgattcttattgatgaatctatacctcctactcattctgagtgccttctcttgctcttaattttcagtcacagatatcattgcattagtagtcactaaattcggattcaattatattgactctagggaacactacatttcaagtgaatctacagatactctaataatataacacaatctgctaagaccaagtgataaaccaattgaactaacaaaaaaaataagtttatgaaatcataactatttcttgatattaaaaaataacagcaaagatgccaagttcatataacataaggccttcaaggagaaaccataacttgtaatttcaaactgtatactggaaagcagactgtgctcaatgtggttttggataattccctgcatcctagtcctgaagttgaagcaaaacctctagtattggcattcttacatatgatgagttaatttctgagagggacgtacattctgattcaggctctaaaggatcgattaagatttttaatttatcaggaccaaatcagaaaaaatttatatgatttctatctgtatacttagaacagcatccataaaagaaaaatgttgttgaagatcaattggacattggacaaaaacctagtgggccgggccttctttgcatctactacttgaaagccttaaaaaagaaaattaattgaaaattaaattttacatttaagtgttagcatccaaggcccattagctcagttggttagagcgtcgtgctaataacgcgaaggtcgcaggttcgaaacctgcatgggccacctttaatgtttttacaacataacaatttttgattattttatactattatacaggtcagcacccctgactgagacagtatccatatctccacttcagatttcgacacgtggcaacaaaaaaaaccagacactccgattcccacgaaacaaaccaatcaaaatcgttgccttatcccaatcttatctcagcccttttgattattactctttagtctttactttgctcacagctttggatcaccaaaaaaaaaactcaagagagactttgtggccatggcagcctctctccaatccaccgctacattcctccagtcggcgaagatcgccaccgctccttctcgcggaagttctcacctccgatcgactcaagccgtcggcaaatcttttgggctcgaaacttcctcggctcgcctcacttgctccttccagtctgactttaaggacttcaccggtaaatgctccgacgctgtcaaaatcgccggattcgctcttgccacctctgctctcgtcgtctcggtaactttctttaatctccgactctcctttaaaactatagattaatcaagaaaaaaaaggagaattgagtaacagagaagaagagtattttgttgtgtttgtgataacatgtttatgatttgcattactatgtatcgaagttggcacttgagaacacctaaaccaataacagactcggatagtataatagaaggagaaaccgctattccaattctgtaatcttcgattcatgtagatacaatcttcttggatcagtgagtttgatttaaagttgcttgtttctcgtgtaatgaaagggagcaagtgcggagggagctccaaagagattgacctatgatgagattcagagcaagacatacatggaagtgaaaggaactggaacggctaaccagtgccctactattgacggtggctctgagactttctcgttcaaacccggaaagtatgcaggaaagaagttctgcttcgagcctacttccttcaccgtcaaggcagacagtgtaagcaagaacgctcctccagagttccagaacacaaagctcatgacccgtcttacctacacccttgacgagatcgaaggacccttcgaggttcgatttcgcgtctttgcttagactgcaagaaaaaactctgcttagggttagggtttgtgattgatcgtctctttaatgagcaggttgcttcagacggaagcgtcaatttcaaggaagaagatggaatcgactatgctgcagtcacagtccaacttccaggaggtgaacgtgtgccattccttttcacagtcaaacagcttgacgcctcaggcaaaccagacagcttcaccggaaaattcttggttccatcgtaccgtggctcttccttcttggacccaaagggccgtggtggatccacaggatatgacaacgccgtggcattgccagctggaggcagaggagacgaggaggagcttgtaaaggagaacgtgaagaacactgccgcttcagtgggagagatcactctgaaagtgacaaagagcaagccggagacaggagaggtgatcggagtgttcgagagtcttcagccgtcggatactgacttgggtgctaaggtaccaaaggatgtgaagatccaaggggtgtggtatggtcaacttgagtgatcatgttattatattttccgttgattgtgtttgatgataatgataacatcttttgatgctttcttcgtttatctctcttatataaaatgcacatgcctaagatcttgaattttctgtatatccatgtccttcatcgtaaaaacagtaccgattttaaccttacggtctatgatgagaaaagcataaaaattgtttgttatcgactaaatctggtttggttaagacttaagagtctattggaaagttgtgaagcacatgttaagcagttgaggtgagtctctttgtaaaggtgaagatgagtttatatatcgtactacttgtttaaactcaataaactaggctaagttagcatttatcagaactataaccaaatcgaatttgttgtatatatagattggtacagttatttatcaccaaatttagtccacttcgaaccaagtcaaagaaaaataggaaatgcacatccttaagaacctctaattgtcggttaaaaaagactaagaactgttcaaaacttatgatctcaaatggtaataatagaaagaactagccgttgtttgtttgtttttgtctcccttcaacccaaccctttgtgtatttttcctacactatattatccaatgtttgggccttaaaacatgttatcagtccccaatatgatgggctttcttgtataagttccttttttcttcatctttttataaatagataaacctccatttgacagtaacaacaaaaatatacatgactggattgcatggtactcctgtgatatagtattttataagaaattagttagatgcatcgggtggcgagtagcaagtggaaataatgttttaatttttgaaaataatttagtcttaatccgccactgattacgctgtattttaatgtgcatggggtgtgaatattatataaacaacagtgtttttgtttaacctataaattaaaatatataatggtctgggtttggtcttacatctcgaaacatgaaagaacacagacaattacgttggcgtgggacacagcacataacaactgcagatcgcagacagattctctcttaagtatcaaaccattaaaccactcgtattagtctaattagtcagattagtttatcttcctagggacataattctattttatatttcagatagatcggattcatcgcaatgcatagtacaaatcttacattcactcggccaaaattttcagatcttgtagcagtagattgtatgagcgtgtgttagtactacctaatcacatgttcgaaatctaaaatcactattgttttatagcaaattaatttatagatattaaagacagtaacaaagaacttcaaaaaattaccataagagtattatcaaataggaacaagaatgtgcctcgtgctcgaaatggaagtatatcgtaagcaaaattgtattattgtctaatttcacctcatggaataactattgttggccttatatatgtttttgtcattaccgtggcagattaatatccactagacctgagtgacctgacgaaccattatttaaatattcaaacaaaatggttataggaacttgggacaagtttttacgtatgtaaaaacaaaagatatatcagacaaaatcaagtaaaatatttaaaaaatcccatcgtaaaattagacatcggtggagacgtgggtgatttcagtcccacaaaaacataggaaaaaaaagaaagatatttttgtgtgtgtgtgaataattctctatattcagaagtatagaggggtagggggattagatatttacttgtcgaccacttaaatagatattttacttaatcattaacatagcaaacatagcaaatgatattttaaaagtgatcagtcacctttaacacaaaaagaaagacgaaactcttcaacgaatcgatatgactgaaatcattaaaccatgcaatataatatcgtaaacacaatacaaaaatcaaattctatacagcttttgcataccgtccaaatccaccataaaaatagacactataattttaaaggtcttcctaataaatgccacattcatgcaaaataaaaaaagtaacaataaaaaatgaaggtaggtgactcttgtatctaccaaaagggtccaaaaagaatctaaagggacccaatcacacatgccagcctgaccagccccaatagtcttcacgtgagatctaacccaccggtgacgctaaacctccggccaactcaatcttgtctgcttgccggtcctgcctctgtctgccacgtggcatcttcctccctcacaagtcaccacctatgctccttcctctctcattattcgccacgttctctctccttatttcccgaactacccttcacgtaagggtccgtttcggcagaaactataacccaccatgcgctgtcatgtttacttgttatcactacacgacacttcctacgtggacttagattcttgatgctgtcttcttcttcttcctttagtatatataaactcgtcacaaggtcgtctctttcaattcacaatcacaactcttaagaataaatttaaactcacgagtcaagtcagagagttaaacgttttcaaagacacttaaactaaaaatgggagcgtgcgcttcacgtgaatctttgaggagtgattcagcgaagctgatattactcgacggtactttacaggagttctcatctccggtcaaagtttggcagattttgcaaaagaaccctacgagtttcgtctgtaactcagacgaaatggacttcgacgacgcagtttcagctgtcgccggcaacgaagagctccgatcagggcagctctattttgtcttacctctgacgtggctcaaccatccgttaagggcggaggaaatggcggccttggccgtgaaagctagttcggcgttgaccaagagcggtggcgtcggttgggtttccggcgacgacgatgtaacgacatcggaaaaaacttaccaaaagaaaaacattgccggagttaagacaaacggtggtggcggaagaggttgcggtaaagggaagaggcgattcacggctaatttgagcacgatcgccgagtagggtcaatttagtcattttgagaaaaatggaccgacgtataaattgtaattagaaatgtttgactttttttttatggagaacaaattatccagtagatgtttttttttattgctcagtaattgagaaatgggcacgaggatgaagatattccattgatgtgattccaatcttaataacattgcaatttcgtagctatataaatcatttcatgtgtaatattatccatcttgttaaattttctaatctctaaaatttcataccgtttgtgtttaacatagtttccgatccaatccaatccagcaaagtgaaataatttcgaatgataaggctgttttgcaaaatgccaaatatggcggaacaatttttatttaagaaacaagataaggattattaatgatcagatatgcttgatgaagttgtggtccattcttacttctcttctgcatatttatcacatcggtttctcattatctctatgcattcgggactactaatacaacaatagcacaaaaatacaacgtgacaacaaaaacaaccgagtagaaaactataaagacaacaacatttcaaattctctgttgccactaatactgaaaatccatttaaattttctttttgtgggttgaatttgcaccatataaaaatccaataatacaaaagaaagcaaatatacatgattggatattcttcgattatgatgtcgaacaacaacaattattaacatgtgtatagtttggcaaaaaatgaatatgaggtaaagagggctggacccattggccctataagcattaatgggcctgaaagcaacaacagaaattggaattaaataacgttgggtatctgtctgtcacatgcaacacagacaacttgagaatggatcaatcaacattcacgtgccatgatcctctcttcctcttattttgtctccttccaccaatcccatatctttctctattatacatctctaattatctcacttttaacatatagtttttttatacatctttaatgactatataaaccaaacactgatctttttcaggttgcgaataaaccaagaatggctttaacccatcacatcatcttcgtggcacttcttgtcatctccgtcaaagccatctcaccggcggcgaaactgaaacccaaacaaatcgtttccacttctcctccacctcctccaacaatctctgcagcagctaaagctttcaccgatgcgcacaacaaggccagagccatggttggtgttccaccactagtttggagccagacgttggaagctgctgcgagtcggttggctcgttaccagaggaaccaaaagaagtgtgagttcgcgagtctaaaccctggaaaatacggcgcgaaccagctttgggctaagggcttagtagccgtgacaccgtctcttgctgtggagacttgggtgaaggagaaacctttctacaattataagtcagacacgtgtgctgcgaaccacacgtgcggggtttataaacaagtcgtctggagaaactctaaagagctcgggtgtgctcaagccacgtgtacgaaagagtcaacggtgttgaccatttgtttttacaatcctcctggaaatgtaattggccaaaagccttactagcaaattgggattcatcatcaaaagctttaaataaagagagaattatatggtttttttgctaatcgtttggtttatctaaaaatcgaatattattatgctatgatctgattgatgttaagctgtgaattaatgccaagtaactgtgagcagacaagatccaatgatctctcttctcttccatatcagagagacagaaacaacattataataatcagaaagtggggacatagacagcgatatcttatatatatacacacactctcttctatatattatgaatcttggaataatttcatttggcagcttctctaagaataagatatctaaatgtaaagctgtgagggatccaatcaattgtctttcgtggtttactagtactagattgacatctctttacacatttccttgaagactccggtatactccggttaaccatctctgtcaaacccgccggacataaaccggagtcttttgcaaacgtctccacaagctttggcaataggattctctgcttgcgtatgcttaagttcattcttatgtactcttctttcgacgtttcaagctcttgctggattcttttcggtgtatatacacgaacctggttgaaacaaagacgcagagacttgagttttaatagcattaaaggattttttgaagtgtttcacagatcaatggtaagtaccgcgggatcggagtggctgcctgaagtaagtgcaaaatgcaggagaggctcaggatgatcgattgcataagctaatctttcatcccctgctttgaatttcctcgaagcaaatagtagtctaagccactaagaaaaatgaaaagaacgaatcattattatcatgcttttgttctttgaagacaagtgtttcgaagttttatgatttatcttgtgtacctgtccaggatgagacattttgcacccaagaatcgaactttgtatcgcttcggcgctaattgtgtgtccaccaatgttatatgcagcctgaaaaaatgtgaaagaacgataatttcagaatctagaaatgatggttcaactgtaatcattctccttgcaagatatgtttgttaccttgagtagaagtaagactctcttcacattgttctgtggaatcccataagctaaaaacgcctaaaatatattcaaagaaattttgataagaaaccaaaatgtaggcgtatagaaaaactgagataagttcttgaaagaaagaggttttacatgcatcacaagtgcattgtgcacatttatccaaaacgctagcttctcttcatgtttcaacttccttggatcgacttcctccaatctactaataagtgacctgcaagagttttaaatttcaagattatgcatcattatatcccaattcacttcctatcaaattccaccctcatatgtaacaactcaaatgtctaaaaggacgagctttagtctcaaggcgactcacttgaagttttgcagaagatcttccacctcactggcctttttggcgtctctgtaaatgcaaagcacttcaacaatgctgctgtaaggtccactgaagtccttttctccttctacatggaaagagttatctagccgaacatcaaaagaggagctgtttccgaatccagggctcgatgtatcgtattggtcagagggcgaaaatgcacttgatgataaagacgagtttggagatgaaagcccacgatgtagcacagaaggtggctctgcaagcttgcagtatatttctgacatgcacttgaccattccttcagataacttgttgggtgtttctggaacatgatccgagattcgggtgccaagatgttcagctagactgattaggttatctccattctgcacatacagtggctgtgagtgacaagagcggctggctttaccccaagaatcttcgggagaagcttttctactcccaaatgccgaacgttgagagtgactacggcgaaaactggggtccatctggtctcggtcaaccgcagcaatctctgttttctttgattgattttgattatcatcaagcagaggaactgtgtgttgatctgttttcgagggggtatcatcatcttcagaaaagtctagacgccttctaggggttgtaacaggaggagattttggcttcttgttctctaaatttggagatacagaagagatttgctgctcaaaggcttttctgtataatgaaagaagatactgttccaaatgtataacttccatttcgagcaccgcaacgtctttgattaaatcagtagctggctgaagatgaaatcaaaaccaagatggcaattccttataatgcacaaagctcatttctaaacaactcagttttgggaaatgtaagtaactgaccttaggcatggcaatgtcgtttgtttcagtcagtacgtaagaagatgctgttcgataacctaaggctttctctaatgcacaacgaaccttaaactgatcttgtaatcttgtctcgaggtgagtaatctgtgattccaatcacaggacaagattattgagcctaaccaaccaaacaagtcagattattgagcctaaccaacgaacagtacacatacctcttgcttcaatgaagtctccgtgtttgaatgatattgattatgctttgattcatttgaacgtcccatgtcctaaaccaagtcagaaaaaatccgtaaacaaataatctgtctcacaagaggtttagtaagaaaatagaaacagctttggactcacttcatttcatttataagagagattagtttctaataatgtgataccagaaaggaaattcttttaaaaaaatgtaagacaaataagaagcatacaaagatgtatagcgaaacatatgtgtaaaaggcttttcaccaaaaagatgcaaatgaaaaaagcagcttgggggaaaaaaagatactaattagtaaaaaaaacagaaagataaatccaagaaggcaagagaatcatgtctcagcgtcttaggctgttctttaacaaataccaatacactttatctcaactttaacaagtaaaaaagcaaaaagagatgatagtactcaccagcttcattcgttgagaggcttcatgagaactatttgaggttttatctccttcaactcttttcttttctggaaagctggcactgttcagagagagcatttgcaaagaaagaatcactcttaaatccaatgtgtatcagacaaaattttaaatcgttagttcttcacccactacactagcaatatttaaaagttataacagactcattatcttgttcaggaccacaaaaaactgtaacaacagaagatctgaataactttgcaaccataactctcaaaattccagtttctaccaaacccatggcagcaagggaatccattaacagaaaagagagacacatttctacaagttaagaagtagttgttaagaagtggacattttacctctttgaacgcttgtgattttggacaatcctcaaatccaacattctaccacctccaccacctactccaaatcccatttgtctcagaatgaccacaaaggagctgactttttctccttagctaaagagttacagcaaatgtttcaagagactgtagcgacaattatgtcactatccaaagcagagcttctgctagaaacccataaaaagcttgagcttcaatgggagatagactgaaaagttggggactttagaagaaaaggcaagtgaatcttcttcacctgaaaaggccaacggaaactataaaaacttgcgaatcttcaatcttttagcaataaaggaggaagctttaaatattaaaaatgaacaaaagaagcgtggtgggtttcaattgaagaagaaaagttagctatggctcatgttttcatggaaatgggtagggagaagaagagaggcgactcgtgtcaaaagaccagtcaccaatgtgtacacgaccccacgagtcgtcgtcaaattctcaaccaaatcggccaaaaaaaggagagagctagaaatctacatacatggtcaaaatcaaaatagacaaagtgacaaaagtgtatttgccttggaaataaaagttactgtggtgcttatcttcatcaaactagataaaacatttattattcttaaaactatagattatgttaatgtatattataataataataccctgctttcatagattagctgatggtctattcaatattcataagttttaacaactaaagatactaaggaaaaaagaatataaaatggattcacaaagtagaaaaaaaaggaattgatttgataagtttacttgttgggaagcaagtcagagttgttgaccgtccctctaactcctccacagttcttaaatcacatggccccattggcatgaaactacattcttacttacttaatgttaatgtaatcctattcatacttttagacttttagttctattcaaagtatacaaaacttcaactgaatcataaattcttttcgagtcaaatttggttgagtagataaaaaagattaccaatggtaaagagacgcatcaacagcagcagcagaagccaggacataggagatggtactaccgtctacagtgagacatttcaacgaacacatagtctgcaataaacccgtgaacacatattctccggtttctgaaaagccaaaaatcaccgctataataacattaaataaaatccacccgaaaccaaggacatggtcgaatgcatccaacacaccatcaaaagaaagaaagtgataaaattccaaatgtaactcgctcaacagagataaagaaggtggaagacgacagaaaaaaaactgacctcaaaagaaatgaaagtaaaaaagggttaaaaaggaaacatcaaatttttggaaagatggtatcttttgggttcttctgacttgtctaatgtgttttttttttggagagaaaaattgacaaatgcgatgtccggagaatttgtttttgtgtgagaagtggactttcgtttgtcaaagaatccacacacgaacccattataaaattgtaaatgtgtaaacataaagtttttttattttctttagtgtttctccgaagatcaatgcataaaaaaaggtgtgggacaatccaggtcttctctatattgtcgtcatacgcttcaactagtcgttatagaaaaaaagtagtatactataacgttacgtatccgatccgattttggttttgaaatctttgatttttattattatttggaactgggcctgcatctgcatgtatatgaatattttgcgagtgttttaagtttgatgagtaatggtaagagtttaacaaagagagtattggtaatggtaaactaacatatacgtaccttgtttttggagcttatcactaatcacctcgaattgtgaataacgtcggacatatattcacgatatccgagatatgttatcttagccatattcaagaaatgcgattgtttttaaactttgtcggattgatgtcatttacttttgtggatttatatccagaggaaatacaaaatgagggggttttgacatcagcagagcctctggttcttgggcctttggtgctggggccttttgggtctttagaatccatcgtcacaattcaagcctcattagtcatttctgtacagaaaaagcctaaacgtcctacgcaatgttcatttcatttttaacaagaaaactattatcccaaaaaacttacattaatatttttcatcgtcacaatttaaattcaaatgtggaaaatccaggatcctagtgatttaaaatcgtaataacataagaatcactgtcagtacgatttatctactcattgatcgcgatggaccaacttagtcagtacacgtatctttctatcctttctactcatattttataatcttagtaaaaattgattgtatccttataatatgttattctccttttgtcgtaatattcgatggcaatgtatgtatatagaaaataaacatgagtcaaatctctcaaaaataaaatacagaattacaacaatataaagaattgtttttgaagaaagtttctaagaactcgactgtgccggctcacataattaactaaactttatatattcataactttctcgttggactcataaacaagatttttaaaatttaacgcttaagaagcagaacagctacattccgtcggtcaattatcgaagtctatgcaaaaacaaaagacgagaaatactcatttgatcgaatccaaaatatgaacgtattcgaattcagtatatggtttaacttatacaaggagttcgaaattattccaaaggcaaagtgaagatagattgaaattacgattaaaaaaaaaaaaaaaaaagttatcgaacaaagatgagaattagacatggaagcaagagaacaagagcctgagacaagacttgagcgagtttccaaatgactcactcgtcttcttcatcttcatcttcatgacctttttgttcttgaaccacttcctctgtttcttggccgacaagatttcttcatcgtcgtagcccttgaacgtgtagcttctgagatatttctgtctgttggatctgtagacgtcagggcttatgaatctaacgtaatctcctggtgattgaaaaggtacgtcatttgcactcatctccactctgtttgtgttttgaacatctttgatcatcatttttgtgatgtgtactattttttttgttttgtcgacgatcctctattaattctctctacctttatatatcgtagcctgttgacaaaagaaaatgattataaactgtccttttgaagattgagaattagtcactgtgttgttaatacgactttgtaagttggtacagcgtaggataattgttttaattcagttttattcatttttattatttcgtacacgtggaggtgtaaatgtggggattattcaagagagccatacgtcactcgccgacacctattttatatgggcttaggcccattgttttctatatcatatacaaagctttttaaaagtgctaatatagaactcttaccaacgaaatatacccgaatattattgttactctcaaaactcaccttacaattattattttttggtcgggagaccccctaatttattaaataaaattaactcaaaactacataaaaaaattaactcaaactcactttacaatgttttttattttaaaaatatttaaaaatatattatatatatgtaaaacatattgaacctaaaacatcttttaaagatttcatattatggacgggatgttatgtccaacaagttacacatatataaatattaacattttgaaacaaaaatattatatatattttaaaatataaaataatacttaaaaattgaaaaatttaaaattagtggtataaatacaaatttttaaaattatattaaaatataaaatcaaaagtgttaaaaaattatatatgtgtaaaacatattgtaaacatcctccatgatgatttgacaaaaaaaaaaaaaagtcctccatgaggatcactattctcattaatcaataaagaaacctttttaagaaagtgttaaacatattgaacataaaacacctcttaaggacctcatgctatgaacgggatgggatgttgtatccaattagtttacacatatttaaaatttaacacttaaaaaccaaaatattatgtatatattagaaaataaaacattttctgttatgtaaaataatactttaaaaatcttaaaccttataatagtagtataaaaatattaatttaaaaatatttttaaataaaaacacaagtaaaagtttatatgtgtaaaacatattgtgaaaacaatttactttttaaacaaattgtgaaaatcttgtgataatcaaaagtattatgtatatttaaaaataaaatattttatataaattattacttaaaaatcaaaaacaaagtttaaatagtggtataaaatacaaataaaaaattaagtgttaaaaatttatatgtgtaaaatatattaaacctaaaacacctctgaaggacctcatattatggacgggatgatgtatctaatagtttacacatattgaaaatttaacactaaaaaatctattaaaaacaaaaatcaaaacaatttacttaaaaatatatttgtgaaaaccttgtgataatcaaaagtattatgtatattttttaaaaataaaatattttatctaaattgttacttaaaaatcaaaaataaagtttaaatattgatataaaatacaaataaaaaaattaagtgttaaaaatttatatgtgtaaaacatattaaacctaaaacacctctgaaagacctcatattatggacgggatgatgtatccaatagtttacacatattgaaaatttaacactaaaaactctattaaaaacaaaaatcaaaacaatttacttaaaaatatatttgtgaaatctttgtgattagttttaaatcagaaaaataagaagtggaaaacataaaatctttttgttccttttttaaaaatcaaaatcattatctttattaaaaagaaaaagggtagtaaagtaatatacctagaagtctgtgatatcctcaggcggcgactcgtgcttgttctgaaacttgaaaccacaaacgagagcgtcttggtgttttccttcgccatcctcttatttcctcgttgtctccggtgaaagcatctcggtggctagatcattatccggtgaactgaaatcgatcttgttttttactgtagacgacggtggattgatggagattatcattcaatcaatgaaacgatgatatgcttttcggctccgatcagtcttaaatcttacggatgttacagagatcatcatcatcggcttctacttggatcatcgtcgtcggcttctacttggatcatcatcatcgatcggaatccacagagtttatgtataaagagagagttttgatttgtctctaaaagaagaagatgaaaaagggtgaaatagagagagttttgatttgtctctcaaggaagaattagaagaagcgttgttgagactgcgtaattaagagacctagtttttatttataaggaaagaggttcaaaagaaaaaaggaaattggtaatcacaattaacggtcacataagatttgaccccaaaaaaaaataacggtcacatgagatttccttttttccttggatggcttttcatgggtttgttttctttgtttgttacgtgagagaatctgatgactttaagtaaagtgaagaattcactcattgcatgatccgatcataaaaaaacagagatggagttgatgattcgatcctcaaaagtatactaaccacaacactgtcttctttcatcaaaactagagagtagccgaaaaatgaaaactttattgattacaatctgactttctgcctccaattggttaatcctctctactagcaattcatctttctcattctttagcttctctaactcctcaactgcagctaaccgttgcttgtttaagataaggatatctaaaatacacaacaatacattcgggtgagttaactttcacatatgaaaccgaaaccaacctcaaccaaatttctttacttttttgagcttctataaagaggttccatatgtccttatgttttgcttcttttataatagaagattgtgcaagactttcctgtgaactaaaccagttacattctgctagaaaaatcaggaagtagtagtatacttcaaaaccaaagaagagtaacctgagaatcatcaaactcttcatgcccttctgatcttgaatcaaaaataatacagttcaattatagagaagcaaaatcaatctttgcagcacaaatcagcaagattgaaaaaggttcacttgtaacttctgtaaaccaaaattattgttaattgactttaattaagatatacgtcacgtggcaaaaccagctggaccacaagtgtttttttaattgactttcttgtccatgtgcctgcgtttactcctctttctcaaatctttcctcatttgctcactcccattctccagttgtggaaaccccccaaagacatggcatttgaaccttttgagtcatcatcagcgtattcattcacacgacgatttaggtcagcatttatcttctttaattcttactttcacttgatcctttttatctctccgcgtcgttaattgtgaaagtggagagctttacataattccccaaagtaaaaagcttcgaattttaattctcataacaaatttcacaacaggtcagcctctaatttggggaattctagaaaaccctagtggaaaattttaccaatttgattcttttaagtatacaagatgacaagttttgcttcttctgcttggtgctgtaaaaatttctaagtttagatttaactttgtgtaaatgcttggcttgttaagttaatttttgtttttcttctaatcctttggtttcagagaatgtggtgtttgtcctgctttaaaccttccactaaacatgatccctctgaggtaattcaatttatttggctctctcttggtttcgtgaagattgcttaacttttgacctctgaaacttgcaggatcgttttgaagaagaaacaaatatcgttacaggtatttctctgtatgaagatgtcatcttacgtcagagaagatcagaagctgatcagatagaatgggctattcaagatagcttcaacccgcaagaaacttctcgttgtcgtcagcgagaggaggatgatcagatagcgcgtggtttgcaatatgtggaagaaactgagcttgataaatcagttgtggacgaagaagatcagcagctttctaagattgttgaggagagtttgaaggagaaaggcaaaagtaagcaatttgaagatgatcaagtggaaaatgatgaacagcaagctctgatggttcaggagagtctatacatggtggagctttctgctcaacttgaagaagataaaaacatttcaacaatacctccgctgaatgaagatgcgcagcttcagaaggttatttgggaaagcgcgaagggtaaaggccaaatagagcatttcaaagatccagtggaagaagatggaaatcttccaagggtagatctcaacgttaaccatcctcataggtaagtgtttgtctattactttggcggtttccttgcatgctttattacaagatagaaatgtcctgacctggttaagattatttcacttgtagcatatgtgatggttgcaaatctgcgattgaatatggaagatctgttcatgccttgggtgttaattggcatcctgaatgtttctgttgtcgttattgcgacaaaccaatcgctatgcacgaggtttagaaccgtatatgaaagcttccttttttatagtgattggtactttaatatactaattgagttgctcattatgttttctgatgcaacatctaactcctgagggctacttagttttcaaacacaaaagggaggtgtcatataacctgctacgagcgtagtcacccaaactgccatgtctgcaaaaagaaggtaacttcccattggggtctatgagttgaaagttaaataattggtatcttataacagtttacgacttatgtataatctgttgtacttttcctggcgatgatggatcttaatgtaattgtattcagtttcctggtagaaagtataaagaacatcccttctggaaggaaaagtactgcccttttcatgaagttgatggaactcccaagtgttgcagttgtgaaagattagaggtgggtttactttcacttcaatatgaatattggcaaatgagcatgagataaagaatcaaccgccatttcaaaagaagaagtaaagctttctcatgatttttttttgtttgcagccctggggaacgaagtatgtaatgcttgctgacaatcggtggctatgcgtaaaatgtatggaatgcgcggttatggatacttatgagtgccaaccattgcactttgaaatccgtgaattcttcggaagcttaaacatgaaggttgagaaagaattccctcttcttttggtggagaaagaagcgctgaaaaaagctgaggcgcaagaaaagatcgtgagtacattttttgaactgaaaattccttatctctctatttctctttcactcatatgttttgtgagtttcaaaacaagcaggacaatcagcatggggttgtaaccagaggtatttgcctgtctgaagggcagattgtcaatagtgtaagagcttatagggggtaacacttacttgagactaaaactagattggattcatgactttaactctgctctggtccacatatacaggtctttaaaaagccaaccatggggccaaacggcgagctagtaagcttgggtacagaacctcaaaaggttgttggtggatgtgaggtcactgcaattctcatcctatatggacttcctaggtacaataatcttttttaagctcatctcatccttctaagtaatctcacgcaaatagactaaatcaaatctcttttcggacacaggttactaactggatatatcttggctcatgagatgatgcatgcttggcttagactcaatggtactactagtacccaatttgtatttgccaatcaatatggagagagctctcaactaaaagtgctatttggtttgatcacaggttataggaatcttaagttagagctggaagaaggaatatgccaagtgctaggccacatgtggttggagtcacagacatactccagttctgcagctgcatcatcagcttcttcttcttcgaggactccagctgctaatgcatcaaagaaaggtgctcaatctgattacgagaagaaactggtggaattttgcaaggatcagatagaaacagacgattcaccggtctacggtgttggattcaggaaagttaaccagatggtctcagactccagcctccataaaatcctgaaaagtattcaacactggacgaaaccagattcaaatctttgaagcacctaatataggacaaatcgaaacatacctctctagaacatatatatacaaacgcacacttatgtctggtttttctttctggatccaaaatacaactataacagaaaaatagacatgagcacgtccaattatataactttctattttcagcacaatatcatttcatagtacaattatgacaaattaagacattgcatgtgtgctgctacataagtttcaatatcgaaaaactatgtttcacactttcttaatttaatttccagtagttgcattgtcattttcacaaaattaacccttttacttatatcatattttgaaactttcttatatttttttaatgaatgatagttagtaagtggctaaatgctataaatattttcttttatttatttatcatgattcttattggatgttgttgacaagaaaactagtactatttgattggatacagtatttcgcattaaggagctgaaacggcaacgtttcaagagggagggaaataactaattaaaatcgtctcgaaagggtaaacaattacgaaactgccaccaagaaatgtgcttgcggcacgtgtgcaaaaaaacagctggtctttcgctttggaccacaaaaagtaagtgtgtgtgtgtgtttctctttcttctccacacgccttgcattctactactttctttttcttttcttctctcaaaaagaccaattcaacacagtagctgctcaatggtctttcgaaacttctcgaaattctcgtggaagacctcgcgaactttccacttgaggaaaagaatcggaaaccggtttgggctacaacgagacccaaaaagacatggcctctgattactattcatctgacgatgaagggtttgggtaagtgttgactttttttaataattatctcaatttcggtcgagtcgttagttattaactttgacggctcggaaaaagaataatcctttgtaaaaggttcatccatcattaatgtgtcgtcgttcagaaccgtgtctgcacaaaaattggggaattttagaaaaacacatgtgaacactttttatcattatagtctctgcattctactttcagctcaaattcgtccaaggttagatcatgtcccgtttcagatattttcaatcttctgtagacatagattcttctttcttttgtttcatactaagctgtgtttcatacctgtatcaggttgttgttgttgtctttgtgtctgtcttgttctttatctaatgtcgatgtcttagtttgctgagatgatcgtcaacatgtttcctaactatgctgtgaactttcttaacctagttttcgtttatttgattatagttcaagcattttgcctttctgatgtaaattgagatgtttggcttggaaaagtgaaatcttttaatgttctcccgatccttgggttctcaatgattgattcgtttgcagggaaaaggttggtctgatcggtgaaaaggttggttttcgaagatgtggtgcgtcccctgctgcttcaagccctccacttctgaggtaaatatgatatgtttggttgtttcttttgtctcagcaaagtttggttccaagtttgtctttttccctttctagactttaacttttggggtctgaaaacatgtaggatcgttttgaagcagaaactattcacgtcatagaagtttcacagcatgaagctgacattcagaaagctaaacagcgttctttggccactcatgaagctgaaaagcttgatttggccactcatgaagctgaacagcttgatttggccattcaagaattttctcgtcaagaggaggaggaggaaagaaggcgcaccagagagttagaaaacgatgcgcagatagcaaatgttcttcaacacgaggaaagagaaaggctgatcaataagaaaactgcattggaagacgaagaagacgagctgcttgctaggactttagaggagagtttaaaggagaacaacagaagaaaaatgtttgaagaacaagtgaacaaggatgaacagcttgctctgattgttcaggagagtctgaacatggaagagtatcctattcgacttgaagaatataaaagtatatctcgtagagctccgttggatgtagatgagcagtttgctaaggctgttaaggagagtttgaagaacaaaggtaaaggaaagcaatttgaagatgaacaagtgaagaaggatgagcagcttgctttgattgttcaggagagtctaaacatggtagagtctcctcctcgacttgaagaaaataacaacatttccactagagctcctgtggatgaagatgagcagcttgcaaaggctgttgaagagagtttgaaggggaagggtcaaataaagcaatcaaaagatgaggtggaaggagatggaatgctcctagagttgaatcctcctcctaggtaagcttatgcgtttattgctaattttcttgtattcattatctcaactcttaagtatgtccacacctggttaaagaatcttttgacttgtagcttgtgtggtggttgcaactttgcggttgaacatggaggatctgtgaatatcttgggtgttctttggcatcctggatgtttctgttgtcgtgcttgtcacaaaccaattgctatccacgatatcgaaaaccatgtatggaactgtttttttttggtatattaatatactccttgacatgttcgttttgttttttttgtttgatgcaaaacctaaattcttgataactatcttaggtttcaaactcaagaggcaagtttcacaaatcgtgctatgaacggtactgctatgtctgcaaagagaagaaggtataccattttaggattctcagtagtaatttgtcatggtgtcgatgaatgtaactgtaactgtattctttcagatgaaaacgtacaataatcatccgttttgggaggaaagatactgccctgttcatgaagctgatggaactcccaaatgctgcagttgcgaaaggttagaggtgagtttacctttcaaacaacaaaacacggcaacggggaatgatatgagatccagaatcaaccaccatattgaataagagaaggaaaccataatcttcgggtttaagtttcttaggatcttggcaaattttctttgcagcctagggaatcaaactatgtaatgcttgctgatggtcgatggctatgcctcgaatgtatgaattctgccgttatggattctgatgaatgccagcctttgcactttgacatgcgtgatttcttcgaaggcttaaacatgaagattgagaaagaatttccttttcttttggtggaaaaacaagcgctgaataaagctgagaaggaagagaaaattgtgagtacattagttatttgaaacttccatctttctctctctctctcactcatatgttttataaaaaatttacacaagcaggactatcagtatgaggtggtaaccagaggtatttgcctatctgaagagcagattgtcgatagtgtaagactttatcttgggtaacacttacttcagactaaaaccagattagattcatgactgtaactctggtctggtccacatatacaggtctcccaaaggccagtcagggggccaaacaacaagctagtaggcatggctacagaatctcaaaaggtaactcgtgagtgcgaggtcactgcaattctcatcctatatggacttcctaggtacttttacatctcttccacctcatctcccaactgagtactctcttggctcaaaatcaatctatgttgaaacacaggttactaacaggatatattttggctcacgagatgatgcatgcttatcttagactcaatggtacgtaaatggtcaaatatccaacatttgtaacgatgatgatcatgaccaagaattgtgagggagaggtctctaagcgtttttggtttgatttgattacaggacataggaacctgaacaacattttggaagaaggaatatgccaagttctaggtcacctgtggttggattctcagacatacgccactgctgatgctactgcagatgcatcatcatcagcttcttcttcttcccgcactcctccagctgctagtgcgtcaaagaaaggtgagtggtctgatttcgacaagaaactggtggagttttgcaagaatcagatagaaacagacgattcaccggtctacggtcttggattcaggacagttaacgagatggtgacaaactccagcctccaggaaaccctgaaagagattcttcgccagaggtaaagacgatcccagattcaaagttttgaatttgccatacaagacacgtcgacacatacatacataccatatacacatatatatatatatatatatatatatatagattcagaacaatgttttcaagctatcaccaagtaccctttttttcttgtccggcgtttccttctttggtgtgtttttgattttgggaatgctgcttctttgtttttgttgtgtgtaaaccctttttcatcttaatcccgtaaagttggaaacctttggaggattctgcgttcagcaaatgtatcttcgttcggattaaactccttagtgaaactatttcttgcgttgctaattattcgttacaggtccgttataaatcattccccagggaaatagttttatgcatttttgttcaacattttagagaccaccatgaactacatattaaattactctaataaaatgatatatcctgttgcaaaatcatttattatctgggtgttaattatttttgtttccctttttacgcaattgccaaggcaagaacgaaggtattttctacaagtaaagtagtaaacaaatacaggccccacggagaggcagtggtacgtacgtacgttgttcttttttgttttacacgcgttttactatcgacaatcagttgaccatttcggttctagtttctctctcgctcaatttgtgagagctcttgaagaaggaaaaacaataccatgccgatctcggatgtcgcttctttggttggaggtgctgctttgggagctccactttctgagatatttaaactggtaattgaagaggccaagaaagtgaaggactttaaaccattatcccaggatctcgcttcgacgatggagagattggttccgattttcaacgagatcgacatgatgcaacaaggatcgaaccgaggtacgagtgagctaaaggttctgaccgaaacgatggaacgagctggggaaatggttcataagtgttcacgcatccagtggtacagtatcgccaagaaagctttatataccagagaaataaaagcaatcaatcaggattttctcaagttctgtcagattgagttacagcttattcagcataggaaccagttgcaatatatgcgttccatgggcatggcaagcgtgagtacgaaagccgacctactgagtgatattgggaatgaattttccaagctttgtctagtggctcagcccgaagtagttactaaattttggttgaagaggccattaatggagttaaagaagatgctttttgaagacggagtggttaccgtcgtggtctctgctccttatgccctcgggaagaccacgttggttacaaagctttgccatgatgcagatgttaagggtattaccgtatacccaaaatcttggtttcccctttttttattggaataagagcatgtttctcatgtcgtctacttttggcagaaaaattcaagcagatcttctttatctctgtgtcaaaattccctaacgtgaggctcatcggacacaagttactcgagcacattggttgtaaagcaaatgaatatgagaatgacttagatgcaatgctctacattcaacaactgctgaagcaacttggacgaaatgggtctatattgttggttttagatgatgtttgggctgaggaagagtccttgctacaaaagtttctgattcagctacctgattacaagattttggtgacttctcggtttgagttcacaagttttggtcccacttttcatttgaaacccttgatagatgacgaggtcgaatgcagagatgagatagaagaaaatgaaaagcttccagaggtgaatcctcctcttaggtaagcttatgcgtctattgctaattttcttgcattctttatctcaattcttaagtatgcccacacttggttaaagtatcttttgacttgtagcatgtgtggtggttgcaactctgcggttaaacatgaagaatctgtgaatattttgggtgttctttggcatcctggatgcttctgctgtcgttcttgtgacaaaccaattgctattcatgagctcgagaaccatgtacggaaatgttcttcttttgacaattgtttggtatattaatttactccttgacatgttattttttttttgtttgatccaaaacctaaattcttgataactctcttaggtttcaaactcaagaggcaagtttcacaaatcctgctatgaacggtactgctatgtctgcaaagagaagaaggtataccattttaggattctcagtagtaagttgtcacggtgtcgatgaatgtaactgtaactgtattctttcagatgaaaacgtacaatattcatccgttttgggaggaaagatactgccctgttcatgaagctgatggaactcccaaatgctgcagttgcgaaaggttagaggtgagtttacctttcaaacaacaaaacacgggaaaggggaatgatatgagatgaataatcagccaccatatcgttaaaacttaaaagaaggaaactagctagataatcccactggtttgagttcttatgatcttggctaattttctttgcagcctaggggaacaaagtatggaaagctt

SEQ ID NO: 974 - DNA, 62927 bp, Arabidopsis thaliana
agtgatggtcgatggctatgcctagaatgtgggaaatccgctatggattctgatgaatgccagcctttgtactttgacatgcgtgatttcttcgaaagcttaaacatgaagattgagaaagaatttcctttaattttggtgcggaaagaactgctcaataaaaaggaagagaaaattgtgtgtacagttccaagctaaaacttccatatatatatatctctctctctctccactaatcgtttcgtaagtgttttacacaagcaggacaatcattatgaggtgttaatcagagcttattgcatgtctgaacagaagatcatgacatatgtaagaagctatattttacccccttaagattctaatactagattggaatgcatgacttcaacactggtccacatatacaggtctcagaggagccaaggacgggtcagaacaagcagcttatagacatggatacggaacctcaaggggttgttcatgagtgcaaggtcactgcaattctcatcctatatggacttcctaggtaatgtaacatctccttccaactcatctcccccttctaagtactctcctgcgccgatagactaaataaaatctgagttcaaacacagattgctaacaggatatatcttggctcacgagatgatgcatgcttggcttagactcaatggtacgtaattggtcaaatatccaacatttgtaacgatgatgatcatgaccaagaaacgtgagggagaggtctctaagcgtttttggtttgattacaggacatatgaacctgaacaacattttggaagaaggaatatgccaagtgctaggtcacctgtggttggagtctcagacatacgccactgctgatactactgcagatgcagcatcagcttcttcttcttcttcccgcactcctccagctgctagtgcctcaaagaaaggtgagtggtctgatttcgacaagaaactggtggagttttgcaagaatcagatagaaacagacgaatcaccggtctacggtcttggattcaggacagttaacgagatggtgacaaactccagcctccaggaaaccctcaaggagattcttcgccggaggtaaagacgatcccagattcaaagttatgaattgccatacaagacacgtcgacacatacataccaataccatatacatatagtcatatatatacagagccatgttttcaagctatcactttttttcggcgtttccttcttttggtgtgttcttttatttattttgggattgctgcttctatgttgctgtgtgtaaactgtttcttcttcgttttcccgtaaagttggaacctttagaggaccttgcgttaagcagttctatcctctcggattcagttcttgcggcgtatccattcccgcttaaaataaagcaagtgtttttagtttttttccccggttcccttgttaattttccggtcaaattgttttacacagtcaaatctttctgtgtccattcctcttttgtgtcgtttcattgaagcacaccacatgttcgaccatttgtcccaaccacgagattcttcataaccatttggtttcttaattctttttttcattttgattgtcactgtgatttcagatgttttctatcatcttctcgaaccctgtcaagccttttaactccgtaattatccatcaaattcgattcttttcccgtgacccattccccaacaaagtccagcactacctttacagagcaaacctcatcgactctatccgtcttagcctccgctccccaacaacctcagacaggacactagcttctcttctaaaccaccgtcttctcgattcctttgtcgtcaaaaacgctttacgctcatctccttctgtgtcttctgcttggtctatcttcaaaactcttagtcacaaaagccctcgcttttcttttgaaactgagacacttcacgcctttgccactgttcttgcaaagtttcagcgatcttcagagcttaactctctaattggagttgtcaatgcttggaaattcaggaatgttcatttcagctttatgaatctcttgaacttgtatgcaactgctggtgatttcgactcggttcttaagacgtgggacgagtatagatgctcaggagaggagaagaaaggctgcactgagtcttataacattgtgatgcaagtttacatgactttaggtaaagactctgaggctgtacagacttttgatcagataatcaacgaaggagggattcctaattcaagaacattcactattatgattgagcatcttgtgaaattggggaatcttgatgcagccatgaagatttttgagaccttgcctttgatgaggattacgcggactctgaagcattattcggttttggttgaagcctttgttgatgcacaacggtttgatgaagtcaagactctgattgctgagatgaaatctgatgggaagttccctagtagacgcatgcttgagcccctgaaacgcatgagggaggctggttttgaacatgaaacagaggagtttttgagagaaatgttgccggatgagaggatcaaggacatttctatgtattctatggataatcccagcgatagcgaagacgaaggagacgagtacaaagatgatgttaatgaagctcaagttaagttgaagccatggctggatccaaaagctttagcaacttcgttaaagaagtggagctctgatgcagtcactgctttggaagaagctaacttcgtttggacaaatctattggtctgcaagatgctaagaaacttcagagcacctgaaacagcatggagtttcttctgctgggtggcgattcaaccaggattcacccacgacgcctatacgattgagagaatgatggctatgttagcacgcaatggccaagttgaactggtcgataagctcatctcgaaagtgagaatcgaagggatcaaattaccattcagcaccatcaggctgatcattgatctctacggaatttcaaagaaaccggaagcagccatcaaggttttcaacgaagacagaacactctgcggttcgatatctgatttcaacctcatgctgttgtactcatccctcttgagaacattaacaaaatgcaagagaaacgcagaggctttagaaacgctagaagatatgatgttgacaggagtttctcctgatatccagacgttctcgggtttaatgtaccactttgcattgcagggagagattcaaacagttgagagacttttctcaatggtgagacagattggtcttgaacctgatccgtacatgttaaagcttctagttcaagcgtattgcagatgcgaaagatcagtgcttgcttacagagtgttccaagacatgaaagattcgaatctgatgcctgacagagagacgaaagagctgcttgttaagagtttgtggagagaagagaagcgaaaagaagcggctgcggttgaagagagctacgaggaagagaatgataacaagaatagtagtaacgttttgcgtttggcgttgaagggtcatgtgtggaccattagttctacagacatttctcgagtctacaatctctaccgcgattgtgttctgaaaacttcgacttgacaacatttattctaagtttcgtttttattgggcccaatgatcgttaaaggcccatagagtctgttgctgatatattatcttaaagctggttggtaaattaatgggtcaacgccattcaaactaggcaaacaagaatatacaaccgtgcctcacacgctctcatatcttttctttgatcgttgatagttactttttggtcagtattcggactttgactatgagaaccacgtgaatggcccattcaaataggtgtaagtgtaacatctttttatcctttttttaattaggatcatactaaattaataacaagaatcataaattccattggcaatatttgcgaaaacatataaattggcaatcaaatcatttgtttttgaaaatcagatagtcaaaatattctatactgtatattgaattttgcaaccgaaatcatttacactataaatcgatttttctttggtttcaaccatagaagattatctaaaaccgatccagggattatgttcgaaataaaataaaatataaaccatcatcatctcaaaagaaaaatactatagtaagcctaaaagtgaaaaaatcacacctagccactagcatataaagaaacaaaaacattttcatatattaccaaatgttgagagcacatgggagctgttatattatattattattatttgacgttgaccacttgaccatctaaatgaaatgggatgaatctctctacgcggtacctaaaaaaaatccaaaaaagtaactttaacccaactttacaaaatttatattttctccaactttacaaattaattatttttacaaaaaaatatgttaattatattatttctctataattgtgtacggtcgcctccgtagaatttattcattagagtagccaaaagtaaatatttttaactttttagaaagaaaaaaaattaagccttaaactgtgtaaatttcgcaaatctacttttacataagaaaccttagtattttagtgttctactgatatggtactttaggaatatactgatatgactgacattctatttgattttatcctacggcctgacaaatctgaaactctatacattctctgcaaatgttgtgcctttatttaacatttttataatatagtttttcttttctctttcccttgtatataaaaccttataagaaaagctaggccactagtgcgctattctccctcctctctgctcccctagtatctctctctgtctctccctctcgagattaattcaaacatgaaaagcaaattggctctaatatttcaggaaatttcttaaacatttcattgaaactttggcgaagtttccatttagagtaaagcaaagaattagatttaatttggtgtttctttggccttttttccccctttgaacggtggagaagtgaatttaagagtatgtcgtgttgcttctcctgcttcaaacatgatccatctaaggtttttagattcgttttctttgcttatattacaagtcttttaatttgaaaagtcctggtccatattttgatttctaggcttacctatgtataacttttaattggcaagccaggatcctttaaataccgccttggtaatttcacggtatgaagaagaagatcgcatggtacgtcggaaaagacaagaagaagatgaaaagattgagattgaaagggttaaggaagaaagtttgaagctagctaagcaggcggaagaaaagagaagattagaagagtcgaaggagcaaggcaaaagaatacaagtggacgatgatcagcttgcaaagactacttctaaagataagggacaaattaatcattccaaagatgtagtggaagaagatgtgaatcctcctcctaggtaaagctatatcctatatatatgtgttccactgcgcaattttgtatttagagatttttggctcaaatcaagtattgttttactttacttgtagcagtattgatggcaaatctgagattggagatggaacatctgtcaatcctcgatgtttatgttgttttcattgccacagaccatttgttatgcacgaggtctaaaaccatacatacaacttgcaaactcctttgtcttgttgttttctgatgtatataactccttagattttgaagaagggaaaatttcacatagattgctacaaggagtactaccgtaatcgcaactgctatgtttgccaacaaaaggtaaataaattctcattaattagtttggttttacagattgtagtaaagtgaacagaattggtttatttatgacttaatgaatgtgaaatacaactctttcagattcctgtaaatgcggaaggtataagaaagttcagtgagcatccgttctggaaggagaaatactgtcctattcatgatgaggatggaactgccaagtgttgcagctgtgaaagattagaggtactaatataatatttgatcgagtttagttataaacagagaagaaaaagccttgtggcttatgacttgtgatttgcagcctaggggaacgaactatgtaatgcttggtgatttccggtggctatgtatagagtgtatgggatcagcggttatggatactaacgaagtccagcctttgcactttgaaatccgtgaattcttcgaaggcttgttcttgaaggttgacaaagaatttgctctgcttcttgtcgagaaacaagcgcttaataaagctgaggaagaagagaagatcgtgagtatatttagaaaacacatccctcatcactttgtaactcatctttgtttctcatatttatgtcaatacaaacaggactaccatcgtgcagccgtaaccagaggtctttgcatgtctgaagagcaaattgtcccaagtgtaaggccaatcaatatacacactttcagagactaagagcaataatgtctaactagattttcactttggctccacttctatatatacagataataaaagggccacggatgggaccggacaatcagctaataacagacatagttacagagtctcaaagagtgagtggattcgaggttacagggattctcatcatatatggacttcctaggttactaacaggatatatcttggctcacgagatgatgcatgcttggcttagactcaatggtacgtattaactatgatttctcatcaccaagagacatggagagagtacctcttttattttttttgtgattttgatcacaggttataagaatcttaagttagagcttgaagaaggattatgtcaagcgttaggtctcagatggttggagtctcagacatttgcatctactgatgctgctgctgctgctgctgtagcttcttcctcttctttttcttcttccactgctcctccagccgctatcacgtcaaagaaaagtgacgactggtctattttcgagaagaagctcgtagagttttgcatgaatcagatcaaagaggatgattcaccggtctacggtctcggattcaaacaagtttacgagatgatggtctcaaataactacaacattaaggatacccttaaagatatcgttagcgcttccaacgctacaccagattcaacggtttgaatcagcccatacattataccaacaataccttctgaagaaaaaagaagaaaatcataataattaattgattcccatttgtaaaaataaaaagaaaggatttcccgtaaaaaaataaggaaatcaaaatcatatttttcttgaattgcagtttttttggtcaaaaaaatatacgacagttttttgtagttgtcggccgacatttatcaaaacaaacatatctcacaaggacaacagaaagtggagaaagatttacaaaaggttttggctcgaaaattgaaatgtcttaacaagttgggaaaagaaaaaagttggaccagaaaagaacttgacaaggttgatttttcatttttgaagagagcgatagtttggactactactatatagtatgagagattaataagtggtctgtttttcaataattgactatactgtttcattcataaagtataacattaataatttaaagtttatatctttcgtattaattctactgttcatattaatgtttaaattacatattagcacttaaacatgtaaaatataattaatattaatagaatactcctaaaatacacactattacccatagacatatacgtttagtctaaagtagaagcgaaaaatgtactacctaaaattcttagaaaaaagaagctctcgagtcgtttgacggataaaacaagaaagattgtagaaaaagaatgaaattcgttgattctttcgttcaacaagagaaaccgataagaataaaaagtaacgtaccacatctgtttcattatgtaagatgtttaaacaatcttatcttgtttcattttatttaaaattttcaagttttatgcattttttaatactatatatatcttattgtgttggggctatagcctataggtatcttgcgtgttatacaatgtgtgtttcgttggatttataatttctgcatcactaaatgctaaaacacgcccggtgaattattctttctacaatgttacctatatttcgtattttttttgtgaatacttggaaatacgtgtgttccaactgtatagtccatgctttttagttttgtaacagaaatttgttttttctcttagttgggatacaaacgtgtgaataaacacttattacgtatccacccattttgaattaagtttgccatccacacgggcacggctggcacaattgtgcatattcatacatttatgattcattcattttagaagtcaactgatccaacaaaaaataaaaaaattggaaatattatttactttcattgttagtttagtagtaataattaattgatttagttatttagtgttacccccgcatgagaagacttttttttatccctctaaaactaattattctctacgaaaatttcagtcgtctatacattaatttagcatccgatttaggaaaaagaagaagaaaagaattacgatcaacaacgaccagatttagtcaaatttggacgatgcatcttctgtagcttggtaaatcgatcgatatcgaaatcaagcattttaatcaaacgtttctgcttcgtctcgaaccggcttttgtaaaaaccttcaaaggaaggttcctttgaagttcggaggaagaaggcgtaaccagccatgaaatatgtcgaagttacgtagaagcatatgggttccatcacgtcccacgacagttcccaaaacgtcagcctaaaaaatccaactgtttgggccattattaggcctaatccggcccataattcttttcgaaccagatcatcggctcttttgtcgatatctgattttatgatctcaagttgttcgaactcttgtcttgtctcggcgtcgagactgggttcgagtgtcggaatcagaccagccatggcgcttgttagctgtaatcacacagaagaagaagaacaaattagatcaagaatgttaaatttgatttaagaatttgcaatgcatgtagagtttaattacctcttcgggtttaaggcagacgagttttcccaaaacgatgacgtttccagcttcgtcaagcatattcgcgacccggttaccttgttcaggatccgaactgtattctccgcagacccgaacaaactccgaataaggaacccagttcttgccaatctctctcagcttcgatttcaccagctccatttccgctgctctcatgagcttcttcacgtcttccaccgtgaccgccgggaaaaactccggtgatgatttcttcggcgaaggtggcggtaacatctcgtcgagtctaatacgattattattggacaaagtcaattccctgagtttctccatcaagttaccacctttaggaactatctccggcgagaaaaatgccctcttgtggagaaatctgcggcggattccagaatctccggcgtcgggaggaatgccgccggatttggtcggacgcattcgggtaagaccagaaatcctggagtaggttttggaaatgttgaagagactttgaactagggatttcttcgacgacatcgtcgatctctcaagatacgttaaaaaatgaaggaaaaaagaatcaaagaagaagaacaaaattggttttgatttaataagatacagagaagaacacacggttttgtatattggtccgagattaaaacagagagacttgagcttccttttatattagcgttgttggctcagagcaacgacgcaacaaacgagaaggctcctctgaaacagcttccttatcacgatattttgacacgataattacacataggcgataaggcgtcgcttatcgttttctcattttttattaaattatttcttaaaacgcttgttatgatacagctaaacaaagttaaatatataattaacgagtttcataaacgtatgaatactagtattagtatagaaccgttatcataaacgtattgaaacaacttagaaccgttattagtgtaacaatacactttgtttaatcataagtgtgaactcgatggatgtgtatgaaaaatctcaatcattgaagaaaaatttaagttagcattttttaaacatgcaagataataatacatatatgtttatattgcacatcaaattatttgataaaaaaaaatataaaatccacgttttatgtgagttttgggtaaccaatagagtaagttctctcttgagacactggagcacgataaattgggagattagattgtcaagtcacgggaaatacattatatcggtcacctaaatggtgatgaccgtacacgtggcaagctaagcttccgacgtcataagcgacttgccacgcattgccgtccgatctttcttttttgagaaaaatcttattaacacgcgaagtcttccaaagccaatcagatcttcttcccattgctttcccagttttgtttttattattatagattttgtaataaatacatcttgataatggttcactaatactaattcgtctaaaaccttttaaattatatcagatgtaaacggttttaatataaatttaagtaagttatttattaaaatgtggtgttccataacacgtagatttagataagtgcaagcatcatctctgtattttttgttattttttaaaaaaaagttcggtggaagtatgataagatatagttctttttcaaatattaagccaatgcggaatatttcagtactggattatgaagacatgagtgaccgattccttatgcaaccatgtatttgttcgagaatatgcagatgtcacaaattacaaaaagttcttagtggaagacattaatgatctgtttgtttgagagttacagcagtatgaatgttataatatctatatattgcagtttaaatttgaaagagtgtttaaaaactagattatgaattcttgtgtatttctgtcattaaaaccgtttatgataaccaaaccaatagattttttaaaaaaattttcccctaaacccaaaaatgatcatttaattgttaaccatcaagggatagccactttaacgtaaaacggacttataaatgatattagagaacagtttattaattaataaagaatctaaattaacgaaaaagtgaaagaaaagaaacaaaaaacgggaaaggtggaagttagtaggttgaataaaaagcatgaaaatgtgtgaggactggacacacgtaaacgagtcgccacgtaaatgctaaagagggtttggaatctgtgtgtgtgtgtgtgtgtgtgtgtgttgtagggagagagtgttggggagttgatatctaaggagggtttctttagacttcagagctataccaaactcctcacgaggctccatctccttaatttctcgtggggtcgttttttcggttgtttttgtaataaacaaataaatcaataaaggatggtttgatgaaaataaataaaaagatggattcttttaacgaagctacctcccccagttgaatgatataagcttaccgtttttattcatccccacactctccttttcttgaccgtcaatttttatttcttaacaaattacgaagtaaccgaatttttccaacttacttttgctgtccaaatatatattattttctctagaaacttatatccctcatcgcaattttgtaaaatttgaaattacaagtagcactaatacataaactctcttcttttttacctttttgttgtgtgtggcgtgaattattcaaaatcaaaaccataatgttgaagctagctagtggaataagatatattcagaaacttatatgataaaagaaagaaggaaaaaaggtatggcaagaagtatcgaggtggtttctgcagatggaaggaacacttgatgtatatacatttgacatttatttaatcagattcaaaggcagtgcttgtatattgtaatctacgaatgttacaaatatatcaccagattgacatgttaccttgatgtttaaattttaagtttttgacaatcaactaaaaattaagataagatggtatgttcggtttatactttaaaatatacttgaattctttgttcataattataagatgttagaaacgagaaataataattttattttattttagtgaaaaccatttttttttttttaaatgagtttaaatgtcaaatttacattatatgagaacattgtcaaacttcgaacaccgcaaattaagaatgtggtacttacgcgcggttagtttccgatgtttttaaatttttttaaataatagtgaaattaacatgattttaagttaaaaattatatattatttttttaaagtttaagttttatttttttagtgaaaatcataattatttttttaatagtttaagtgtcaaatctatattatgtgaaaacattgccgaactacgaacacatcaaaatttacagatcaattaaggattggatgcctaggcagcgtaggcgctgttagtttccggcattttcaaattttaacacttaaactaatttttaaaagtaatagtgaaatgaacatggttttagttaaaaattagaaattattttccttaaggacgggatgcgtaggcgcggttaaattttgacgttttaaaattttaacacttaaactcattggaaaaaaaaattgagtttaagtgtcaaatctatattatgtgaaaatattaacgaacttcgaataccgcaaaacttacagaccaattaatgacaggatgtttaggtgcggttagtttccaaagtttttaaattttaacacttaaattaatttttaatagtaatagtgaaattaacatggttttagttaaaaattattaactattttcttaaagtttaaattttaaattttttagtgataaaaatgagtttaagtgtcaaatcaatattatgtgaaaacattgtcgaatttcgaacaccgcaagacttacagaccaactaagaacgggatgcatatgcgcggttagtttccgatgttttaaaaatttaatacttaaactaatttttataaagtaataatgaaattaatgtggttatagttaaaaattattaactattttcttaaagttgaagttttaattgttttttagtgaaaatcattattatttcttcaaaataagtttaagtgttaaatcaatattacgtgaaaacattgccgaacttcgaacgccgcaagacttacggaccaattaaggacgggatgcctaggcacggttagtttccgacgttttaaaattttaacacttaaactagtttttaaaaataataatgaaattaatatggttttatattattttttatttttaaaaatgttttagtgaaaaatttaaactatttaattattgttttaataaaaacatttttttagaaaaaagaaaaagaaaaaagagaatgaataaagaaatacctggtgacgacaaaaaaaaaaaaaaaaaaaaaaagaaatacctggttggatttggatacaaaaaaagcccaccagcgtgaggccattttgcgtctgaaagcccaccagcgtgagcccactttgcgtctgaaagcccactaccatgagcccaccttgcgtcgttgttgttggaaactcgtctgaaattctccgtcttcttcttcattcgtaatctgagaagcttctttgtctttgatgattgctttcttcctccagcatcgtcgtcaatggaaacgagaatcctttgatctctcctctcagtcgtctctctctcgccatctccgccgtcgggccatggtcgtcgtcaatggaaacgagaattcgaagcccaccgtgtcgtactctgagaagtttcttttcgtctttgatcaaaaattgatagtctctcatctctttgtctcttgtacttggattctttgattgggatatcttcctcatgttagagttcctcctaggtcgagatcggaatctcaaaaaccttgttaggtgcgaggagaagatgtggggagaagtaattcaattaatcacgaatcatcattcatcggcgatcagctattaaaaagagatttttgttgccgtttctcgaagaagaaagaagatgaaggtgaatagagaattttgatttctcaagaatgaagaagaagaagaagaagagcgtgatatatttataagcaaccacaaggttctcttgggttattttctttttttcttaagcagagtatctttgcttcacttaatgatgatttgatattaatctagccgttgggatttttcactatttgtaagaaattagagatccgatttgtttaataatattgtagaggaaatctaaattacatcctatttccatttactaatctcaatctaaccaataaggaaatttcgtttgggttgtttcattttttcgatgattttggtttgttttccattcattgatataacgtttaaaaagaatcatcctttttttgttcacaaaatttaatatcaaaaggtaaggagaacatggtgattggtgaatgatgatcaattaataaggtgaagaattttcaactccataactgttaattaaaaataactttttgactttcgagtcttgcttgagtgtaaacactgctaaaccctaatatctttgaaacgccaccattgatgatattatttaccttttctacgaaactcaattagcaggtaacccaaggatgtgttccagaacaagaagtcttcccaaagcaatgaatttgctacacttagccgcattttcaccaacttcttccattttctcagtaaacccatctacatgcttcttgattccttgcatcgcaagtcccatcgcctcctcttcttcttctctctccacagcaaagtccacagtctccagaatcgacgaaacccaacttctcagttcatcaacatccgatcttatattcttcatcgcttcattgttaacttgcactctactctccatcgtcaaaaccaatcctctctgtctcttcacagctttctcgtactttttccacatctggctaaaccattttcctgttatctcaatcggtgcggtcgatccagaggcaaccgcacacaccactggcggtgcgctcattgtggttgcaaccacagataagacaagaacagagacatacgcagtagcgaaaaacacgttagacaccgtcctcaatgtttttacattcctctgcttcttatcaagctttcttctctgcttacgcaactcctcaagaaacaaaacctgctgatcatagaccgagtcgaactgagtcaccaattcaccatcaaaagggtctcccatagctttaaatttattcagctcctccaaggttttcgtatacttcttcttcttcttatctcctccaagatccgtgtccactgactctgcctcgaactgtttcaccgcgaaccgaatgataagttggctgatttctgttctcttgacacaattctcgacggtattgcagaaatctaaggtcttggaagtacttttgaagtagacatcaaccaaagacttaagatctttgttcttccagacatcttctctgctttcaataatgactcttactgcattttggtttagttcaagcagaaatccgtaaacctccatgagtgagtctaggtttaaagattgagtctcggctcgagcagcgagcgaggtgatgattatgttggttcgttggtgaagcgaagaatcaaaggatttgaggttggagtcttttttacaagcggatgtgtaagaacttaggtcagatgagtatttagaccgcatatctgtcctgacctctttaaccggtaaagtgcttggtccgttcctctttgaactggattctccattcatgagctctgacaagcatccacagaactccattgatataatctggagctaatctgacttcagaaatgccaaaaccaaaaggtagatacaaagaaaaaacagagattcaagaaatcaggcagagttataaaaaaagaagcaaggatgtaaacggatcaagatgagctggagttgaagagaaagagaaattaccaaagcttgtattagaatctcgctcaggacaagacaggacatgacaagaggagcttacttaagttaactcaaccaaatatcaacaattactcaaaagatggacacgtcatatgttttttagtggaaaaacttgtcataatgaatgtacatttacttcgactttgttgagttaattgtttttggataaaaggtagcttagttgagtaattcgttgaaatgtcatatcaaattatatgcagactgaagaaacattactctatatatgagtttgaaattcatttacatttggaaaatgataagttgcatacacatacagatttgcgatgtactcaaaagagagtttgtgcaaaaatcaaaatgattgtgtgatcctcaattaacttgatcaagagaaaaaaaaagcagagaagcaaaacacatatatcattttttaaacaatcatttaagttaaatgggcgagacaacatcacagaataaaactatagtgggactgaaaagcccaacttaaaagcccataaacaatgatagaaactgcttgacccccaagtctcgagtgatcaaactccaacaacgtcaatgtcttttttttttttgctaagcatgttaatatcattaaaatgaaaggaggtattacaaagagcaaaaacctaatatagagtaatcttggcaaaaaaaactaaaacaagattacaatactgaaatgggtagtgattaaatcaaccaaagaagcatcaaatctctccaacgcttcctgtgtcgccgagccgttatggtattccgaatctctcgatcgatgaacgtcaatgtcttttaaacgctactgataatatttgcagctcctccttctacgatgtgtaaaccaaggatgtgtcccagaactacaagtctccccaacgcgatgagtttgctacaattagccgctctttcaccaacttcctcgattttttcagtaaacccttctactttcttctttatttcttgcatcgcaaatctcgtcgccatttcattttcttctctgtccacagcaaagttcacggtcttcagaatcgatgagatccttatgctcaggttttcaacttcgaattttatatttaccatcgttacattgtttgcttgcaccccaagttccattgttaaaaccaaacctctctgtctcttcacagctttctcatactctttccacatcttgttacaccacattcccacaacctcaatcggtgtggtcaatccagacgcaaccgcactcaataccggaggtgccatcattgctgccgcaaccaccgataagacaaatacagtcacaaacgcagtggcgaaaaccacatttgacaatatcctccatgtctttatattcctcagtttcttaccaagctttactttcagcttacgcaactcgtccagaagcaaaacctgctcatcgtagacagacttgtactgagtcacgaactcgccatcaaaagggtctcccatggctttaaacttgttcatctcctccaaggttttcacatacttcttcttcttactctctccaagatccgtatccaccgtttctgtctcaaactgtttcaccgcgaatcgaatgataagctggcttatttctgctttcttgacgcatttctcgacggtattgcagaagtccaaggtcttagaggtacttttgaaatagacatcaaccaaagccttgagatcattgttcttcaaaacatcttctttgctttcaatgatgactcttactgtatcttggtttagttcaagaagatatccgtagacctccatgagtgactctatgtttaaagatcgagtcttggcctgagcagcgagcgagctgatgatgctgtttgttcgctcgtgaagcaatgaatcaaaagatttgagggatgagtattttttacaagcggatgcgtaagaactcaggtctgatgagtattgggaccgaatatttgtttggatcgttttagccagtgaaacgttagttccgttgttgttagaactggagtgtccttttatgagctccgaaaataatccacagaacaccattgatattactagtggagctaatctgaccttaaaaacaacaaaatttaaaagaaagttttataagaaacagagttatgtcactgaaattccgaaatctagcataaagaaaggattaatgtaaacggatcaagaaaccgaaacttaccggaacgtttgaaattgtaatccaagacacaggaagagctaattacttctgtctctgacgattgactaatatatatagcctcttgttctaaggtttaacgccccaaaatccacaattagtcaaacctcgaaaatgggcacgtaatatgatttggtcttttttaatgtttttctgtggaacaagctgtcataagaaatgatttcttttttccgtagtctgatttttgtggagtttgttgatatgtcaaaatcaaactatcaacgcaccttgatcaagaagtttaattactctctttaatcattgatttatcttttcctatcatgctccatgttgtgcaaatataggataactatatttgaaatataagttcaaaaacatttttttaataaaagaaaaacatgtgttagaaattaaaattaagtgtaaaccattttttttattttgaagtgtaaaccatattgaatctagaacacttagtttgaatattgtgtctatttagtttacaaaaaaataaattttaaatatttaattagaaaaccttcaagttttaatagtaatataaaaatataagtttaaaaatatttttttagtaaaagaaaaacaagtgttaaaaattaaaattaagtataaatcacaatgaaccgaggacaccgcttagggatttgtccaattagtttacacaaaattttaaaagttaacacttaataaaaaaaacttcagttttaatagtaatataaaaatataaattttaaaatattttttagtaaaataaaaacaagtgttaaaaattaaaattaagtttaaactccaatgaaccgaggacaccgcttaggggtttggatgttctgtccaattagtttacacaaaattttaaaagttaacacttaataaaaaaatcttaagttttaatagtaatatgaaaatataaatttgaaaatattttttagtaaaaaaaaaaattgttaaaaatgaaaattaagtgtaaatcatattaaaccttttaaaaaaaatcttaatagttgtataaaaaattaagaagggttaagaaattgacctcaatttattaatgggcatgagaatgggctttatgttgggctaaagatgagattgcaatcctaagaccttcttctccaccaccgtgtccaatgtccatcacgagaatgcacaagcttccgatgatcttcttcttcatcgcttatcgatcttaaccagttacctactgattctgagacatcttcagttgctatcttcttcatgcttcatcgccgctgattccaaatttccaagacgaaaacactacaaaaccctagttctgaaatttgttcttcttcactcgtactctttgatgacaagatggctgggtccgagaagacacagacgaaagagccagtaaaccctaatttcccatgttctatgtctttgtgcctaacagagaacacaagccgcaagagacgtgatgtggaacagaggaagcgtacggttaaatcaagaaagcaaaggttgctcctttttcacaaacgccgagtggcttgtcaaggtgatgagagacatgaaaaaagccaaagatgctaaattgatctttgagaagactctgatcgtaactgatgtaaacccatcaacggtcggagaaagagtgagaataatgatttctcaaagaaggctgatttgttatatatagaaaagaaacaaatattgatcaccacggtaaaaaaaaaaaaaaaaggaaacgttaggtttaggttcgtcaaacaaaaaggaaatttccattttatatatgttattaaaaaaggaaatcactaatacaaatattgatcacaacggtaaaaaaaagttgccgttacaacaatcatatatctatcttcgcctaacttatttgacctgacttgcgtttgctgtagttaattatagattcaaaaattgatttagataaataaaaaaaaaagccatgattaaaagattatctgcgagttgtggagagaagaaacagaaaggacttttagttttggtgattaaaagtgcaatggaaggattggcatgagttgttcttatacgagattgtgtatatttgtcttctccgaatgcagatccagtttatggagcagaagcagattcttaaaaacttgatttaacatgttgacatcaggctagtctatgtatcgagagagaagcggcatggatatgatcacaacaagaaagcaggttagcttcaatactaagccaaaaaaaaggaggcgacatatctaatatagactatgaattttatttccaattgagtaatacattatgctgtgctaaacagatacagatgtatacaagagctgttacacataacattatataagcgttatgtgacataccacagaacctcttctcaaaaaccaccagtttatgctatgtatctatctctcacaatgtgatagcctcaatcctgaccaaaagacatgcataatgtgagccaaagatccaaactttacacaaacccaacaaaaacgaagaaaccaaaacttacaagtttccttgccctgaatctgaacttgaggggaagctaagaatgtgcctcagaacgattgttctcgccaatgtgatatttttgctacacttagtcgcgttatcacccacttcctcgattctctctgtgaaaacatcaaacttcttgctgatctcgtgcatcgaaagcctcacagccacttcttcttctttctccttgagtgcaaaatcaaccttttgcatcatcgattccatctcaatcttcaacttatctacatgtactcgaatgttatccatgtctttcatggtaacataagcaccaatcctcatcgacagaacaatatctttctgtcctttcacagccgtttcatacttcttccaaagatgattacaccatttccctattgatccaattggaaccgctaacgcagctgcaagcgcagtcacaactggcggtgcagcaacagcggctgctacaacagagaagatcaaaacagagacaaacgcagtcacaaaaaccacattcgagattttcttccaatactttatgttcttaagctttttatcaagcttcctcttttgcttatgaagtatctccagaagcataacctgctgctcgtaaacagactcaagcagcatgaagaaatctccatcaaacggatcaccagaagccttaaacttgttaagctcttccaaagttttcgcgtacttattagtacccggttccacggatttgttgctccctgatgactccatctcaaactgcttaagcgcaaactgtaagagcatttggcctatcctcgcgcgtttaacacagttatcaacagcattgcagaaatctaaagtcttgatgctactatcaaaataagcattgaccaaacatgtcaaatctttgttgtcccagacgtcttctttgctttcaatgataaacctaacgacttcttggttcatttcaagaagacaccctgagacttcaatgagcgcgtcaaaggataaagaccgagtttgagcaccagaggcgagcgagttgatgacccggttggtgcgttggtgaagagaggaatcgaaggattgtaaatctggatcttctctacaggctgaattgtaagcagtaagatctgcagagtataaggaacccatgtctgttcggatctgttgaggaagtggagtgttgttggttctgttcctgctggaatttgatttgtcttccatggttttggagaacattccaagaaacatggactgtctcaggtagggacgattaataagagccaaaaagatgttgacttttatgacaaatagaatccagaaccagtgttttgagcacactttccaaacaaaactagtgaagaacctacagaaacagaaatcttacttgatttgagaaaaatctggtctgtaggaagcagagtgcgagaatcaagacagagttttcgttgcgggaggctggaactaaaactgagatcggatcggtaagtacctgaaaatcgatgaggatccggaagagataagagattgagctgaaatcttagttactctgaaagtcaaagagagagtggtgaaggagagggatggattgtggtgtggggaacaagaagaggagagaaacaactgagttgcttcttctatctttgacttgtcttctctttgattttcccatttgtgtatttggtcgcgagtttgacatgttccacactgtttcgtttagtcaagtcgcattttttaataaaataattcttttattcttcacctttattacactctctaatcagtctcccctctgtgtaccaactacaagttgatgattgtattcgtgcactactcttctagtactataccatatttatgagtccatgactcctgactacaacgagagcaacaaaagtactattcctgggccagtgattatggtttcgttgtgaacccatctgttcattttggtttagatgcgtgaaattgggaatgaatcaaatgatcatcgaaattttgagtttctatcaatgggcccaaatacgaaaacaagtccgtaattttaacttggtttatttttgcttatttttacacaaaaagtcgaaagtattgtttattttgcataaacaccaaccgtttccgattagttcacacagaccccgatactttctgatatttacacgattaccaatgacatcacgatatttacaattgttccgcaaccattatagatacttacatatattaccctgaattgatttatgggttttaaatggttgattattgagctgccttgggcatacttatatctttgattacgggagagaggagaaaggagcagagaaagggtgtaaagttacgttaacatagaaatatctgggaaacaaaaagaaggttgcaactgtttggctaaaactagaaacatatgaaaaccttgctgcccaaaaatattggtctctagttcgaaagttgttttttctcatctaaatatggaggtttggcttactttatgggacttggccaccatttaagggattctacttatggtagaggtagacgaagctgaagacgaagaaaccagccatctgtgtccaagagcaaacgatgaagttaaagattagctttctcagtcgtacctctgtgtgtgtgtgtgtgtatgtgtgaaagtgagaagatagaagaagttagggtttaccgtcgtaaagcaggctccataataaggatacgcagttgggataaatctctcatactcattgtgtctgtaaggccgcaccggaatctgcaaaagcccgcattttttttgcatcatgtcttagtctggaaagtgagcaaaactctaggagatagttagttactcacctgcttcgaaagagataatgtagtgtagcctagcttttcatattcaaccttaaactggaatacaccgtagacatcaggaaccttgaaagatgtatgaaacagaccctgcaaagtaggcaacaaagcagactgagttctaacttctaaagttgaaagcaacttaaatccaaaaacaaaaaaaagacgagatgactctgctttggagatcagaaataagttaccttcttgtctgttgacagggttttcaacacatacgggctcatcatgtaaaactgaacctgcacatcgttagcaacatacggctcccagctctttcctgaccactcatatatctctacagaaaattcctgcaattaacagccacattaaaagcttgccacatattcccaggagattatcacctaagcacacatctttggttgagtcagaagatctagaaccataccaggtcatcctttatcctatatatagctggctcatctgtttctccaaccctatggtgtacaagattaccagcctggacacaaaagctaagtgaggaacgcaccaatgaaggtaacagagatgactaattgaacaaacaagctatcatctgatttatgtataggagtaagcaattaacatctgcagagtcgaaagtttcaaggaaagagcaaaacaagtgaaaatgattatgcatataccttcagatggcccctttcgtggaagacccatttgcttagttcagtcacaaactgttcgttgccagatttttcgtatctgggaaagtgttagataagatcagctaatcttctttcaaaatgtaatgagacatctatcactgacaaaagaatccttaaatctttgtagctacagatcaggcgactaaaagtttgacttgataaactatgtgtctacttactggttcggactccctgctttctggacaccagatctgattaacctgtctcgtggaaaaccaaactctgagtcagaaacatccataggcatgaaatagttggaggaataccatcaaacatttgctcacctatcgctaaacaactgcactgagcctgagatcacaaccctagcattgttcctggcctgcagtttcaaaatatgcatcaaattatgtgaacccaaggcagtgaatgaaactacatttcagaagtggagagctaagtgcagacaaaaacataatagttcagacatcaaagaaatatcgaattatccaggggcatatatagctagttacagaagagagacagacctgcatgaccgagactagcgaaattgaagacccagtgagctgggggggactagacaacttcgagcttgggttagcagaataagctgatggagaggctgaaagaactttcaaaacctaggaatggagcatgaggtatagattagcaaaaagttaattcccagatcaatgtatagttattcatatgaaacattaatcttgtacttatagtcatctactcaatgcaagaaaagagtatgatgttcgacttaccagattgttagtagggttcaacgaatgtgcaactcctctgaagagcacgggagcctgtaaatcataaacacgaacacaaaatgaacttaaagtgtcactcaaaaaacccccaacacccgagatttcatacattatcttaaatccaaaaccatagaagaagcacttgtgaatataagtcatataactcagctagaaagcatggaagttacctcaatcttggtttttcccaaaatgacatcggatttcactaaatcgtcggcagcaatcaaggtgtggtcgccgtcaacatcagagacggagaagctagtatgatcaataaccatagctgaagaatcctaaggaaacaaatggctataaatcaaaatcctaagtcgcaatttgttccaacaaagaggtaattccacattatgagaataccaacctcatcgaaatcaaccccacactctgtggcaatacccctaatcaaatcagatgcagcagtatccgccgataagatcaagtcacgaccggaatcaacaaaatcagcaatggatttcgaatccaaggatcctccaaaccctatacacaacgaaatgacaaatgaccaaatcgatttccaaaatatagacaaaattatcgaacagggagctcagagatcggagatcttacgttctgttgatggggcgaagatgatcaacccatcgtacaagtactggccgtatcgttgaagcgcaagcttcgaatcttcagctaacttgaaatcgagatcgaatccacgagacttgagagtgttgaagaagatagaatgagaggatttgagtgataaatcatcgagaagaacaagaacacgccgatccgtcggattatcgacggagaaagagaagctaagtaaaggaaggaggaatacagagatcaacgcgacggatctcgagaggttcaccatatttggttcctagggttttttcacgggtgtgaagtgagtgtgaccactagagagagagagagagaagaagaagcagactcggcgatggtcgatcgtagaacggacccaggcgttgacgatcacgtactctcaaacgacggcgttttcgtactgctcgaaatattgaaaatgggccgaaatatataatcaaatcctttagtaggctttaaattaatgggcttacataagactttttattttggcattgaagtgggttgggtttcaccaaccaccagaccagatggcagatgctttgatttgcccagttttcatcaatcgttgaacaaattttatttttgttgtatttcttttttccatttattaaaattatttaaaaaacggttatattttatttagttggagtataacttttgttttaaaattagtaaaaaaataaaaaaatatattgtatattttaacaatagttagacaaatatgacagttttgatgactaaatcggtagccaaatttattggatatcaaatgttaattcaattaccacataaccactacgataattagtgatggtcgccaaaaataaccgttattattttggtggttaagtatttgaccaatgaaataagagaattaattttaccgctaatattcaaccaaattctttgaacgtcattgtggtcgctgaatatgttttggcaattgttgatcaagcggtgatcaccaatattgatgcttaaccactaaaaaacatcagtggcagaatcataattttatttcttgcaataaacaacatttatagtggagcgtgagcgaacatgaggagttgcatcatcagtgtttattatatgaggagtttgctctgtatgagccgttggtgtagatggccatgacttttgagagatacttgggaccgcaaataatggatttcactggaagcttttgttagctagaagcctagaactaaacaaagaaaaacaaaattattcttataacttactaaaaaatcaccaatcaaaatgaaaaacgaataaaaatagttatttattcagttcctttagtggtggaggaaagtacaacaatatttccactcttttactatatatatttttttactttttatttttctattcacaattccacttcataaaagttcatccgactaatctttttaaaatcagtataattgtcgaatagttcattcatcgaattttctaatgagcctaaaacaatacaccatttcgactatacatatgaaataatttagtaaatttcgctgttagagtaaatcgacctcctacttatacatgacaattcttcttgaaatagtgaccactaaaccactatcatttggttttcaattcttcgtttttcctccaaacctaaactcggacccaatatttacctatctagatggcaagtaacatcaattattcaatcttatgcattacatatataatatgaaattatcattgtggcaggtgagagaatgattggaccacgtaacattgtgacatgtgatgagtttatttaacttgtcgcgccaattaaatattctaatagtaatatcaattattcactttaattggtaaaaaagaagaagataaaaaacagttcatataatacattatcaaatacgaagtcagaacaagattaagatcgtatcacgtaagacggagatcgactttcttcgttccagccttgacttaccatataacaagttaaatatatttgtctcattagaatcacgggattaatgttacgtaactacggagatagcgtgataagaaatttggttacaaaacattgtatataaaaaaactaaatagagctagttaagtttcaaatctaattttattttttgattaatttgatgatttccttccatagaaccataaataaaattcaatcatttcctctattatgaaatttaattatatattttgttttattagagagcaggaagaatatattacgtaatatcaagaaaatttagtcataagaccatatcataataagcggaattttcaacaacaaacatccaattttgatttactattaactgattattttctctgaccggagtgaccgccattatttagaataatgttctttgaatgaatcaaattttatggcacccaaaagacagaagccacggcatccgtttggcattttatagtgatcttgcattttataattttgatttgtattttcttataaccgctattataagtttaacgtttaaagctctgtatgttcacctgacaaaaatgataagtaaaaaaaaacaataattttcgtgaatctcaatattttcattggtggtcgtaaagccatgtgatggaatagttaccaacgtgagtcgtgatatatgggattagaaaatgtgaccaattggttaccagcaatcaaacaaacgataatccatggttgatgaagaaagtagggttaggtttgtaaaaaaaagaaatggttgtgtggtgatctaataatacatgggctataagtttataattgcattcctgcttattaaggtactttcatcatagaatcaaaacagttactatctttcttttctcctcactttttgtttttcttcttcctttttcgatagaatgtctgaatgtgtatacaattcttttcaccattggaatatgtgctggtcaatattaattactgatttacataaaatataatatcgggcatgtgatccaccatctccaacgtgagcccgatcatgtggtgattaattggtcatttttctatagattcctcagaagatattttatgaaatacatgatcataatattgagttgtatacgacaattgagggggtagctagctcttacgatggaccaatcatctctaagaaaactatatatataattaaagtaaaccaattaattacgattactaaatactaacaaacaaaaccatatatatagggaacgcgaaaaaaatattagatatatatttgattggtttaactttgaatttttaattataacccaaaaaatactcatagttaatttcttttttggtgatatctgtttactttttactctacttcacgttttttttttcttttactctacttcacgttaagttagacaaactcttgttccatttttcattttatacaaaataatataattacattactaatatatgtatcgttatgctgctatgttactcaaaatgtaaacaaaaaaaagagactcggactggtctttacgccagatctaaatagggtcaaccatcgtgctatgcactctgctcaatctgttaaaaaaatacagtctacatacaccgacaataaggtttgtataatatacattatctcaaaaatcaaaaacaggaaacttgggcaaaatctttgaaattttaattatgtatcgttcctacaagttttttttttttaaatggattcaatatgtaacatgttagtcgagtcttaaaaaaatatcatataggtaacagggaaacgatttaacgataataggttccacaaattatataagtttcagctaagttaaataaatcattatgccttttcataattactttatttagtttctgattctaaaagcaacttcattaggggtgtgagaaaggatatctaattctcaaaacaaataaaaattggtttttactaaacaagtttaagaaccatctttcacttgggagattttcagaatcattgagtctcttccttattggttctaattttttattaatcaaaaaatattacttttgttttagctaaaattactattatattgtttagatacttaaccaatggatgctcaaaattagatgagtttctcaatttaatttaaactaaacataatattattctagtaattatacttagtgggtatctaaactaataaagatgctctaatatactatatactaaaacaatatcgacttctacaaacattgatcccataattcaactataaataatgtacagtaatttcttgaccaaacagtatagtgtacctctagaatattgctcaagcatctctgcatatataatattactaatcgccatttagtgtcttcgtaacaccatgtgcacccttagcagacaaaaaaatacaactcacacgcaaaccaaacaagcggttaaactgtataatcgcaattggtatcacttattctagaatgtttccacaccacttctttaacttaattagttttttaaaaaaactaatcaagttttaactacttatttagaaaattacaaaactttaaactaaatatatataattcaatgaagattcagatatgttattgcttttgtctcaatacttaaatttgcctaaaatacaaggtaagaatattagattacatatacagtataattactttatttcattgtttgtctttcaaataatatacaactattaaactacaatttatagtctatatcaatatttttatttataaatgttataaatctgcctataaataagtaagtaacccatatacaacgaccatagaaacacatcattaacaaaacaaagcctctctaaataaaaacaaaaagctaactgaataagaagaagtagtgatgcatatcacaaaaccacacgccgccatgttttccagtcccggaatgggccatgtcatcccggtgatcgagcttggaaagcgtctctccgctaacaacggcttccacgtcaccgtcttcgtcctcgaaaccgacgcagcctccgctcaatccaagttcctaaactcaaccggcgtcgacatcgtcaaacttccatcgccggacatttatggtttagtggaccccgacgaccatgtagtgaccaagatcggagtcattatgcgtgcagcagttccagccctccgatccaagatcgctgccatgcatcaaaagccaacggctctgatcgttgacttgtttggcacagatgcgttatgtctcgcaaaggaatttaacatgttgagttatgtgtttatccctaccaacgcacgttttctcggagtttcgatttattatccaaatttggacaaagatatcaaggaagagcacacagtgcaaagaaacccactcgctataccggggtgtgaaccggttaggttcgaagatactctggatgcatatctggttcccgacgaaccggtgtaccgggattttgttcgtcatggtctggcttacccaaaagccgatggaattttggtaaatacatgggaagagatggagcccaaatcattgaagtcccttctaaacccaaagctcttgggccgggttgctcgtgtaccggtctatccaatcggtcccttatgcagaccgatacaatcatccgaaaccgatcacccggttttggattggttaaacgaacaaccgaacgagtcggttctctatatctccttcgggagtggtggttgtctatcggcgaaacagttaactgaattggcgtggggactcgagcagagccagcaacggttcgtatgggtggttcgaccaccggtcgacggttcgtgttgtagcgagtatgtctcggctaacggtggtggaaccgaagacaacacgccagagtatctaccggaagggttcgtgagtcgtactagtgatagaggtttcgtggtcccctcatgggccccacaagctgaaatcctgtcccatcgggccgttggtgggtttttgacccattgcggttggagctcgacgttggaaagcgtcgttggcggcgttccgatgatcgcatggccactttttgccgagcagaatatgaatgcggcgttgctcagcgacgaactgggaatcgcagtcagattggatgatccaaaggaggatatttctaggtggaagattgaggcgttggtgaggaaggttatgactgagaaggaaggtgaagcgatgagaaggaaagtgaagaagttgagagactcggcggagatgtcactgagcattgacggtggtggtttggcgcacgagtcgctttgcagagtcaccaaggagtgtcaacggtttttggaacgtgtcgtggacttgtcacgtggtgcttagaaattgttaccgttttctagctcttttattattagtggttgaattatacgtgtcgttcctctgttagtgtataatataataatcgatttactctttgtaatataatgatgtttttgatatttttcaactaattttccattgtaatattgaataatcgggtgttgttgtaattaataatgagaaacaatttgttacaagaagagtaaattagtcttctttctataaccggtgttcgagtgcaagacttgatcctactctcacaaaacatgattatgggtttagccggttgagcgacgatcgacttggggcaaagatgaaacaaattatgctccacgttatatatatttaaataagaataaaacgacgtttagatgattcattacttttcattagtctccacaatttaacaatcaactcgacaacgatgttataatctgactaatatcatatattttaagtcacatctaaagctgaccttctagatgaaatcatgaaccagtaataaaattacccaaaagaacggtgctttgtcatattttatttggtttttaatttaatattagctcacaaattgctttttattggagcacaaaaccagaagaaaccaaaaaactacatcgtctcgacgtgacgtttcctctacctcgctgatttttctgttacactggaagcattatttaggaatcaaataaattaaataaataactttttttattgtcaataaaattttatagatacttttaatatgatgacaagttccaaacatttcataaataaataaggaacatataccagcaacagtcactacaattcaaagggaattatgcctgtccacgatatatatagccaaatttaggagttttatattagatgccaattgcatgatttgcatcatctatatttcttgctgtggttattattttaagtctgtgattattcgagttatacataatacccgcacgaaattatgtttattatctttaaataaataaaaaagaagtgaaaattaaatttgatatgataagactggtttgatcgttatacacagttattgaatttgattaaactaatttatcttacatttaattttacataatttggattagattgaagtttttctaattatgaaaagtacattaaacaaaatttatagtcatattttttattaaaaaaaatcattttatataagaaactaagaacatcagtaaaaagaaagtcttctagaacttctaatattatttttgttgggtgtgactggtaaaggaacgtatgtgttttctacatcctttcaaatatgtttacatgatttctttcccaattacaattaggctttgagagccggtaataattccatatttcaagtttttttcttattcaagtcatttttccgtgggcttaaccaaactgtccatatttgggcccaattgctgttatcatacgaagatctgatcatactgtacaaaaattaaaagaaggcctacatatatattcgctagctaacgatgccagctttttttttttttttttttttttgtgcagctgcgcttgtaaatcatatttcagtttacaagacagctccgcaagtctttgctttcagtctaatgtaattcggttctgttctgttacaaattaacctctattagagattgataaaccgactctgtattaagaaaagcacttatcgatcgttacataatctacagcgcgatataaattttgacagcatatgctagacctatttttttttttgttgttgtgtgggctatacctaaaaatattagcagtatcggaccgacattatcaaataaagatatacacgtagaactcaaataaagcccactccagtgttgttggatctacaacagcttcattttatccgaaagatctaaaacagctttatgtgtgctctaaagataatagagacaaatttcgccgccatagcacgacaattggtttacattatcgctaagtaaaggaatctgttataaataagaactaaataaaatcgttttgtgagtttatgattaacaccagttggtttcatgtgcttaaagttggtccatgtaccatatttttgtaattttgtacgagaatacagctcggaataatgtatatatacaagcggacgatgtggatccacgtgacctatccagtttcgtacgtttttttctttattttaatggtgactgtttatataatacatctatattaatattagaatctttactaattagtatctttaaccacaaagtagaaaccgctttaattttgttgatggtgttgtttagcttttagctttttacggcaatcgacaacgtttcaaaaagttgagtttccattgaaacataaaatatacttaatataaataaatgatgttactatattatactgaattagtctagatatcgcaaatactagaagtagaaaccgactaatatataatcctataagcagtgggtttggctaaatttgaagattttaactgagactcggttatttatttgataattttaaccaaatcagtccaaaatagcatcctttggtttccgagaaatcgacattggggattaatcaataactaagcaaccccctaatggtggcgtaactttagggatcactcactactggtcaatctcagctactcctcataaaagaggtttaatttagctagtgacattcgaattacttttatgcaatttcctaatttattacttttgaaattgttgaaaatatgacattgcgtctatttacctatcatttcaacaaaaaattactagctagtcgtatacatatgaatgttcgattcaaatcacaaaattatggttcgaaacttagtcctgctacttttagtcgttacatatcccaaacgttgaggatagaattttagactgaatctcttgcatcatattttagatttaggatcatttgtccatattctgcagtactaaagactcttactaaagtttattattgctaatcaggcgccagctcccagtcagaatataataatacgataattagagaatcgaatttgttgattaattgatatagaaattaacttttgaaaaattaaagtattaagcaaaaacgtatggaatctttctacccaattatctatctgttacgcaaagcacttggagagttggaagtacgggaaacaaggaaggcaaatgttgggataaacatgacatttaattattttaatcattttgctttagtgataattagattagtttattgaaaagaacattattatactgttacggaggacaaatcaatcgtaagtcccaactcaaaagcatatgagaaaaggaatctctcccgtaccatgtatatgcgcatcttctttcgcatattatacttataaattatcttctcttttttttttttttgtgtattcttgctatatatatgcatagatttattaaaataagaagaaaaccctaattactaaattaacgactgtgttgattttattactttcaaactagggtttgacattggtgcttgggtttgaatccccatctcacattaattaccacttttgtcttttgtcttgcatcccatattaagacaatagtaaacaaatctagccaaactccaatccttatctatatatctgttttcatatatagatctataggaccataggtttaaagttaaaatgatccatatatactgtatacatggcattaaacaaacttaaactagccacatctatcaacttaaagtttatataagactatacatatcgcttagtggttaagacttaagagaatacaataccaagctggtgcatgtctctccttttttgttttttgtttttaggttttagatttttttgttttcttttttcttaattggttttgtctcttgttccggtgcttttcgttttgtttttatatataatcgatcaattctggtgtgaaaatggtttaagaaacatgatgttatccaatgcgattgacaattaacataaataaaaatgtactggagtttcttcgttgcaaggtggctaatgtatatttgctataacaggaaaaaaatgaaatcaaaggatgcatggaaaggctggagaacaaattatcaccaaccatacgttctttttagatactgtggatatgggtatagcaaccggatatttccccaaaaaaataaaaaatctagctaagttttgccaaattaaaacaatttccatcacaaaaagaaagtaaaaacaagaatcaaacaatggtataactagctaagtgcctgtttttttttgttctctctatcttttagttaaactttatggatgttgaattgatagaagtaaagtcaactatctatctctttagactatagtagaagactttaaaacttagtctggacgaactttaattaactttaaaacccttctgtaacaaaaggaaaaaagagagctatctttgtacgttaattcctcgtaaacgctctttgtattcattcatttgtattttaaatatagttgaaagatatatactctataataagaatagccagacatgagaaatactgatcagaagtactcaacttactaaacaaccaattaatatcagaaaataaataaaaacgaaacggtaattaaatgagtcaaagaagagagaatctgggggggaggtacagtgagagaggcccggagaaggagggaaggtgacaggacacgtggcaaaaggagaagtgtggtccaaagaaaaaggagaaacagggactcgacacgtaatccaatcaggaaagcattctcatgtgacctcttcactcattcacttgcgtggaacttgtctttgtcaccactttcccttccttcgtcattattctttttacttctcctttgccattttaaataggccaatattcgtatttgtgcaacaaaataaatcaaatatccaaaataattattatcctctatttacacattcgtattcgtataaatgaaattacattagtcaaaatttcggttataaattataattgtgatcttctgtatcattcttaacatattgttatgtacaatcagaaatagcaagtaccggttttattttggaaatacgttcgatttgagataaatataaaactgcaatagctaggtccattaaatttgaagatgtgacgttagaagagacaaaatgatggccggggacaccggacacaccatttctaattttacatagtatacatgcccaatggaaatagcttttagtatgtgtgagttgtatgatgcgtcttcctccaatagtgagaaaagctaatgggggacatatatacaactaaaaaaagcttttctcgttttcatcttctgattgggtgacgaataatcacgtttgaaatacccgagaatttaccataaatccgtacctcaaaagattcatttgttgtaaagatatatatacagaaagagcttctttatttgttatttttagcttctttcatatgttatcaaaacattggttttcaaacatctaatccatttgatctataactaactaacatcgacatataatctcttaattaccttcaagtcgttttctgtttttttttaataaaaaaatagagttacgtcaaagaatttgacactttgattccaacttattatcttttcttctttttgtttttcaacctgcaaggaacgtcccagtagataagttgaattttatcctcgtccctctttgaagtccacgtgaacttcacgtgcatagccgtcactcaatgtcggaatacattgtttttatttttcttcttctgtgaattatttagttcttcctaattatataccttcccatgattcgtgttcgttgcccacacattactatctctcttttactcacctaaaaaggcacactataaccttatgtatcaagtgaccgttttttaagatgaaaagtgttgactgctatattttatcatatactattttaaaccaatcagtcgtgtcaattctgtatatatgtttttttctcctttagaagctagggttgaacaccttacaaatcgaaagcaaggcattgtaaaaaaccacgtacccttctactaattaagccttccacaaatttaatataattttagtgttcgaatggtgataaaggatagtgcagaacatgatgctaaaaacgaaagcaatatatggttatgatagaagagattgaccaaaacatgttgaacaaacataatagaattattaacataacatgtgttcaactcattttattggttattttgtgcaagtgtggtgttttaaatttttctttaaacatgcattccaaattcatgtgagcgaaggtgtgaaagctttaatgtatttgctgcttgtggccaatctttaattattccaccacattattcattcccttaaatgtactaaacaaattgtaaggaatataatttaaggtttttggtacgaagtaatgaaggcatgaaagcgtttatgtctttgctccttatggccaatctttatcctcccgttgttgtgtctcaaactcggaaccttaacttcctccttgatcaagaaatactagttcaactataacagacgtatatataattctcatacaccaaaataggaccttaatctcaaagacctgcaacgtcgatgatacgtaagttgtcttgtgtcaacacattacatgataatctatggctgaagaaatttcgttaaaatggtacaaagagaagggtttaaaaatatgtttcgtatacgtacaaagtaaattaaagcaggctatgttcaattaatcgcatggtgtggaatattataacactgttgaagacgacaaaatagagtacaatgtttaaatataaagaaagaaaactcgggaagattcgtggttatagactcctagtcactggtgtaaaataataatctataggaaagatgggaaaaagaggagcacactgcttttcaaaggaaaatgagtggtctcgagctccgaaaacaaagaaaaaataacctacaaaattgactaattaacagtaaaaactaaaataaccaaagacaaagacagtttatgttatattatacatatatacccaatagttatccacaaatgatcggatcgcttgtttactacttcctccaaaatttggtcatcttcgggatccacaccacgtctcttgtccagaattgtcgtcagccaccttatttttatgtttacttattctgatgggatgcgacaatgttttcgttacatgaagttcttaaaaatatctgatcaaaaagaatgaagctcttaaatattttgaaacataaccaacaaacatttcttttatataaagttaaaatgaaaattttaaacatccaaaaatttccatcaaatatatcttgccttaacaaaacagatacatgttttcttgttggataaattatttcataatttggatcaagtgaaacaaaatgtttctccacttttaactacgtttgtacattgtgcaaaaatctagagaacaagtatatctggaagaaatgtaaccatgcaagtgtattctctcatttagggtaagtacatcccattaaacataaaaatagaaaagtatatgtatatccaattcgtctcatacatgcataccacacaattaatgattctttattcaattacatctttttacataaaaacagatggcataagtgtaaataaagggaaagacgacccaagaataaggggtcacagtcgttgaggttataaaaagcatctcataggactcaacctcaccaaagtcatatcctattgcatcactctcctttaaacacagtcagagaaaacagcaactcttgtctgaaaaactagagagagaaaatggatcatggtaggttaatggatgatcaaatgatgctaggctctcaagtgtacccctacacgacccaaccccaaaattcacactgcatcatcgttaaccagatcgatggaggcgaagaatcaaaaccggtgaagcggaggaggaagaggaggagtaaaggttcatcagccaccaacgaagaagacgtggcggagatcggagggatgttgaggaagaggaagttgaccgatgaacaagtgaacatgctcgaatatagcttcgggaacgagcataagctggagtcagggaggaaggagaagatcgccggagagttaggtcttgacccgagacaggtggctgtttggttccagaaccgccgtgcacgttggaagaacaagaaactagaggaagagtacgccaaactcaaaaaccaccacgacaacgtcgtactcggccaatgccaactcgagtctcaggtataaattttatgttttttcactataaaacagagtaaatttggtgattcttaatttcatgttgcttgttttttcgaaagatgagtaattttatccgttcttagataattaacatatagtttattcgtcaattagtatattttgagtatttattacacatatgtgaaatgtagttgaatcgaattttacaactagtgaaaatccggtagctagctaaaaaacacatgtttgggaccacaccacaaatataataaagtgggatatttcgtcatctcattcttatccaccattaaaaaaaaaaaaaaagttccgtccgtacaatctcagttgggctcatgagtggcccatttacagttgcccactcatttaatgccacgtaaaaaacccttctctgcatttgggctgacatgccagaaaatatcctcctcatttgatgaataacaaaattaatttataacaatttttttcttttgacattaactttgcattgtattaaaacactatttatttcactgaattggtagtaaaatatatcttttttttttggttaacaaaattactcttatttttgtttatctaggtactaaataagagttttatataagattttcttcttcacatagtgattaactatggtattaactaatgatgtatttttttgctgttgtagatattgaaactaacagaacaattgagtgaagctcaaagtgaaattcgaaaactgtcggaacgacttgaagaaatgccaaccaacagttcaagttcatcgctttctgttgaagccaacaatgcaccaactgatttcgagcttgccccggaaactaattataacatcccgttttatatgttagataataattatttacaaagcatggagtattgggatggtttgtatgtataatcagtttatcaactaaatatctcgtgctttattgatgcaactcatgttattataagtaatgtagaaataggtgttggtgaaacggttgtaattatgtgttgttttcagtatttattttaatatattactttgtttattatcactttgcttcttctagttccatatatataaatctttcaaaaaaaaaaaaggtaacatatattgatatttgctcatttatcataagatattattaatgttcagtatacaattaattagttaccaaacagttgttatttatatccagccgacatagaaactcttgatttcattactcaaatagcttattcaagaatttattaaaaatcctgtatagataaagttccttaattgtcaaccagattaagttgttattaaagatggaggtagaacgaatttattagatctagatatttaaaggactaagataaatttatgtaatctactaatacattcatgttaatttatcaaattaatcattatcagaacaaaacctaccacaattattatagtttcttccttcataaatctttatattggtcaacaatcttcatatataagtttatctatattacagacgcatattacaaaaaaaaagaatagaaatgaaatatgtttgaatttgttatttcgtagacgatattataataaagtctttccttattttccctccagttccacatcgagagccctttttgaaaaatattactttttcagaaaagccctcttattttatagagttaacagaaacaccccaaacatttcgggtgtataaatatagagcgtcacactttttactcagcgtcgtcttcatcgctcactccagaaatgagacctcgcgggtatcaacgagctccgtcaatgcagaaaccaacagattatccgacggataagacgcttcatccgaattacccatttctcatgtcctctcatggtctcaagtcctttgaatcggacgacgaagacgacgactccgactcctccaacgatcaattcgctttcactatcaacacagagttgcttgtcgatgtcaaagacatatctataggggacttcatcggcgaaggttcatcatctactgtctacagaggattgtgggtttctcgtttctcaatctcctacttcgaaattgcttctgggtttggtgcaaaaattgcagattttgttttcctgtttatcctttcttgatttcggtatttattcgaagagtataggtttcagggtatattggtgatttaattttgggtttaaccttgaaatttggaatctttcatgctggttagtgttaggttttgtcactcttaggtttatgtagtctcagctctagtgtttcctacacaatgcctcaaaaaaggattaatgttacagagaaaccatgaattacaataagaaggaagattctgatgtgggtgtttgaatgagtaatctttgtattgtggcatacttgttactgatttttggaatttggatatgggttaaagaacatttctttatccatgattataggttcaggagagttgtccctgtgtctgtgaagatattccagcctaaaagaacatctgctttaagcattgagcagaggaagaagtttcagagagaggttttgctgctttccaagtttagacatgaaaacattgtgcgggtaatattggagcctttgatgttttgtttgttttcatatgttagcagccttatctcgttggtcgtcgatggtataatatccctaatgggatccttttgatgacagttcattggggcgtgcatagaaccaaagttgatgataattactgaactcatggaaggcaatactcttcagaagtttatgttgagtgttcgtccaaagcctcttgatctgaagctctccattagctttgcgttggatattgctcggggaatggagttcttgaatgcaaatggcattattcaccgagatttgaaaccaagtaagttaaactgagacatcacgaaaagaggaatcaagatttgtgaattgaagaagattggtttttgtgcaggtaatatgctcttaacaggtgatcagaaacatgtaaagttggctgactttggacttgctagagaggagactaaaggtttcatgacctttgaggctggtacatacagatggatggctccagaggtgggtgtttctagtttcttgttacttaattaggtttaaaatcttttcttggtttgttaacttgtttgtttgtttctcagttattcagctatgacacgcttgaaattggcgaaaagaaacactacgatcataaggtggacgtttacagtttcgccattgttttctgggagttacttaccaacaaaaccccattcaaaggaaagaacaacatctttgtagcttatgctgccagcaaagtaagtaagccacaatttcaactcaaaatcacaggaacatgaattgattaagtcctttaatatctgcagaaccagagaccaagtgtggagaatcttccagaaggcgttgtttctatcctgcaatcatgctgggcagagaatcctgacgctcgtcctgagtttaaagaaattacatattcactaacaaacttgctcagaagcttaagctcagacactgatgctacttcatccaatagcaaagccaatatagctaccgaggattcaacaagcagtctggttcaagaacgtgttgtctgtgattgtcccggactaaagatgagcaagacgaagaagctgaagaagaagacgaataaactgatgaatatgatcgtcccttttctcaagatcttcaaaagttgtatgtccaagtgatggaagtagaaactctctggtaaaagataaaaggtatagcaatacgaactcgacagagtaaaacgaaagaaaaaatggttaggctttgtgctttgttcttttttgtttggtatttcaacaatttatgttgaaaaatagtatgccaaactaattagtgtacggaatcgaagaatatgtggtataaataatagaatcatcatataatttactctatgaaccatgattattctatcgtgttttttcacctaagtaaacacaattagattcacgtttcataacttagctaaactatattttgattccgtgaaaaatacacatttaatgacctcctgaggacttttaataccgtaacaagtttttcaaaaaaacacaacaaaaaataaaagaaaaggtatcgtcagattttggcgggattggaccgtttaaacagaagatcatcaatttggtctcttaagatgaggtgacgtaagaaacgacggcagtgatgtcatcaagctttcctccgtaatacctgtagccagcctcctgagccgcagttgcgaaagggctctgccgttttttgtcgactgctctttgacgtgccaactctgcaatcttctgagctgtgcctttcgggtctaaaccggccctcaccgagctaaccaccactcctgtgatctcttcattgtataaattatcatacactccatctgttccagcgacaatgacatctccagactgaacatcaattgtgaatacctgattcatataaccacaccagcgtgttcaattcaatccgtataacccgaaccacaactgaaaagtgtattcaaaatggtcttattaagctttgataataggaagaatacgcctttgaaactgacctgaccggagctagggacgtcggcactgttcccactctctaattgataagtgaagttgaatccatgctgctgaaccggagactgaaacaccgtggttccctctctaaccaccgtgaatccactgtctccgagattaatggcgtgtaatcccttgcacaaggagaacaaacactcttcaacagacggttctaagaaatacagttgttgttcattcacaaacaaaactctgtgagctaactaaccttatcttttaaaacgatgatacaagccgtggaggagcctttggctttggtttgagaatgtgctttctctaacaccactaaagggtcgatagaagaacctttatgctgttcttgaattgcagatactgaataagacataagctcacgcgaaaacagtcccgcattaacaccaacctcagcccaaccgccaactccatctgcaactccaatagcttgttcttcatcgcagataaagtgagcgtcttctccacctgtagcttccttttcaggatgcgggagataacatgaccccgacactagcctaagactcctactcaaaatatcaaaacattgaaaccaattggtaacaaaaagattaagaaagtgtaaaagaacttacttaagagatgtagtagtagttggtggtgactcttgagaaccaccgttaagagaagacagctcatgagccggtccaaccgagaaacaagccataggagaagtatgaacactcttagacaatgtcccaaagagtgcacgactcttttctagcggatcaacaacagaatagtgacaaaccaatcggttcttcatcattccccctctcttcccaagtctcatgctagctacaggacaattaatagtgaagctaccaccactagaacgcttcttagtgaagtctaagccatttgaacaagtagtaaccaaatcatccaaacaagcgtctccaaacactggcaaagaaccagaagcagccatggcttgacgaaaccgagaactatcagaaaacaatctcctttgacccgaattggagaagaagctcttacttttcccagcaacgattctttgaaacccaaattgagaaactgggtttaatctcgagagagcagtcgctgacatctgaatcaataataatcaataaaaggaaagatttttaccaaaactgaacaaagctacaccaaaatcaacagactataaaacgagcccttaatcattacccacttcaaatacttgagataagagataaactattaccggattcttcactagtcagggctttttccgtcttcttcttcgccggaattaggttagagaagagaggaaggaatatataaagatctcttgtttccgctacctacctgcagctgcgagctcctccgtaaaactcattagccgatgagggcaaaatcggaaacttaacttgtttcttcgtgttcagttttcgatgtctgaaatttctcagcgaaattaaaaaatactaagagataataatttaatggtcttggacttgacatttaaggcccaatagtattaagcttgtggacttgagtagtcttcagcataatgactaatgagcttaaaatatcaatggcctattaagaaagaaacatttcacaatcaaccccaataggcttctctcttcttgcttactgtacacaaccaattttattttcttaatattgaaaactacacgatcattgctcgagtccaagcatatcaatattgatcaaatgataaagtcacactaatcatagttactgatttctgttaaacttccgattttgtaatacagtaaatatgatgtgggtaaataaattatcttgctctccaaaataaaatacaaaatagtgcctttgtgggttgaattgtcatgataattctatcactataatggacctacgtagcgattgaaacatcaaaatccaaaatctttggtcgattctccaatcaaatcacactggtcaagtctcaaattatctggccaaattgagactatttttagttctgcaagtttttagacaaatatcaccaccttccaaaaaatttatcacttttgggagaagtcaattcaatctcatctacgaattgttcccattaatgcaaaaattcgattcagcgttttaagacagcaagcaacacccaataatagaaacttcaaaccccattgattgttttcacatggtagagacttccatcagaactagaccaagatttgtaaccatctgtaataatttagctgtcatgtcacaacccgagttcaaattatctctcaaagtacaacatgtgagttataataaaccacacaccaaaaaaaaaacaatatattttgttgttgttgctaggagatttatgtacttgagagaaaacccacttgggaataaaactaaagctttcactaaaacaagataccaaaacatctaaaacctgaaacaaacttgatgaactatatactacactggtctactacgttcatgccttttgtctctcttacgaacttcttccaatgtctttgcctgaaaactcccctgatccaaacagatcgattccacctccaccacctatagaagttaacagagcagacaatccacctccggtattaccaccattaccaacagctcttcctaatccaagaaagtctagtgtcgtctgtttcggaccaaacaccgatgaattccccatcatgagctcttttagacccgatccgctaccaccgctgctacaaggtagtccaagtccaagaccaggagctaatgacaatgcatcatgattgctgagttccatagatgaagaagtagttgaaactatgcctaacccgcgaagcaacgaacctcctgatcccgtggaacccatttgtgcagctttttggagcaatgcagtagctgacattgccggttgaggagggagaggagttaggaaatgtggcggatctcgtattgttggtccgaacaaagaagggttcgtcgagagacagagagagatgggttccatggaggacgatggtgcgaatagacttggagaagcggttgaggaagcatataaactaggcgaagctgttgatgatacaaacaaacctgcgtatccaccattgttgttactgtgatcattgcttagatccgatgagctaacattgaacccgatcgttcttgaagcttcctcaataatgacttcaggatgattgttgttttcttgagattctacaaacaaaaagagatgatgagtcatggacataaactttgaggctttaattataattaatggatacattataggcttagctatggaagacgacgaacacgattcagttttttagcagacatcagaaatataacggcgctacagacaaaaccaactaaactccaagttcaccgaccagtttacagttggattattttaaagagttcttgtttcggttagagaattgataaattgttacatgtagcgattttgccacattttgccatcaaacagagagtttgtattatgtacctggagaattctgaatcggcaaaacagaggaagatatgattttgacagactcagtctcaaccgaaatagccggtgccggagctatagcaaccgatggcggagaagaaggcggtaatgacggagaagactcaacagctgctggagatttttgctcaatttcaggattcttcctagtgacagtttctggataaagtttcttgctttgagtatgattcttcgcactctcttcagccaaggcatcacaaaaggctctatgcgttataaagctatctctcctgcaacaaaacccaatccacaagttagtaaaatccataagaaagatcaaacctttgaatatgtttataacaatttgtcgccacctagaaaacagagttccacaatcgcatttatactccttggtgccacaaatcttcgaatgagctttccaatctgattgaacagcatacttcttagaacatttctcacacttccatttcttctcgccgtgtttccgacaaaagtgtttcttgattccagtaagatctccaagagcacgtgaagggtcatgatgaacacagccagaaacaggacaaacataaaccttcttcctcacttctttagtcgatctctgtcgaagtttccatggaagattgtgaccacgacgatgaagctgaagattctggtcacgttgaaaacctttgttacagatttcgcaaacgaatcgattcgttgccataagtgttttaggtgacaaagctatcacttcagcgtctggatctgaatttagacaatcagtgagaacaactaaaaacagaaaatttcaaactcaaaaaacagaaaaaaaaaagtttggatttttgagaagtaccaggcattccaggaagattccgtttcttcttcccgacggatttaggagttagattttggtttccggtcgatgagacgcttgcatcgccggaaactgtagaggaattatctaaatcaaccggcatgtttcaaagatactaaattccaatctttgaacacaaaaaggaagaagcaaatctcagctcagctcaatctagggtttatcatcctcctcctactctgtttagtctctctttctctctctcttcttcagctaccagtcaatctgcttttcgtaaaaatctccttttcccctttccgccaccaaacttttctgataactcactctctgacctctcttcttcaaaaagatttaaaacccccaaaagaaaaagaaaaaaaatcaaaacttcattacccaagaaatctcttaatcatttaacccagactctctcttctccacacgcatcttttatccaccgtccaccgatctgatccaacggctgagatttcaccggagacgagttatccttactacttccggcttgtttctctctgaagaatcaccggaaaaaaaaataaggcggcttgtgtgtgagactttgtgtgaaagcttcaaccttttttttctttttctttggcttgtccaagaaaaaggagccttcttcttcttttctctctctggagacaattatactaatttttttctctcaacttttcacccttttttttttgttaacaaacattttttatacataattgtgtcgactttcaagttccaagtatctaaatctgtattttggactcccatgcaaataattaaaatagaataatctttttgtagattttaaattgaaaacggtgtagaaaggttaaaagcaccaaacaaaacgagtaaatagatattgtaataattttttcacctttatggaaaagattatatcatagacgatgtacacagatgaaaattagaaaatggcatgtgaatatatgcagtacccaatgaatgcaatatcaggtttgtattatttttctattgtatctctacatgttacgtaatcaaacgatcaagtaatttattaatattgtcgatggcgtagaaattataaatttattttatgtcattgtttactatatagattttgagctaaacgacttattttgtcaaaagatatatccgtgtttggtttaagattgggttttagtatttccaatattaatctaaattcttagcttatgaacatgtcaataaacaaaaaaattattttactgtcactgtccttagacggggacaaaggagggtattaccgtcgcgttgtcggaccgtaaaataattaaccaaattttgttgttgaacgaataacattttttactgtgggaatttgtcgtgtagcattacgttcgaaatcgcaatttgttttcttctttgtgggtgtatatttctggttaacgaaactataacccaatttaatgcaatgttcgtctgtttttgttgactttgacccttttttggtaatattcgttcagcttttgttttaacgttttcattgccttgtaggcatctgagaagctcagattctgacacgtgtcttttgttatctgaatttgcatccgttggataaacatgacgctgacaggtggattgaaaagtaaccagcttggatttctgtgtatatgttacaccgccacttcccttaatttcttcgttcttagttaaaataaaaaaggtttaatttatgagtaaaagtatgtaaaacgacaacgattactataagaattaaaatttatctttgcttagtaatttgcacttaagattggattcaaattttgtaaaaagcgaatgttacatatatgtccattgaaaaaattgcatttgactttacaagcattgaaattaattaatttgggacccctttttttgttagtttcaaaggaagaattattttaggctgagatgggtccctccataaactcactattctgccagcatacaaattccttaacatatggtccaaatagcagttccaaccactagtatccaataataatctgaacaaattatctttctttttttttcctgataatcttgtatttgtttgttcaatgagcttaatacgtatattagttatgacttataactaaatactttgactcacttgatccgtacacattgatttcgtttattcaaatccgaacaacgtaatgatctttttgggccgagttatttgtattctcaacctgagtccaaccatgctttatgggcttttctgtttatttatgcatgtaaagtttataatgcttgcaaataaccacatattgtatgaatgtaattactatgatttaagggcactgcttttctgttttcacgttgttttcgaaattgctattgcgtgtgatatctgtgttggaccaattattgaaaaggacaaggctgactctggtttttaatgagtagtccccatgggagttatgttcatttaccacacatttttttgtatagtatagtatgagtttttatttgatatcttttatcttcggaaaataaatggttcaaattgtttgtctaaaaatgcacacatgaatatcttgtggtctcacacaattgtaggaaacaaattaatatttgttgcgaaaataatgttattattttatcatacgaaatcctagagaaaatggtggcaaaagaggcaaagactaaactaatgaatttaaaatatgaaaatgatggaatgactggtttaccaatattacagtatattgtaattttataaaaacgaatcctgaagaagagggcaaaccccaagaccacgcaaatcagtctacaaatatgaaaatttccaataactagaaaaacatgtgcatttatctttttccatcattcggatttttacaatggaaattttgaccactgagcgcaagtgttatagtattttattattatccaatattaatatcattattcggatccatgcattctatataactatgtccaccatcttacttgtgtctatgttgcaacttcaacgtcgtatatatatagggattgttgtcacgaatacaatgctaattaaggaagattgtgacttctcggaaaatttagaactaattaagagtggaactaaaatgccaatgaaaatagcctaaatcaaaggagaaccacaaatataaattggaagaccttaaaaaacaattaaacgaggacgaaacaaattttggaatcatcaattatacgaaaaaaagaagaaagaaaaaagaggtttcatgaatcacagtagtgctgacaatcttcgaaccatttgtgggtttcatacaatcgatcaccaatagaacaaaagagaaacagaggaacagaaagaatagaaggagtgggaagtgtatgaggaagctgtgtccgaacatagacaaagacgatggtctggagacggtgttggaagttccgataccggaggagatgttttccggtatgggcaacaacgttgcacttaggtggcaaaatatgatgacgtggatgaaagctcaaacgtctgataaatggtcgcaaccgcttatcgccgctcgtatcaacgagctccggttccttctctacctcgttggctcgcctcttatacctctccaggttcaagtcggtcactctgttcataagcccgtcaaagattgctccattgtaagtcattcaaaatcaatccttatgaaaacataacaaagatgttgaaaatatgattcctcttttttttttctttttttcttttatgatcaaaacccaaaaaagtcattaccctgcttcgtaagtattcaacataaagttgttaatccatgtgttgtactctgcaagtctgcattacattattcatcgtacacagagtcatcaacttcagtttcattgtttttttgcttatgaattacgattgcagcaagcttcaacggcgaaatacattgtacagcagtacatagcagcgacgggaggaccacaggcgttaaacgccgtgaacagcatgtgcgtcacgggacaagtgaagatgacggcgtcggagtttcatcaaggagatgattcgggcgttaatctaaagagcaacgacgaaatgggtggtttcgttttatggcaaaaggatccagatctttggtgtttggagctcgtcgtctccggttgcaaagtgatatgtggaagcaacggtcggctttcatggcgacattcctctaaccagcaaactccggcgtctaccggaacgccaagacctctccgccggtttttacaggtccaatccggttattgattttttttttgatgtaatgtccggttctcaaaatgttgaaccggtggtttatttattgtttgagcaggggttagatcctcgttcgacggcgaatctgtttcttgacgcaacgtgtatcggagagaagataatcaacggtgaggattgctttatcttgaaactggagacgagtccggcggttcgagaagctcaaagcggtccgaattttgagataattcatcacacgatatggggttattttagtcaaagatcgggacttttgattcagttcgaagattcgcggcttttgagaatgaggaccaaggaagacgaagatgtcttctgggagactagtgctgagtcggtgatggatgattaccgatacgttgacaatgtgaacatcgctcacggcgggaaaacatcggtcacggttttccggtacggtgaagcgtcggcgaatcatcggagacagatgacggagaagtggaggatagaagaagttgattttaatgtttggggtctctccgttgatcattttcttcctccggccaatttgcagatcgaaaaatgatttagctttttattaaaaatattgttattcgtttttagccgatatcataactttttgagatacattatcaacacactcgtgcaactgagatattcttgacacaatttttgcatttgaaattggcaattttgtactactcatatagtttgaagcttcaattcactacaaaggttattactaattgtgtcgacaaatccagcagatttaataatgcccattccattaaatgttttttagtttaataataggatgatcatatgaccaaaatcgtaaataagggttaggggtaaacctgtcatttcaagcttcccgcccatgggcgctactcccaatttaataaaaaataagaaaataggcgtaaatatgagagtgtgttttttcaatataccctcggttttgaatttgctctcaaaagcgacggagacgactgtttggctcggtgatttctcccgccgtttgggtttttcttaccggaatttccttctccttcgatggttagtctgcgctccagaaaagttattccgtaagtccctccacctttccttttcatttcgttatttccggcgattttctaggtccttaacgctctcgaaatcgctcgctgttcttggtggtttttggttccctctctgcgtaattttgtttgtcgtgtttttggattatattctctgactattggtctcactgttgatttatcatttctcgattttggatttttggactcttagggcttcggaaatggtcagcgacgggaaaacggagaaagatgcgtctggtgattcacccacttctgttctcaacgaagaggtttgttctatgttctactattttgccttcgtagtgtggttgctttgtgaaactttgtgtgttactctttgtttctttaaatctggggtgttctgtaaatgggtcctttttggtcctttttttctgaatgtgaaggaaaactgtgaggagaaaagtgttactgttgtagaggaagagatacttctagccaaaaatggagattcttctcttatttctgaagccatggctcaggaggaagagcagctgctcaaacttcgggaagatgaagagaaagctaacaatgctggatctgctgttgctcctaatctgaatgaaactcagtttactaaacttgatgagctcttgacgcaaactcagctctactctgagtttctccttgagaaaatggaggatatcacaattgtaatcttctttatttctttcttctttgtggtttctcacttttcgaatgggagtcattattcttagtttgaacaacttgtgggtgaaatttgttttgctagaatgggatagaaagtgagagccaaaaagctgagcccgagaagactggtcgtggacgcaaaagaaaggctgcttctcagtacaacaatgttggttccatttatataattttcaactactatgcatgatcttgtatatattgttttttctgcttgtttgagaaagtaacttacttggatgcttttttcttcaatcagactaaggctaagagagcggttgctgctatgatttcaagatctaaagaagatggtgagaccatcaactcagatctgacagaggaagaaacagtcatcaaactgcagaatgaactttgtcctcttctcactggtggacagttaaagtcttatcagcttaaaggtgtcaaatggctaatatcattgtggcagaatggtttgaatggaatattagctgatcaaatgggacttggaaagacgattcaaacgatcggtttcttatcacatctgaaagggaatgggttggatggtccatatctagtcattgctccactgtctacactttcaaattggttcaatgagattgctaggtactctcatggccatatgtgtttgtatagatccaatgctttggggtttctgttgaaagttttcttaccttttccattaggttcacgccttccatcaatgcaatcatctaccatggggataaaaatcaaagggatgagctcaggaggaagcacatgcctaaaactgttggtcccaagttccctatagttattacttcttatgaggttgccatgaatgatgctaaaagaattctgcggcactatccatggaaatatgttgtgattgatgaggtaaattccgagattggtcaatgtactaggctttgaagatcaagatgatctctctaactgataattttgttcttgtatattatagggccacaggttgaaaaaccacaagtgtaaattgttgagggaactaaaacacttgaagatggataacaaacttctgctgacaggaacacctctgcaaaataatctttctgagctttggtctttgttaaattttattctgcctgacatctttacatcacatgatgaatttgaatcatggtacaaacatggtccttttctactattatccctaactagtcttctttttttttttttttttgttaacactggtggcagctttttgacatttattcctttcttagtatctaactgatagatgagtctctacaggtttgatttttctgaaaagaacaaaaacgaagcaaccaaggaagaagaagagaaaagaagagctcaagtatgtacaattatatcaattttcctttatttctttgattgtatttatgtcttatgctaagggtacatcttgtctaggttgtttccaaacttcatggtatactacgaccattcatccttcgaagaatgaaatgtgatgttgagctctcacttccacggaaaaaggagattataatgtatgctacaatgactgatcatcagaaaaagttccaggaacatctggtgaataacacgttggaagcacatcttggagagaatgccatccgaggtacatgatctattttttttttttaatactttgtttaattatgtcattttctgcattgatttgttcatcccctatacttcaggtcaaggctggaagggaaagcttaacaacctggtcattcaacttcgaaagaactgcaaccatcctgaccttctccaggggcaaatagatggttcatgtatgtcagtttcttttaagaaacgtaagaaaaacttctgtcatactgttctgtctaattgtttcatttcgtgacagatctctaccctcctgttgaagagattgttggacagtgtggtaaattccgcttattggagagattacttgttcggttatttgccaataatcacaaagtatgtttcacaaacccatggctcgtagctcatttccctttgagaacttctctgatccatttgctgatgaccaggtccttatcttctcccaatggacgaaacttttggacattatggattactacttcagtgagaaggggtttgaggtttgcagaatcgatggcagtgtgaagctggatgaaaggagaagacaggtttcacctgtgcttatgctgcttttgcgttgcttttaagcaatattctgaccaaatattataaccataaggtctctctctctctctctttgccttgaaacagattaaagatttcagtgatgagaagagcagctgtagtatatttctcctgagtaccagagctggaggactcggaatcaatcttactgctgctgatacatgcatcctctatgacagcgactgggtaatcaaatcaattaatttattttctttgaaggaaaatctttctctttcgtgttgtctccaactgtgttttgtctgatctccagaaccctcaaatggacttgcaagccatggacagatgccacagaatcgggcagacgaaacctgttcatgtttataggctttccacggctcagtcgatagaggtaaaactctttgttgttcatatcaatcaatcttaacttcaaaccattgagattgttgcctcatgagattggtttatgacatttgctcagacccgggttctgaaacgagcgtacagtaagctcaagctggaacatgtggttattggccaagggcagtttcatcaagaacgtgccaagtcttcaacacctttagaggttttaacttctcttaaagctcaatcctttttagatacacttattatcaacaaaatctcctattgacagcttgaaccaaactaacacacaggaagaggacatactggcgttgcttaaggaagatgaaactgctgaagataagttgatacaaaccgatataagcgatgcggatcttgacaggttacttgaccggagtgacctgacaattactgcaccgggagagacacaagctgctgaagcttttccagtgaagggtccaggttgggaagtggtcctgcctagttcgggaggaatgctgtcttccctgaacagttaggacacattaataagccaggccttgaaaccacttctgtgttttttttttttttttccggaacatgatcggttacttttggctgggaggatttaattattagagggctcggaagtttttgtaagttaaagaactcacttaaaaccctgaaaacatgacagttaatggtgattagctctcaatgtgatgaaaacaattggccctctgattttgctgttgcggtaatattatgacttgtgtacgtttatagtctttgtagtctgcaattttggcattgagctatttctcacgaacttatgggatcttatgttttggatttgggatttgttaacttatatgattaggctcaatagtttcacagaatattaaaaacttgagtagggtttaaaaaagaagcaaaaagctccgatgccgggaatcgaacccgggtctcctgggtgaaagccagatatcctaaccgctggacgacatcggatttgttgatgtctattcttgtaaatagtaaatatttagttttatcggttttgcatctaatggactaaaacatgaacacgagacgccgacaagaatgaatggggcaggcaccaaacatttgggtaaaagtatgcagtggggtattattgacaatttgaccattacaagagctaatcttagggggttttagttagtaaagcaaacccggtttaggagtaaatatggagtgagaataggggtaattaagggaatttaagagaagtcatcatcgttttccatttttcttattttaagcgcctcggtggctatctctcactccgttcgcgtcttcctcttaaaggaaacctcctctacgcgaaattcgtattctctcatttcttctacggagatttgcatcgaagaaactgactcgcttgtggaatcaacaacaagacgatgtggcgctgcgtctctcgtggctttcgagctcctgcttcaaagacctcttcactctttgatggcgtctctggatctcgcttttccagattcttctccactggttctgtatgatctctcttccttctccttccgttttgtttattttctaattcgatcttatgtaattcacgaatcatagttttatccgccattcaaatgcgttagtagtcgagcaaattgttgaaaatcggggaaaattttgatcgatttgttttgtggtgtttattttggttatctgttgagtagaccgatacgagatcctcttatacgatagtggatcacacttatgatgcggttgtggtgggagctggtggtgctggtcttagggcggcgattgggttatcggagcatggctttaacaccgcttgcattactaagcttttccccacaaggtcacatactgttgctgctcaggtatttttcgttactaatctccttatactgtcgatttttaaatatagttttgtttctttttgattgagattatgttgtcgaaaaaactgtcaagggtggtattaatgctgcactgggaaatatgtccgaagatgactggagatggcacatgtatgacactgtcaaaggaagtgactggctaggtaatcttagtcttccttttgtttcttctctttttttagtgaaatgtttttttttgctttttgtagctcttatgtgatgtggtttagtgaattgattagtgagttctttcttgtttatttctttgtgtaggtgatcaagatgctatccagtacatgtgtagagaggcaccaaaagcagtcattgaacttgagaattatgggctgcctttctctcgtactgaagaagggaaaatttaccagcgtgcatttggtggtcagagtcttgactttggaaaaggtgagttgtctgatgtcttgctattattgatattcctatttactttgttttttaataggtctctcatattggctttcctatttttctgcttcaggtggtcaggcctatcgttgtgcttgtgctgcggataggactggtcatgctctgttgcatactctctatggacaagctatgaagcataacacacagttctttgttgaatacttcgccttggatctgctcatggctagtgatggtaagttaatcaaagttattctccttttactgtcgcttctattagtatttgccaatttggtggaggggtgatgtcagtagaattcagaactagtagttgattttatgaggtggttggatggatcttattgatcgatttaagggaaagcgactttgaagttaatgcaacatttctatctgatatgcaggcagttgccagggtgtaattgcactaaacatggaagatggaacattgcatcgtttccgttcttctcaaacaattttggcaactggggtgagctagtttctatatgatacgattttttgcaataacgaaaatatgctcacctggtggctaatgtttttccaggggtacggcagagcatacttctctgcaacctcagcacatacatgcacaggggatggaaatgcaatggttgcacgggccggtcttccactgcaggttttccacctgtttcgtttttattcaaaattgtgtatgatgtatttgtctgtaatttgtatgctaataatcttatatttaataaatttatgcaggacttggagtttgttcaattccatccaactggtatatatggggccggatgtctcatcaccgaaggttagtatcatgttctcacatactcgaatttgtttgcaatataaaatttaatgtgtttttcacaaaaaaaatttggtgtttaaacaattgcaggatctcgaggtgaaggtggtatccttagaaacagtgaaggtgaacgttttatggaacgatatgctcctacagccaaggatcttgcatcaagagatgttgtctccagatccatgactatggaaatcagggaaggtcgtggtgtaggtatgttccactgaaaactacttcttattttcagagtgaactctcattacatgatatgctttgatattgtgatcagtctagtttgattctcaccctggacaactttttgctgatatcttccaggaccgcataaggatcatatctatctccatctgaatcatcttcctccagaagttctaaaagaaaggcttcctggaatctctgagaccgctgccatctttgctggtgttgatgttaccaaagagccaattcctgtcttacccacggttcattataacatgggtggtatcccaacaaactaccatggcgaggtaagaataagaaaagtcatttaagaaactttgctgaaatttgtgtggagttaagcatgagatggattagaagcctagctctgaaagttattctgttaaatcctgcaggtagttaccatcaaaggcgatgatccagatgcagtgattcctgggctaatggctgctggggaggcagcttgtgcatctgttcatggtgccaacaggcttggtgcaaattcactgctcgacattgtcgtatttggtcgtgcttgtgcaaatagggttgcagagataagcaaaccaggttagtcttttttgaggactgctgttattataaaagataagtctcttctgatcatttttttttctttattcgattggtgcaggggagaaacagaaacctcttgagaaggatgcgggtgagaagactattgcatggctggacaggttgagaaactcaaacgggtctctacctacttcaactatcagattgaacatgcagaggattatgcagaacaacgcagctgtgttccgcacgcaagaaacattggaagaaggtaaacagtgatctgaacttgttctgcatttatttaattctctcacctgcaactgcaatccattttctttacaatttattaccgtgaaacaatcacaggttgtcagttgattgacaaggcctgggaaagttttggggacgtccaggtgaaagatcggagtatgatatggtaagacagactctattcacatgggattgattatcacactgttataaaatctggtgaactcttgttaatcttggaaactatgaataaaatgcaggaactcggatttgatagagacattggaactggagaaccttttgataaacgcatccataacaatgcattcagcagaagcacgaaaggaaagcagaggagcacatgctcgggaagacttcacggtttgattccttgctcagcttttccacaatgattgattatcccataatgatgaaaccataacgtagtataaatgaatgcgtgtgtatgcagaaaagagaggatggagaatggatgaagcatacattgggatattgggaagatgagaaagtgagattggattataggcctgttcacatggacactctcgacgatgagatcgacactttccctcccaaagctcgtgtctattgatcgagcccatgtttttattttatctgttatcggaataataataataatcaggaaccccccaaaaaaagggaattaggagaagaagacggagttatgagctgatggagcacaaaggactgttctgaaactgggtttacgttttacaccagaaacgatgaaaataaattgatagaaagaggaaaaaacactacaattcttattttctttatcagttcctgaaattgttacattctttgttacctgttaattacgccttggtgatattcattttttttttttaaatcaaaatgttcgaatt

SEQ ID NO: 975 - DNA, 69850 bp, Arabidopsis thaliana
ccgtatcgaccgtgaaagttattttgcggtgataataggtatcagaacacgagatacaattttgagttgtgaccattagaaaaacaaaatttgggttgttttttcttgtctgaacaaaattttattttaggtaaattcggatcagtcaaggcattttttaggcctacaagtgggggtaatttcaaatatttttgttcaatatttgcgtatctgagcgagttttagattggtccgatcgtcgtcgctagatgataatgttggccgtagaaaatgtgacctttataatgtatctctctttaaaagtcgtccacttgcttatggcgtatactaaaaaagtgctcttccacatatgcaaattgaagatacagtcggtgaatgtaaatacaaaaatgatctatgattacgaccttgaagcttagaaactagccccacaccaattcgactaattatgtagttcaatattacactaaccaaccataagatattatatttttccgcatgcgtgtgtgttattcctaattagaaccaatcgataacaaaattagaaagctccacacaaattaaactaaaccagtcgacttcaccaaccaaccttatctattaacctgctcatttcacatttaacaattccaaaacccaatcaattatagttaattaaaaaatttcgacacaaagctgacttagcaatgcctaaaacgcaacgtatgaaagagaaatcgaggaatgtcgtaattaaattgtctaatcttcatctaaccttgtcaataaagtagggtttttactcactcatacacctttctttttcttatccttatcttaaagtaaaaaatctttttcaaatttactttgaccggttacggaacttatgcttaatgggggaagattcatatatatatatatagacatacaaaacttattagaatatatggagttttacccggaaaaaaaaactcattagaataaaaactaattcttgttgttatttactttttacacaatgaatttaaccaaattgtagagaaattaccttatctactgcttttatgttaatatagttcataagaaatctgaaaaacactatgcacctagtgctgtatattcagagactgttgtatgttttatgtaaaaactgaaagagagatgtgtaagaagtgggtcaccaaagtgaagtgagtgacattttgacgtggagacaaaggtgcagtgcaacacaaaagagaggttagtcgaaaagccagagagattaaaacgttgttttttgcatatttttctttcccactcacttttttttatataaaaaaacacatttgcaaattatcatttataaaaagaaaatactttaactatatccttctttattttctgttcaaccaaaatactttaaatatccaacacaaactcacattttaatttttggtgatcgttgcacttagtatggttgttgcacacattagaaaaactaaattctataggattcaattgttctaaaattctaattatatatgtgaaaagatgaaaagctgtcagattatatttcccttactgtatgtgttactattaaaaacactccagattattttttttaaaagctttggaaatactgttttatttttttcatttttgggtaatttttaaaagctaattttaagattggttgcttcaattgtgcaagatcgatccaataacagttaaaaaggccccaccagcgattccttttccgtgtcatattttagaacttacatgtatattgggctgatccatgggcccatctgtcaccctcatacaaactatatataaattataacacacacacagtctcatatatatataacaagttgtcaatgaataaattgacaatacaatttgagattatgtcttactttaattaattattttatggtgcgtctatattgtatcatgatgttaatgtttggatatatatacaaacaagtaattttcacatcaattgcactcttcttttaatttgtttggtaaccatgaaaataagaccatctatttatttatctatgaatgaataattaaggaggtaggtgagtcactgagagtcaagagcagtttgtgatgggaaagaagatacacattacagagatcaacggcagagatgaggaaccctacagtatgatgacgtcatcgttgacagtggtggaccccacctctcgggtccctcgaaaagagcgggatgagagatttgttttcattcatacacttctcagtcttctgaatcttcatcactcttaaactttaggttaatttcattttttgtaaacatattttacatctatcttaacccagatttatatacggtacgaatttattgaaaatatggtatagtttggaggcatgaaagaagtaatatcaatattgacaaggaaaagagcgagtttatttgtctagtgatgaagaaggacccatagcttcgtcatatcctctcctcccactgagcgtttcactcaccaaaaaagctctctttaatttattttatcttctattcctttatttagcaaacatttttttagtatttgattataaaatctgtttaatttttgttttggcgcgagagtgtgcgtcacgtgaacaaatttacattgttatatcccaaacggagacattaatatgaacaacctcggccattatatgtcatatcgtctttaaaaaatgttacacaacattgtgaactcaaattcagaaacttgttagcggatgaatcgataatgacgagttcacaatgtaaaactatgataacattctcttacacacaaaaactaatgtgggagtaacttgtacatatctctctatttctttcttaggagactaacaatttggaattagatccaatgatttctataatgtatgcataaatatgttattggttaagagatgtggtgtgtttatatcggtattattaccgttacaaatatcattgtcttaaaaataacaaagaaaaatgtgtggacccacaatgaaatcagacggtcagattttaatcaaacgttgatccactttctagggctgacctttctttcttctcctctctttacctctctctctcttctaaaatccaaagcttgagatcccgccgtttctctctggtcatcatcctcttcttcagtgaccgcaaatctgcatgtttggcagtggtttttatagaccgccgggagggttagatctaggcgttaagaatggcttacatgtgcactgatagtggcaatctaatggctattgctcaacaagtcatcaaacagaagcagcaacaagaacaacaacagcagcaacatcatcaagaccatcagatttttggtattaatcctttgtctcttaacccatggcccaatacttccctcgggtttgggctttcaggttcggcttttcccgacccgtttcaagttaccggcggcggagattccaacgatcctggctttccttttcctaacttagaccaccaccacgccacaaccaccggcggtgggttcaggttatctgatttcggcggtggaaccggcggcggcgagtttgagtccgacgagtggatggagactcttatcagcggtggagactccgttgcagacggtcctgattgtgacacctggcatgataatcccgattacgtaatctacggtcctgatccattcgatacttacccgagtcgactcagtgtccaaccgtcagatctaaaccgagtcattgacacgtcgagtccgcttcctccgccgaccttgtggcctccttcttcgccattatcgattcctccgcttactcatgagtcaccaaccaaagaagatccagagactaacgactccgaagacgatgacttcgacctagaaccacctctcctcaaagctatatacgactgtgcacggatctcagactctgaccctaacgaagcttccaagacgcttcttcagatccgagaatctgtatcggagctaggtgatccgacggagcgagttgcattttacttcacggaagctctctccaacagactgtctcctaattcgccggcgacgtcgtcttcttcttcatctacggaggatttaatcttatcttataaaaccctaaacgacgcttgtccttactccaaattcgcacatttgacggcgaatcaagcgattctagaagcgacggagaagtcgaacaagattcacatcgtcgattttggaatcgttcaaggtatacaatggcctgctcttcttcaagctctagctactcgtacttctggtaaacccactcaaatccgggtctcgggtatacccgctccatctctcggtgaatctccggaaccgtcgttaatcgccaccggaaaccgcctccgtgatttcgccaaggttctggatctgaatttcgatttcatcccaattctcactcccatacatttacttaacgggtcaagtttccgggtcgacccggatgaagtactggccgtgaatttcatgctccagctctacaaattactcgacgagacgccgacgatagttgacaccgcactacggctcgccaaatcgttgaacccgagggtcgtcactctcggagaatacgaagtgagcttaaaccgggtcggtttcgctaaccgggtaaagaacgcgcttcaattctattccgcggttttcgaatcccttgaaccgaacttggggcgtgattcggaggagagagtgagagttgagcgagagttgttcggccggagaatctcgggtttgattggaccggagaaaaccggaattcatagagaaagaatggaagagaaagagcaatggcgggtattaatggagaatgccggttttgaatcggttaagctgagtaattacgcagtgagccaagcgaagattctattgtggaattacaattacagcaatttgtattcaattgttgaatctaagcctggcttcatctctttggcctggaacgatttacctctcctcactctttcttcctggcgataaccaaaccaaaccgatccggtattcttagttttgttttgttttcaatgttatttttggttagacaaatattcaattgttaatatactccgtggtcagagtgttttgtttttcttttagttcgaacgttgaattaattcaggggtaggttttgaattctctgaaccttatgtgttttttggtaacatcatttggatttgtgaactaggtttaaaaactggtcttagtcttgttgttttctcattagataatttaaactggtttgcttctttatttttggttggataaagtgaccggttctggtcatctgtttgagatgtaattactatttcataaaattaggaagttgaaagccaaatatatttgtaactactcttttatttgtaattttgctcaaaaaagtgatgaaatgtagttttgatatatgaatatctaccattatacataagtatatctgaacatggtacaacttatgaaagctaaatgtcaatacttgcaaagatataacaaatacaagttacatgaataagagatgtgtgttgaatttataagtgtcattttcttttcactttaaaacaaacttcatcttcttttgtttcttatgtgtcaaagttgccacagttgctctatttgagtctttcagtgtcagtctcagtcactgtactgattttacttttttttgttgagtgtgccaatgatgacatcactcccacgtcctccatccgtcttcttttaacggtcacgtggctcccaccctcttttctcgatgtctttaccgacttgttctagcccaacttacttgggccatttagattttttggtggcccaagttgctaaaagaggatttatcatagaaatctgaacccgttgcagcgctcaacacatgtcacagtcctgacaaacacgtattcaaatccttgttaagtcccgccacctgtcaccagagcaccacgaggcaaactctgatcaggacaccgtcgtactattatgtcggaagacaggaaagcttaattaagcttaaacctgacgtatttaacttcgttaactctaccttactaaagggttttaatttaaaacttatcatctcctcgtaagaataaaaactacttactctataaatttaagcttcaagaaacctccaaaagcagagaaatgatcaacgcttttaagactatccgatcactgccctcgaataccaccgtctcgttctgctcaacaccatctcgattaggccggaaagtcactggagttagttttgccaccacttctgatcagcaaaagatggataaaaagcctgaaaatccaaacgagaaaaccgggttcgtctcctccccatatgtgtgtagttgtttctgattcgtaatttggatgttattcaaaaaaaatttcgttctcttctttactttgatggagcagtgacgtgatgtcgcattcttatggagaagggtacgcaacaaggtctgacgaagaagggtttggaggaatctatggaggaaatcaaacacttcagaaggaaaacgagatccatgagaatcaccctggtactcagaatagttagttatcatatacacgtttattactacttatatgatcacttttattgtttacgattctgggtgtgtgtgtgtgtgttttcatgttattgaagattacgacaaaacgcaaggtagcgaatcgaaggagaaggagaaagcaaggaaccagacacaatcccactgctaaagaaaaaatgatgatttagtgtctttgttctttatgctttaataaaatcagacttgtgctctgtagttcgtagactctggttagagttttttttttgttaattgcgttttttgacccgtaacctttaccgggtttttgttggttatccttatcacttttgtaacactcgttgaattagtagtttttgttgattgttgaacattcccttaatttgactgtgtttgtttatttatgaacaaatctacggttttttagttgaaccgtcgaggaaaacattcttagataacgtcagcaatgaatattagcctgttttcggactttcgattccgatgcaacacgttaaaagtaacgtcagcgaagataaatttggtaaattcatctgaaactccaatgctgatggaacttagctggtgtgttgcgtgttcataatttatgttattagtaacgtcttagaagttggaatattcactccaagttcgcacttcaaaactttcaacaagtttttagttcttatcgtacgtctcaaaacagagttgaggagatttagcttctactgtttagtgttctacacttgcttcgtacaaagaattgaatttttatttccatagttacatgcacatatttgtattaacaatctcttattattggttagtatcatatctgtagttattcgaacactgggggcaaatttcatttaatcaatcacctaacgaggctatgatgcatgattaacgaacgttaaagccaaaatgtcaagactacccccttattatcagctcgcagttggtcaatgcctcaatggtctgaagttcagactctgaactataatacaaggtcaactcaacccgctggtagtaacgaaagtacgaaacagtcaaaaacatatcttaaaaattacataaaaaccggaaacgaagttgcagaatttacagtttctgccattgggacaatcattcgatctcatcattatccttctttctctccatggcagaaactcctcaaccgtatctcatcttcgtcttcttcgtcttcactctaaccgttgctacacaaaccaccggttcggttaagtgcaaaacaagtttgctccgttacccgtttggtttctccgacggttatccgatccgattcaactgctctgagataaccggagaggccgtgatcggtgaattcgctgtgcaagaagtgacaaactccaacatctacgtcgaaatcccgccggtttgcaaacgcaacatccgtaaaatcgaacaacttttccgggaaaatcttgctccgtcgaaattacagaacataattctcgtccaaggatgcaagaaacagaacaagtcttctaattgcttaatccgcaataaattcgttgaaaaccggttaaatctcagcaaatgtaaatctccggttagctgtctcgacggagcaacaacgacaactgccgatgtgatgagtttaggcgacgttgtgaacggaagtggatgtaagtattggttctcttctatttctcaatcgcaagtttcggtcaatttgggtcgactcaagcttgattggtggcttaagggaagttgcagtaacaccacttgctcggagaacgcagactgtgccaaagttaagctcgacgacggtggactcggtcatcgctgcacttgtcgtgaaggatttagcggtaaagccttcaccgtgcctggtggttgccaccgattaggttcgttccggtctttgacttttgttttccaatcttgaccgacatacaaatacaccaatggtacaatgacacgtacgcttttagcaaggaggaaaagctgacttttcaaaacttggcggaagaaattagttgacaatgatttttttttgataaacaataaaacaaaacgatatttctgttccgacaaaaaaatgaaaagaaaagatatttctcttaattatttttaactgtcatggtttcagtttacaaacgcaaaggactacacaaactcgttgttcttggtactggtaagtaaattactaatcctattattcggttaagtatcaattagttgcggtttaattaagtctcgaaaagttgaatgttttgtgtttttgttatagcggggattttggttggagttttagtaatcgtggtcttgatagctacatatttcttccggaacaagcaatctgcgtcatctgaaagagcatcaatcgcgaatcgcttgctttgcgagctagccggaaactcaagtgttcctttctacacctacaaagagattgagaaagctaccgatagtttctccgacaagaacatgctcggaaccggagcatacggaacagtctacgcaggcgaattcccaaacagctcatgcgtcgctataaaacgtctcaaacacaaagacactacaagcattgaccaagttgtgaacgagatcaagcttctttcctctgtgagccacccaaatctagtacgtctcttaggttgttgctttgcagatggagaaccgtttctagtctatgagttcatgccaaacggaactctttatcagcatttacaacacgagagaggccaaccaccactttcttggcagctccgactcgccattgcgtgtcaaaccgcaaacgcaatcgcacatctccactcttcagtaaaccctcctatctaccaccgagacataaaatctagtaacatcctccttgaccacgaattcaactccaagatatctgatttcggactctctaggctcggcatgtctaccgatttcgaagcctctcatatctccacggctccacaaggcactccaggatacttagatcctcaatatcaccaagattttcagctctcggacaagagtgatgtctatagctttggagttgttctcgtagaaatcatctcaggctttaaagtcatagacttcactcgtccctactctgaagtgaacctagcctctcttgccgtcgacaggatcggaagagggcgtgtggtagatatcatcgatccctgcttaaacaaagaaatcaatccgaaaatgtttgcatctatccacaacttagcagaattggcgtttcgctgcttatcctttcacagaaacatgaggcctacgatggtagaaattacggaagatctccaccggattaagcttatgcactatggtacagagtcaggtaagttcaaaaaccgatccgaaatagatatgaagagacaacaatcatttccgagagaatgaaaagtaaacacttggcagaaattatgtatagtttagtattcaagtttttttattcgaattttaagctctatatacatagaggtaaaactctgtcttttggttttattggttccttgtgtatgaagtaaacagtcggcagagaggaaaaaaaaaaagaacaacatgcaaaaatatactttaccgatagcacgggataaaatattgggcctgatcagttccacagattgtccttataattgggccttgagagtttacaatgtacagtagtaaactgtaaacgtaattaataagctttttattagtgtttgaaaaggtagtaattaattagggaaggatcgtattttggtcagaggaaggatacgcagcacacactccaactaatactcgacagctcattgcttccatttgtcagcttatccgaagccgaccattttgaagagtttagtttaatttaaatattatcggtggaattttaagttcaacctattttctatatatatatatattttttttgacggcaacctattttctatattacttactcgttgataatatcataactaattaatactacaacaaaaaaagtatagtatataaatgatcagttgctttgttataattaaaaataaaacaatgtaaccctgcacgtacgcctccgtagtacccctgtgaacagctttcgatgaattaattagtcattacattatcattttatgaacaaaaaataataaattgtcatgtatatatatatttattgtcgtccaactataaacttaagaaacagtttttaaaaagtaaattaaaaataattttagtggttattcatatctatgtatagggatgggatggttatcatggtccacttattttcatcatcttcgatccaaaaaaaatcatccacttttcaaaatttagatattttattaagagagttataaatgtgaaattccaagttatacaaacaactatttatttctttgtcaaccaaaaccattaatatattatcaaggatttttagtagtatattattattgggttattttcaaaaaggtcaaatcaattatttcggaattgaatctttgactagtcacgctgaagagaatgggggcttcttaactgaaagacacgtgtcataaacctatttgccattcatcacctgagaaaagcgttctttgactgcacgttatatacttacttcatagaggccgagtgacttgaagtagagacccaaaccttaactataaccagatggttccgaaaatgagaccaagatactatacatggatgattaatacccttacattcacgtctgcagaaacaatatttgttcgttcttgtgtatctcttcttatgtatatacttaacaccaatttactagtagtaaatatataacgagtgtgtaataaagaagaatgagagatgcagaagaagcacgtggggtcaggccaaaaggtcggcatcgccagctaataaaacctttcttttcactattgagtcaaaccatagtcaatgcaaaagggagattatggttcatatttttcccttttgtagaattataatttacaagggtggatggtattggtcgaccgcaaaacaacgtgattgtgtgtgctaatgcaatagcgagctcttcgtgttacaagttcgatatttgtatgtaccaaaacttcaaacgcttgatatttttttataaagtagaacgttagaatccacatataggtaggtacaagctagagggtgcttttacggttttaacaaatcttttggtcgaatttattgcataagaacatatacgagaagagacactctggctcattaattatgtttttttaactatttgacgaaaattgtagaaaaaaggagtgacgtagctttcaaagacacttccgtggaagagatgccatctctccatatctggctactatgacactttccttttatatctttctcccctcatttcttttcgtttttttcaagtttcatcaaatattattcaaatttgaatcttttgttttggacccacgattatttttatttacccaatgctcttaatttttattttttttgttgaagttgcaaacattacaagtgaaaaataacctgccctagtagggatcttttcattaacttcaccactaaaacaaatgaaggtaaatgcatgttgaccatttatatgtttcgtaattaataacctgaccacggaatactcattaaataggttactttatagtatttgaaaaaaagaaaaaaaaaacattagaggattcactatataaataaataaaataataatccactacaatactataagttaagttatcttaaggagacctctcggaatcatcctatttcgccttaaaataaaatcatctacagaaacttttattctttagtatgatttgttagaggagatgacaactgtatattaatattttatacttatctatgcgtacgtgtgtatttatctttttaaaaacaagaaaaaagtaagccaagactcttcgcaacttctaaacagtaatcttctaatctactaaattaacaggagaatattagaaaaaatatatataggctgtctcttaaccttttttttttttcacaccagtgccttaactttggttaacatgactgttaaaatggaaatcaaatcaccattttttttttcttgttaactaattcgataattaagaaaaacacagttattacgttatgacaaaacatcatgtcatatgtactgatgtacacggtctgacattttggcaatgcaaatcacttcatattatcccgacaataaaaagctaaaatgaaataaaagaaaaattaaagttgcagttaagtgtgttaccaaacattaaaaccaattaaacgcaacacaatatgttgaccaaacaaaatctaaaaaaaacaccattcagtaagaaaaaaaaaacgacccaatatacaataaatttaactattatatcaaaaaatattataatcgacgatcaagacttagagcatgttcataagtgatactcacaaagtatcattaagagtttttttagtattatttataatgtttgtttaataaatctatataatattttttgtttttgtcaaatgtgaccaatcagaagaagtcacgtcagatgatattggtatcacaaatattagtgggctgatactgatcaagaatattctaattgctttactaatataaaaataatttttggacttgtgatactctaaaaatatcacccatgtacatggtcttatatcctcttgacgaaaaaagagttatatcctaatgtattatattaatattgttatcgcgtcgcaactctaattcagatatgggtaatagcttgtgtgggaagtgggagattttttcatttggactactgaaattcaaatactacaattcacatagtcgagagtttttaaaaaattatatgtttgaatatctgattggtatggaaaatttctagatacatacacctatttatcccttaaaaaagaaacgaaagaaaaaacagttccatgtgtttttaatttagcaactgtatcggagcgtgtctcagcagaaattcttgggcctatttttgtccaaattccaatagccgaacagtcaattgacacgtgtataagacatcaccatcccaagtaattactctctattgtactgtacagattggtttgatgataaatattcaaatatatgccaaacagtaaataataactaatcaattttttaaaaaaaaatcaacgaatattttctttcataataaaaaccctaaataaggaataacaaagtaaaaaaacaaagtttttaaaaaaagatataataatattaatactattttggttattatggcttcatcattgatcctttgtgcataagaactaaatgagtaattgagtactatataatactgcacaaggctctctctgtgcaattgactgtccctaccaaaattaactctctctatctctctctctttctttctctgtgtaagaagagtctttaaaagtgagtatatttcgacacaaacgagctctgtctgtaatggcatgcttagaaatgtacaactccaatggtggtggtggaactcccatgagtcctagaatctccttctctaacgatttcgttgagattaggccagagacgaccaagacgacgagatcaagccctctctctaaacaagagggttcttcttcttctttttcagataatttcgagttctctgtctcaaactacacaatgatgccagctgatgaacttttctctaaaggaaagcttttgcctttcaaggaaaccaatcaagtccagagaactttaagagaagagcttctcgttgaagaagacgaagaagaaggtccacgtgatgctaccaacatcttctctctcaagccaccaatcttctcatcatcttcttcttcttcttcttcttccaagggaaggtggaaagggcttttgggccttaagagggcccatgttgggtctaagaacaatgaagagcgatttgttcatcatatgattaacaacaacaaacaatctcaggtactttctctgatctgccttggatttgttcatatatatgagcatggtgtcgatgaaagtcgtgtaatttgtttttatttctcttaaatacgttatgtaaaaatacactttttgttctcgaaatgttcataggaagcaattggtggaagagaagggtcaagttgcagggagatgaagaagagtatgtagagcttaaaaacaaaaaaggctttcacttggtttttgtttttttaggaacatggctgcttccaaatttttaaaaatttagatttatgttaatcttagatctgaaaaattactaaaaaaaaagacacttatgtgttgttgacggagatggtttatttcattaactgttttccactacacatgtttcatcgattcttctgagtttttatcttgttttttctttttcttttgaagggtgtgagtattagatctatctttgtcgactatttggaatggatgtagtttttttttttgtcgttgtacaaaagaaaaaaagaagaacagagtgtgagtagttcagaaaatttaagttccagttgttttttaaaattgaagcaacgcatatgtctattgtcttcgtctttagacatctcttgtctgtccattcgttattagctattaccattcaactccaacttctctctcgttgactgtgttatctagtgattactatgcctcagagattcagaaatatgtcatataaaaattactagcgtttctttattgcagtttccccatataatggcaatgcagcgagaaatttacatggtttcctaaaatattgaaaggcccaaaaattattgtttggtcttgttgggcctgaaatggaaataagcaaatacatattcatatttttttattttttttcaaagaagatattcgatatttatcaactgatataagataagctattgggcttctattttaacagttgtaacccgccagtaaaaaatgcgctagcttatattattaccgtgactcgatctttcaaaatgccacgtggcatttattatgtggatttggattttctaacttgttctcctcacgaaacaaaattcacccacacaagacaaagcgatcgtcgatcccacccacaatctaagatcgccggccgattctcgtcgccgacaaaagaagaaccgaggaagaggaaagcaactatggattccacacctgtaaattgggaagcgcttgatgctctcatcatcgatttcgttagctctgaaaacctggttgaagacgccgccgccgccgtcaattcacctccatctccattatcgtctccttcttcttcttcatctccttctatttcctcttcttcttatcactccagattgatcattcgccggatccgaagctcgattgaatccggtgacattgaaaccgccatcgatattcttcgctcccacgctcctttcgtcctcgatgatcatcggattctatttcgcctccagaaacaggtgaatctcctcaaccttctatctgaatcccccccctgctaaaactgattaggatcatcaatccaaatttggtttcttagggttgctggaaattttcgaattagagtatagattttaaacagaatctttgtttcctgtgaagaaatttattgagcttttgagaaaaggaacacatgaagctgcaattgattgcttgaggacttgtgttgctccctgtgctcttgatgcctacccggtactggaatattccatctctcttttttgtaacatactacacttttttttatggatttgttagattcttgctctgtttttacctccatctttgtaaaagaggttttgttttctgttcctgagttctcaatctatgaagttctgacctctgcatatatatctcaaggaagcttatgaggaattcaagcatgttcttcttgcactcatctatgataaagatgaccaaacctctccagtagcaaacgaggtatgccatgtttctgcagcttttttgtttattttgttttttcttagaatgttatctgatcttgcggacacagaatgtcctatgtttattttttgaactgctgctatacatcatgcagaatttgtattttggattataaggaattgcgctttctgttcttcagtgggcagagaaaagaaggtatgaaatggctggactgatgtcatctgtcttacgagcttctttgcaagcatatgatccagtattttctatgacactaagatatctgataaggtaaggctaagttcgtttttcaactctcttgttattggttgtgttctttttcgcttactctgattaatcccttgttctacctttaccagcatacacaaaggattttgctttcaccaaggaatttcttccgcagtttctgatctaacccacagattgctcctggaggaacgtgatgcaccagccacgcctattgaaagcatgtatgaagtaccaccgtttgatgaggtaacatggcacttagcttcttgatcatcttgtaatttaaatgtgattgtatctataacacgcattgtactgaatttttatatcaaatttcaggtggatatacaggctcttgctcatgcggttgagctcactagacaaggtgctgttgatagtatgaaatttgccaaaggtgaccttttccaggcattccaggtttcaatcccctccatttctttatacattctatgcattgtcatcaatcctcaccatccctttgctgttaaaatacaatgtcatgcgaaaactttagtttgcgcttaatttgtatactgtagttacttactattatcgtggtttaattttatatatctgcactgcaacctaattcgtgcttctacttattgcagaatgaattgtgcaggatgcgattagatgtttctgttcttgatgaacttgttaaggagtactgcatatacaggggtattgtggattcaggttggtgatcaagctctaggcagtttcaagatcctattcattattctaccactttttcttttttggcattcatcaatttctgatcgttttaatcttcaatcagagatgcaaatgatcacgattcctgccaaacgcaaccaatcggaggtgggccgcagcttatcaagagattgttcttcggaaatagatctcaacacaagtcaacattcagatattgagaattatagcaacaagagcatgctcgatggctcactcacatatgacactgaaatgtcttgcgaagaaggaggtgacgttggcacacgttatggcagtgaaccaaccagtgtttgtgaagattgcagcactagctggtcaaatcaatgtgaaaatacaagagctcttcttagaattagatcccatatgaatagtgaggggaataaacgcaaaagatggtgtgggcgtactgctgaaatggattgtcttcctcgtatttcatttgccaattccgagtcaggcacaaaccctatagaggacaagtatgagatagcgttggcactgaaggaattggttagcagaggaatggcagcagaagcattttccgaaatcagcaccatggatccagattttttcacacaaaatccgggtttacttttccaccttaagcaggtaatggtgcaagaacaacttaaagctctcggtatattccccccaagagatattgtttgtaacttcttcgttttgcacagtaacggaggaacttgtttatatatatatatatataaatgtacaggtcgaatttctgaagctggtgagtgctggtgatcacaatggagccctaaaggtcgcatgctttcacttaggtcccttagccgccaatgaccagtctttactgaagacattgaaggagactttgttagttttactccaacccgacggaaccgcacctgggaaagatttgcctttgaatgatctggcaaatacgctacaggtaacaatgtttttagttttgatctcttcttctggttttgtctcagatgaaagatggaacacacaactggtgtttgtttttgccattcttttttaaggtttctgtcggtaataggctcgggatcgaagaaccgaagttaatgaaaataatcaaagcgacgcttcacacgcataccgagtggtttaagcttcagatgtgtaaagaccggttcaataatctcctgaagatagattctttgaaagaagtgaacaccgatttgattggtgctattaaatcaaaatcaaagaaagatagcaacacaaacttgtcttctcaagtcacgacgacgtcttcaagcaccatgacatcagaagatggtggaagcagcagcttgatgatgatgactcagactttgccaagagaagctttgtgggaagaaagtgcaattcttaaagtaatggtacgtttttcaagatccttacgagttttggatcaataattgtttatgtttttcggattttgcttatattgtatagtatagtgacgagagagatggtttcaggaatttctggcgatgccgaggtctgatgcaattcaactgctatcacaatacaatggagacgctgaggctgtgattcagcaactctttgggtaaacccaaaccagactagaccgcgtagaactgaactgaggccggtttattttaatttggatgagttattattggtttattcatttctgtatttgtacattaactttacacagacacacttgagtaaaagaaaataaatagttttatcaataaaaaagtggttgcatagagaggaaaaaggacgtcgatagtatgggccttaatcaaaagcccaataattattttagaatgttaaactgtatgtacttcttggaatgcgaagctgcaaggaagatacacagatttttggcggaaaaaaaaagataacaaagattttaaaagtattaaggcaaacagcacaataaaagggtcaaatataaacaaaatgaaacgataaaaaaatgaataggttatttggagagtgaatggctttcgagccgctagggttttttttgattcgaagtcggaccaactttaaggttgtaaagctaaataaagcttcggctgtgtcttttttgaacgaaaatcttaattaatgttctatttaatcgaacatcatgaatatatatgatctttaattttgcttccgacacgtaaaatgatatgttgaatcattttatcaattttggtactgtcttctcgctcactcttgccaatcttctatttcttcttcttgaattttcttatacataattacatatcaaaaatattaacatataagaaaaataagtgttcacacgtaattgaattttttgattccattattttgcatgttttcttgcactagtcattgtattttaatttttaaatagaatataacagcatgccacctactttgtaataatcataataaacaaactcgactttaataattagctagtttatttgaaataagcaggtacaatctctatataaatgcccccatagaagcaagtgttacttcacatcaccactctcaaatattctcaagagtccttaacaacgatatttagttttttcccttttttctgttttctttttatctcccatttttcttccaatataatggaatcgtttatgggtcaaaagaaaacattgtacgcgtgttattttttaatgttggtgttttttttagggttcaattgtgtccatggacgaaccctaaaagttgatgataagattaatggtggtcattatgatagcaagacgatgatggcattggcaaagcacaatgatatgatggttgatgacaaggcaatgcagttctcgccgccaccaccaccaccaccgccgtcacaatcgggaggtaaagatgctgaagatttcaggcctacaacgcctggccacagccctggcattggccatagtttatcccataattgatcattttcatgcaatttcacatatgtatatatgtgttgtgaacttatgattaaatattgttcgttttaatttttcttaaatttgcttcgtggaataaaatgatttatgtttttttcaagtcgtggttgagtagaacacgatgcgtacgtatattaagaacttattcgggacctagaaaatatacacattgtatatggccaaaatatactacaagaaatgcttatttataaacacagtttacatgcgagtatatatgtaaattctatatatgtttgcttaggagttaggacttactaattgaatacatgctacattcttgggacgttggtgtttgattattaaattaggaacattattaaataataaccgtgaggttgatgatggttgagattgtaaattgactttttgcttgtcatcattatgaatcaatggccttcagcccttcactactttctattttctttcattgttgttcttttcaatttagttttctattataaatagtgttcgtactatacaaaacccctttatatttttaaatacagaatatagttttctatgtgcagaataaattgaaaataaacaaaatggaaaaagatctgtggtcggagactatggtaggtccttcaaaggacttccctgcgtgtgggaaccaaccaaattaaaaaatcaatcttttcacttttcaacatgtcattatatagctgcattctttttatatgtagcccgatgttttatttcaaactttatatagctgcattttccagattggtcccaacttttcaacaagttactaagaacaccattagtggtagttgtttaggttgattcttaggaaattttagttataaatttaatgtttttaattatatatttgtaatatattaagagagtcacttatataagagacaaaatgagatgttcttaactttcatttcaaaattttcaaatttaattataaaaaatcctaaaaactaaactaagactaacctaagatactatcaataatgatactctgaacacaagttttctttcaaaaactaactttataaagcgttcgagaaattcaaatgtaacgtatgtttcatgaaactgataatgaaaaaaataatcatttgatagttcttcatttcttttttgtatgtgcatgtaaatatttctgaaaacaagtgcttatcgaaatacatatgcataaatatgcattttgattaaatatatagattttattttgtggtatttaggtgagtcgaagatgataatatgtattctatcattaaacattattttaagactgaaaatatagtttgcgctttctaaaaaaaactatatatatatatgtttttctttaaagaaaatatcgacatacatatagatggaaatcgaaatgaaaattgtactgagtaatcttgattgtacatgttaaaattctgttaatttatataaaattcagtcaaaactctaaacctatttgccacttaagttaaaggtaataataatgacaaacgacaaagaaagagtgagtggtagggaggagttagtggttaagttgatggcgatagtgcctttgacttgattctcctccctcacgaacgaactaacttttcttctcactcgttttttgattaatttttgttaaaaatttgcgctttaaacaaattttgaatattatactcttacaagcatggcggcgtggtcggacactttatgagttaaataaagggtttaaaatggacggagcaaatagaggaaaacaagtgtcgaaataaaactttcacatgccgacatttaattacttaactttttactaataaaaacatatacttaagcgaaattttctcatattggttgaataggttaagtgtgatagtctacaaaaaaagaaggttaggtgtgattaacttcgattcaaacagtttacatgttatagtgtcaatatgattactttaaacaaacgatttggtttgatgtaatcaaatgcattcaatcttttgaaaagaaaaaaacgacttacttgttagaagtttgaatttatcgttctttatatacaaaaaaaaatcgtttgaacataaacagtgtacgttttcatcacgttatgcattaccaatagttaatattcatctataatactaaatacagaacataattttgaaacgtcacaaacaccatatgcatacttaatcagtcagatacaagactaatgaaggtagaaaacgtgaaatccttgtatatatcttggagtgctttcttacggtcataaaaatcataaaacggttctagaagccaaattaatataatacaatagtatatataattattaagggagggtgtatacaatgattacaatgtttttcgtacgaagaatactttacttgatggtaaccaaccctttttggttgtggagcagatcttatatttgtgagtggggggtccaacttttataataaactttagaagtcaagaatataatcatataactagggaatctcaggaattgcatttttttgcagtatatagctaacttttttttataacacttattttgaattaattttataatatcatattttttactaaagaaagtttttgataaaaagaaaaaactaaagtctctttgaaaaaaatcatgcacattgcaatagattttggaaagagatataaaattattctaattcccaacaaccatctacatataaatatatactattttcacatactgaaaaaagaagctaaaagttgaaaatgtaaactaaaaacgggattctttcaagatttgtacgattttttaaataaattattttaaaagcttttgtatatgtatattatctatggaaatggccagatgcgagagggtccttctaacatcagtgcctttctgtggttagggaagggcggcttttgtagaacttaattagcctttggaaatttttagtatttcattccaatactaatatataacaattgttgaatcatgatgggacgagagaacacgtttttctgctcatgcttataaacttttttctcctatctcaaattgatagcttctgaaaagtatactatattccggtcatgcttatatataaactaaccatgcttttttttttaatcaccaaccatgttctatcactgggaaattaacacattaaagaaaagtacaatacgagtatgagttggtatattcaacaatggagcactatgggagattcaggacctctgctgaaaatcccacgcttagattttgttgtataaataattctttgatgtgtttaattactattaattataatagttgcccaaaaataaacatatataatttgaaagttgagttatatttatatgatgattgaaaccgacgttttgatattatatatttaccttaaaagataccaataaaccatttgaaacctcccttcttcagcttggatatatgacgtccatatcgattgtctgtttattatagcgaatgtttaatactattacccctccactttttttattcacattatgcatttttatagttatggaaattgatacatgaacggtccaaattaaatcactgtgctcattatattgttccactcacattacacttataaaaacgatctatctctcgaacaaacttaaaaacataagccaaagtcgggtaatctagaccttcctctctcgtatacactagaaactaaccttctcacagatttttatttttaacatgaaactctcagtttatatcattcttagtattctcttcatttcgacggtattttatgaaattcagtttacggaggcgagacagttgcgaaaaaccgacgatcaagatcatgatgatcatcatttcacagtcgggtacactgatgattttgggcctacttctcctggtaacagcccgggcattggtcataagatgaaggagaatgaagaaaatgctggagggtataaagatgacttcgaacctacgacgccaggacatagtcccggcgttggacatgctgtcaagaacaatgagcctaatgcttaattagaaaggtttcatagtttagtacttcttcaatgcttttgctaaattaatatgaaatttaagttattgtccaagtgcagtttttatataatgtgtatgtttagtttatgatatgtcacttgtaagtggatcgattaagcattatttcagatcattaataaaattaaatacgatctgtgttaaagaactttagtttcttgcatgagtttgcatgttataatatatacattgctgatacttcgcagtgagcttcttcttaatacttgccatgtgcaaaaggtagaatatcaaagtacacgaagataggtttcgacgattttttaaactatctaatagaaagaaaaaaaaaaagataatttagtgctacgtacttttgtgtttcttttctaataaaagtttggtgattaatatagtataagaaaataaaggcttaaagatttcaaaattggggagaaggaaaataactttattaagttctattgactcacaattaataagattgagttctcctttccctccatgcggtttgatcaaatggtgcgtgctgtacaatacaaatactgaacgagagtttatgataaaatcattgaattaattttaaataactattcttctttcttgcaattggaatgatgaaaaaagtttcaatagaataatttaagttcatcataattattttgttgaataaaaaactgaaggcaaattatttggttgaaaagtgtgagtgagaaaagggcaacgacaaagctggaagtctaaaagtaggcaaccaaaatcactttttaagtgaataattttttcaccttttaaagcaaattttcaaaagcgaaatatgccccgagccccagaggcgcggagacaaaaaaaaaaaccctgacttttcgtattttcaataattcaaaagagatgcaccagccgggaatcgaacccgggtctgtaccgtggcagggtactattctaccactagaccactggtgcttcttgacaaatcattacatctacgtattattgatttataacactttttaatgaatgaccacattcacctcaactagtatggagtccgaggaatatgctttttattattcgatgaatcatcatatacttaaattcacgtttagaaaaaatgcaatctctttttttttttttgtattattaataaatgcaatctctgatgtgtgtgtgtgtgtgtaattattttggtttgcatatacattcatagacgaaagtgtttattagcaaccaacaccattttcttgttcgatgttttttcgttgtatgtttgcatatgatctccgttcaccaaatcttcccagaagcttggaaattataattaaactcataattatttccatgcgtatataatattagattattttaaccgtaaaatattataaataataattgattggctttgtttcttgttggttcacatgcatggtccagctagtcatttttcttccccataaatagccatctagagttgaagccactgatatacacattcattcttcatatattctctaggttagctacttttattcgtttcgtttaatcttgaacatttaacactctctcataattgctatggctaaatgcactttgactagcttaatactactactaatagtgctggttcttattcaagaatctcacatcgttgaaggtcgacctttgaagtcatcgcgaatctctaatgtctcgaagaaattcgctgcgggcaactcgaatctgtcgagcaagttaacgacagaagatcattctttggatgcatttcggcctaccaaccctgggaacagtccaggaattggtcactagcatgtgtgttgtggtgacaaactaagataagatgcaatggttatgtacttatgttcttagacattttcttatgacaaagtaagatgttgttgtgggtgcgttcgacgtgtattatctagggtttctgtgtttttcgtaattgtttgtaaccaataagtcttgaactttaattgaatgctttgtttctcgtaattgttttttttttttttttttttttcattgtgaacaaaataagcagtagttgtttaattaacaatgattggtcattaagaaaaaataaagtatattaatcttggttttatcaaattcatcacagcgttaatatataatatgcgaaatgctaactcaaccatgatgttttaatcccaaatctttttggaatcgcataaaggttcgaccgataataataagacttgtagttgataaattacgtaagaaacttacacatttcataactgataaaaacttgatcacacactaacatatccatggacacattcagattcatattttaatgttaaacgaagcatttttttggacatgcaacatcagtttcgtttcaccagccgtaaactttattttgaaaaaaaaaaaattgataatcagccatgtatatcatgtggaaagggtaaagcggcagctatatatggatcaattagggtttgtctttaataacataaacagggagttacacccattttctggtacttctatgatttttttgtataatttcatcgttaattcacacaacattgaattctatatttacttcacagtaacttgcatcaccaattacggtatgctttatttgtaattggtgctaacagatcataatatacggacacaagatgaaattagagtatatgaaaatgagagaatgtgggaaatcacctactaattaagcggtagaaaagaatgtagaactttatgcattttttttaatagtgcattttgtagaattttattactttaatgttttgtattcaatgtgtatccagctcaaattaatttaaattagttagaaaatactgtatccacgacgctcaaaactcaaaaaacatttattatatcaaaatatatggagtatatgatttgtattagtatggtaggttgtgtcttttgttcaaaaattattaacaagtgtatattaaaagattgaaaagaaaaaacggcaatattaatttgtctaaatcatggtggtgggtcttgcaaagatcatgctggtctctagatctttaaattgacggttgtagctgatttgaaagctaagagccaactaatctattttccatatttggtttaatccttaattaatgattagtggtcacaagctatgttggccttagggcatatggaatagtggcaaaggacactctgttttttgtgttattaaaatgaaagctttttcttagtactaacagtacaatataattgatactcataaaaggtgcaactcttgaggagtttgaagggcggcttgaaagctcgagtgttaatctaaatattaaacgaatgcaaaagtgatttaatataataagcacccaatggtctcggagtacttaaagcctgctctcgctgtcgaccaatatgtacttaattagcagccttttaacatatgtaggtgtcataggtacggttcattaatatgtcaagtgtgattatattaatatcgtacgattacgatattacttattagttttcttttcctaatcgtaccggtaactaaacctgttaatgtttaaggctttacgtgaacatatcgtatattagagaaattggtcatgtatgtgttttagctatgcctcaatcatggtatctacgacatccatcacggcagcaccacttttcagccatatcaattgaacaattcgcaacatgttgattgcctgaaacagaaggaagccaagccaaactctattctaaatttctaagacaatgattcttccacgagtatcgtaacatttgcacttcttttgctactccaattcttcctcttttttgagtctgaagaaacatctagttacgccaagctataagatggtaaaccggttcttaaaataatcgtatattggtggtatatatatggtaaaactttattttgtgatactcatagtaaatactcttgtacttctctaagggtgcttatatgtatatataataatgggtaactggtaaggaaactaagggaatatagacaactaggcgcaaatgtgaagtggaggctgtgaaccttttagctcatctgagaagctttcccattcacaacaaccatatatcattagaaattaattgctatattagttttcaattggacactatactttagttttaaaaaattctggaaagaggaatataattttaaagatgtgataaacccataagcctaactagggttcccatgtcacttgggtgcctatatatagtcaccctcaaacccaagattccttaaaccttttaagattcaagactcttcacatagcatctgttgactactatttgaagattcttatacaagcttaaagacacttacatttctctatcttaaaccccaagaaaactttaagaaacagagagagacttcttactattatttttgacttgattcttgacatttttgactaacaaaaactcaatcatcatcaatggcaaaagctctgttcttcaatttctgcatatctcttcttattattgccatacttgtgagccatgaaatcataccaacagaggcaagacacttgaggacccatagaaagtcaatcaagaacagtactcttactgtacacgaaggagccggtggcttgagaaccggtggtggctctgtgaagactgacattagcaaagaagaacatggcgttgatgagttccggccaacaactccgggaaacagccccggcattggccattgatccattagaacctaaataattacaatatttacaaacttgtgcatagtgtaccaagcttaatgtgtttgtctttctgatattctcttctcttttcgtttcatttttctttttttttacaattattggttaaagtgtattatatcttgtaaatacaatcaaattattattcgtagcaacctacgttgggaattgatgtttttaattaggtttgctaacataagaagtcatatacggagatggaattacctttaacccaaatgcaagaaaaaaacttgctaaaataactcaagtattacttaagtaaccaatttatagcggtaactcactaatgttaagagattatatatggttcgaatcttcttagtcatggtcgttgttagatctatgtagatataattcaaattcaaggagacaaaataagatgtttacggacaaaaaacattccgtaaatttatttattgttgttgacaatgtaaatatttcattaaaatgaaaagagtttggtgatctctacaaacaatacaaaaaatctgttaggtgagcactttggagttgagtgagtgatgtaaaaagtaaacattggttgatatctgtatatactactactccacacgtgtgactaaagctcggtcgatcttttaaaagtaatttgtaactacaaaatcaaataaaataaaatatcttcggaagttcttattcaaatcttctttattatttgcaaagttgctagcatgcgactgctgtacatatgctttccatgcttgagagtctgaaagacatgctaaccaacacagaactagaaaaaaaaaaaaaaatacctttttctgggccgtattaaaaagtgatggcccgttaattttccatcaatatgagcatctagttaaagcccattagttgtgcacaaaaaaaaagagttaagcccaataaaggtataatcgaaacccatttatacatcctccacttttttggtttttttcctctcttcttttttccttttaacatacatccttcgttaccttcactattcagtgtctgtaaataacatatataatatcatcataacaatattttttcaacttctcttatttataattccatagtttgtttgtttttttttatggtaaaatacaactccctagtttatatatttttttttttcccctttaacttttcattttatcaaaaaatgtttttaaaaagagtagaggactcataaagcttcgtacttgttttatttatataattaataactcgtatcaatgtcaataactatcatccatcccttttttcttcctagttcaaaaaccttttaatattgtttgtataaatatctagttatctactattagaccattaatacaagaaaacaaaacttttaaactgtaaatagtggcttgattttgaatgacgagacttgtatgtatacgagtggggtctagaatattagtcgctgtctagtacatggtttaatggttcggttggtgcaagtaattaattatgagaatctttgcttattttttaaaactaataattccacaagtaaatagtttaatacgtcaattatatatgtctttgtctaatgaaaattttaaaacttccacttaattctcagccgtccgatcatccaagatgtgaccttttcatgggcctagaaccgcgaatcgtagcaatgtgggcaacacgtcgagaggaatctcttagacgaagtaaacgccgttagacttcgagattccccgttattaactccgttagtgaggcaaccgttggcaattgtaccggaccgtaccggtttttgtcgtcgtacgcacacaaaagtccaacacactcgcatagcaacccaaacatgtgtaacgccgattttgcccccaaaagtctcatacggattctcatgccacgttccaaacaaaagtatttggctttttctttacttttcttttttgctattagtatattttgtttttgttatatcattttaattacaccaatttaccacgaatctcgtaataataatagtataatactatacacataatagttaatatctttatcaaatttaataagcttttaaaatatttttgatatataattcattgttctgtttgtaaatgtatttgtagctcactctgctagtaaaattaaattacagctttagccaattgaactacaaagtttaccacttgaaatataaataaacggtaagtatatgtaaaacaaaataaagtagaaatacaatcacaaaaactaaaaatttgtcttaaaatgtcattatgtaaagaccattttaaaacaaaaaaaaaggtaaaaagaagacgactgaataatattacgaaaggacccaagccaaaagattaacagttaggtcataagagaagggtaataaagtaatttaaaggaagagtatgtcatcttgttcctctcctttaattttccagtctattggtcctcagcctcccttctccttcaggtggcgttgctctctcgtccccaagaaaatcgcttcttttatttttttgtttactaaatcttcacataatctttttaaaaaaaaaagtcctaaatttcagatgattcgatgttcttttcagacatggagcgaaaaaccctagcgattacgcctccttccttcttcttccaccttgggtaaatccttcttcttctttcttcctcactttattttatcttttcccgatgatgggttcttcgattttcacgaaagttttaatttttttacatcaagttcgaatcttttgtactactctgcttcttctatcacttacttgttctgggttttagttcgatgttttcatagaacagttttaattcaagtttcgcctttcgctatcaataggaatagttccttcctctttgtcttttttctgtttatagaactatttcttgcttctgatttcttcaaatgacattctctcttttgggtactattcaaattttcattttgttttaaccctttttcatttttgggtgattttttttgtttcctagaatgtttatagctttttaagtagttggtgaatccccaaattaatttcattgtttgttaaacctctcttatgtgtttgtgtttatgtgttaacagaggaggagcatttggttcatcaaaggcgtttcattgtcttctccttctctcatgtctattgctttcatcagtcaatacattgcataacttagctgaatatggttacaacactggttctgctgctatggagtttcagggctttattaatggtgaagattctgggagtgtagcaatccagaaatctgaccagaatgtttgtcctagttcacagctgttttgtttcctttcagctttaggatcagagaatcggtctgatccatttgtgttggcttgtcccaaagaatcacggagtagctctgctctgatcagaaaaaatctatctggtgttgtgtggctatctctgaagcctgtccacatcatagagtttcagccatttactggattctttcacattggagacacttgttacgagcctatgtccaaagagctctatactaagaagaccacaagggagttaagtattacggtttcaggaaaacaatgtggaggaaatggttttatggtgaaccatccatgtgaaggattttcattagaaccaggggattccataaagtttctctttttctaccagagtgaactctcttgggcatctggagttgctgtttttgcagtacctatgaaggcgaccgcacctgttttgatgcttagtctctacaaaaaaccggtcttttgggtgcggacgaagaaattcgcaattgcggttcttattgctgcagctctactcattctgatattttgcttcaatgatcacttcatcgaggagaacaacaagagaaacaatagcaaccacatggagtcgagagaagttgagaaaccatctacgatcacaatatcccctgaaatggattctctgctaagatccataagcaaagaaagcctgcaagtgttcgatgaggttcccaagaacagcagcagcgttaagccagttgcttcttcacacgaagaagaagcatcagaagctgtgaatctcactgtaaagacagcgaaagacaagaagaggcgccgtaacaagaaaaagaagaaaggaggaatcaacggattaacaccagagtgcacagatgtttcaagcagttacagcggaaactcaactcctaggtctccaatatcaccagaaccacctactactcaagccgcaacgaagctagtaaagcctcctactaaaccggtcctatcgcactcagcaacgtttccggtttcaggggttaagtcaatgatcatacaacgaagctcactggctccaaatgtgagagcacctggagcgaaatcaagaaccgaagtgaaagaagagaaagcgaaagagtataggtactatgatatctggggagatcacttgacagggcttaatttgatggataagttaaaggaagtgagagaaggtaaaagctcaggttttgatggagaggagtgtgagagtttctttgttaagggtcctcagaacttgttagcagactctcacaccaggtttgtaagtttctgtaaccaatggggctaacaaagaaataaagaatgaaaaacaaaaatattttatataataatgcaaggcccaatgggctttctgagcagccaccaagccattccattagtgagatataaacacaagcaacgtcaaacctaaataatgaatgtcacgtagacaagtttcgacgtctttataaacttgaagggcttggttaagattccgtcctatggcctctccgctactccctggtccaccggatcagagaagaaatctcgattggtgctggtcgaagcttccttcagatctcatgcaatttgtatttgaccgccttggttttgccgatttccaacgtgcaaaatccgtttgttcatcttggctttcagtttcgagaaattctcagccaaacaatcaaatcccttggatgattcgattccccaaggacaacaatcactgtctcttgttcaatcctgaagaggaagacaagatgtacaaaactccaaatctcggcaacgatttcgcaaagagctcttgtatcgccagttatggaagctggcttttgatgcaacctgaatcagaatacatggaagaagacttagaccatcaatgtaataatctctatattcttgatcttctaacccgcgagagaatcaatctaccgattctccaaccagagtttggactcacatgtccgatattatggaccgatgagaaaagcaaagatcacctagttattggaatggctcatgaagaattagccatttctttcaagaaaggagattcctcgtggaaacaaatcccaaccttgtcaggtatcgaagagtgttttagcatggtttttaaggatcacaaactttactgtctgagcaattataaactcaaggtcttcgatttctctggagatattccggtcaaagttttcaaaactagcgtaagtaagttgttaaataatccactatgtatttccatgagaatgagacttcctggaattccaatgaaggaccagttgaatcacttcaaggatgatatggtagtcactctagccggacatgtcttaattgttaagtgccatcgtccgagtctgtccaagatatggagctttgaaatctacaagatggaagggaacaacaacaagtgggagaaaactgtttctctgggagacgagacaattcttttggatttgggtatcacagtgctcgccaaggacatgcaagggatcaaggccaattccatctacttctccaatcctactccttattttaaagatcaatatgacgaaaacgaaatcttcatattcgacctcgattccaacaccgttgaacaaccgcaccgatctgtttcctcttcctttccccgctctagagcccgatggttcttgccatgtttcaaacgagaatcatacttccttcagtaatttgtcttttttttaatgtatctacgtattcttcatatcaagtattgcaacatttagtaataaagaataaagccaacaaacgatacttgccatatagagtaataattaagccaagaacaccatccttgattacaaggtaataacttttgaggacggtctcggaccctcaagatgagagtgaaggcaaaaaatcacacccgtaaaaaaaaaaaaaaaaaaaaaaaaaaaaaaaaaaagagaaacggatgatcaagagaatcatgagcctagaaaactttcttacgaatcacagacaagggttgagaaccgatgatcaggacgctttcctatggccttagaacctggaaattgtgttgaagtaagtttacttgcaaaagagacaagtaccaagtttgtatgatgatgaaagatattactcacgaggtacggtgtgttatcgataatttggtctgtgattgtctccttctcttctgttgtttaccatgtacaagtcccttgccccatggttgtagctactattgaagttggaatggtaggtctgatggttcatgtatggcccttgagtgacctcactctgcctgtatgtgtctccttctcttctgtggcttatcatcatatgcgagaagtgttccaagtccctcactcccaggttgtagccactgttcgagctgacatgggggttctggtatggtctcctctgatgagtaaccggcacagtgtgtgtattgacatgtgggttgaatgatgcttgtccctgcggagcattagaggcagttcttctgatgtagaaagctggtggtggtctttggtttgtttggttttgctgtgttggataagtataggaggcaggtggtggtctttggtttgtttggttttgttgtgttgaataagtataggaggcaggtggtggtcgttggtttgtttggttttgttgttctgaataagtataggaatgataaggaggaatatttggacgaggaagatgtgaattgataggagcgtacgaacgaggagcatgtggtcgaggagcatatgtaggaggtgcatgtgaacgaggagcatgtggtcgagaagtgtagaaattagcgggattcatatctgtcaactgtgttggatgattcttatggccctgtgaaggattttggtttggaaaagcaacaagtgaatgattagcgggagtgttttgtctaagcctctgggttagattctcatctttctcgttttttcttgtctttacttgacaaggcttcttcacatgaccaggcttttgaagtcttccatctggtaacagaaacagaaagatcactaaaagaaacctctcatatatatataaacacacctctataacaaagaaaactaaatcatctctcaccttttagtacatagcctgacttaattttcctttctctcataacctttcttgctgcggcaccacggttatgcttttcgttaagaactttgactctgtcttcttcatttggccatcgctggaataagaaatggagcaaccaactgataagcatatgcaaaccggcaagactcatgactgaatatgaaaaaatagaaaagaaaacccacctgcctcaaggtcattaacctataaagatttcgtcctttgactagtaatggatacaaaggtggcaatttctgtgtcccctcacaccagagcacttcaatctatgataaagacacaaaccagatagttagaagttagaagaaaccaggcaacaagatcagagaatataaagatgatcaacaaacattagaggtgagacttacagtgaacgtgtgttgttgtttagcagtaccatagctttctttaacaacctggccagcgacagttcttctccccataatatttccactctttttcatcttttcatacctattcaaccccaagatcattgatttagggaaacacaaaaaaaaaaaaaaaagtgataggagaagtaaaaagcatgagtttattatagagaagttattacttgtggtgaaccttctgtgtaaacaaaacaatgtctcctttgcagacatcacctgcaccaatttataagactatcaaactctgccaaacaaaacttagcatatcaaaaacttttagtaatattacctttacaattgatagcaaaggatgattttggatacactgcttctccagttccatctttaatcctgtaaagaagattaaaaagtatactttgaattcccaatcataagaagacacagagagatctatatacaggaaagccagaagtcaataatacctccaatgctcaagaattctgtcaatgcaaactggtttggtgccagataatcttagaccatgctttctcagatatgctttgcactctttcacatttacagatttcaaatcgcttccggctacatacaataaagcgagtgttcaaaatctcacaagtattcatgagagtcaatcaaaggttttaagaaagaggggatgacaaaacctgtgaggaggcgagtgactttgtcatcttcatcaccatcatcgttatcgccttttactccgatctcgtcagcttcaacatctgactctgtagcatcatcatcgtcgtggctccaatcgctatcatcctcactgattcaaataaaaactcaaaattgatgaaataaccccaaaaaaaaaagattgagagatgatattataagcaatggaaccgaccttgaattcgtatcttcgtcttcttcctcttccgtttcgtcatagttattctcatcaccgaaaacatcttcttcctcctcttccgagctacagagatcaatgattaccttctccgccgccgacattagagatctgttcagaggaatcaccacaaatacaattcaaaagaaatatcaaacggctctctgatttattttcccttttttgaatccgaatttgatagtgggtagccttataggttggatattttacacgattcactttctagttttaagtatttacaatatataaccagtttttgaattcaccaatcacaaatttttatttatttaatctatatttcttgagtttaataatttaatttataaatgtcagtttaaatccagcgggagctttccatattaactacatcataatcaaagattcgagagaaaaaaagtgaaacttttaatcagagattaattttgttttaaatggatctaaatctaaaagtggatacagacccgaaaccaaaggtacacaagacgtcgttaaaataatttatacacaactctctcaagcaaaaaaaaaaaaaaaagaggaagaaagaaaaaagcttcttctatcgattcaacattgaattataattttacagacacaatattcttcatctaccacccacaggattttcatttcatcccaatcgtattcccccacgcgaccccaaactctaaatacgtacattgacatacacttacgtgtacaagaatacgtatagaagtagcttctattggttaacctctcgagctgcaaatcaaaggtgatctgaagtgacgcccgttcttctcctgtcactgctgctgggcttaggtcgttgggaaggacacgggcttgggatagcctccagagtggaacgaggagacagacggttcacggttcctgttagatcgggagaccggtactgttgttgctgctgctgttgcccactttcactggagaaaaagaagtacgtgtgaagaagctgtagaaagccaagcacacacaaacaaacaacagagaggcaaaaacaagaacacaggtttcacaaacatgtttcaggttcaaaaaacaaaactttatgccaatgtaactgtgatgaatgattgattacctctctgaggatgtcatgtttctagctcgcgggacctggtctagtttgaaatttggcttctcccttctactgcttggttcctgtcaatttgcaggggggggatattttgttatttatgacatagggcggtccatgagagagattcacgcttgtattgaggttttgcttaccgttatgttcatcccattaaataattgagagacatcactgttgcttggtgaggttggttgcaaagagttctttaggaaccggtgttctagcaacatagatgcggttggtcgctcagctgggtttctctggaagcataatctcaggaagtctttaccctcaggtgacattgattcaggtatcggtgggctatctctcatgaccttgaacatagctgcagcctatgataaggcaaagttgatacaaagaactttttagatatcagaagaaacaaaaaactctctttagtagaaggcatatgtgtatgcttaccccttcaaactcactccaaggaggcttcccagtgaacatctcaatgattgtacatcctaaactccatatatcaacagcaaaagccagatctgggttgctatctttttgcatcacagcttgcatgagctgtgtgagtaaacgtatatattagtatatatatatatatatagggtttatagagtctagtttatttcaaagatcatagaacaatgaccacctctggtgccatccagtacgggcttccctttaacgagagatcagctctttgtccagtaagctgaagaatataaatagcaactttattattataaaacggaaactaaacaaagagcatgatattcacattcgactcatcacttaaaagacaataagcagcaataatactagacaggatatagaactcacgtgtttagccatgccgaaatcagcaagcttgacaaccccagaagcatcaacaaggagattagcacctttgatatccctgataacaaaaatagggaaaccaatatgcttaggttcaacactagaacaatattcaccaagattgattacagtaatattgtgactttacctatgtacagtctttttattgtgcaaataagccagcccagacaaaatgtgacgagtaaaattgcgaacaacagattctgtcatggtgccgcaatgatcacggatatatttgtttattgaacccgggtgaacatattccaggtatataaagaaacgatcttctacctgtacatgcacaatcagagaattgctcaatgaattttcagccacactgccttgggtaggtagattatatatatgtaaacagaggatatataaacagattgattactcactgtctcgctaccaaaatactgcacaatgtttggatgttgaaggttacttagaagtttgatctcctgaaataaataaatagaaagctataagatatataacaaacgaacaaccaaacacagccgtgactgagagcactgggagaattgtctctcctggaggttacctgctctaattgctttatacactctgcggatttggggtcatcaggaaatagctcaacttctttcatcgcacacaatgctccagtttcgctgcaaatgaaaaacaactcaggattgcactaaaaaagaagaagcatattggcactcaaaaactgtaggaaagatcataccatagagagaaaagactacctgttgcttgcaacgtaaacacttccaaaagtaccacgacctattagcttccctttcttccactgggaattcattgggaatgaatccagtttgagaggagcctgcggggacggaacagaagcagctgatgaagaggaacaagtagctccaggagggagaggcaaaggatgaacattgcagcaatcacgtcgcccattcgtaacatcagtagacaacctcggatgcaaaggtgaggaaacactatctcgcggtggagctgagctatcaaccgaatgcaacggtgaagatggtctgctaggttgtgggcttctgatctgtttccgtggactccgaggttgtggactatggatgggagaattatcggtactaaaggcagtaatatcataaaatgcaggaggaggaagaccagaggtatcaagtggcatatctggagcagaccaagcttgattgcttttaggaggcaaataaaaaaaaggcaaatcgtggccagtactcttcctttgtggactaggcacaggactcatgtatggactcgttggtgcactcatggttggaatattcacccaataaccatttctgtttctcggactaaaatcttgatatgacgaattctccgtagctttcctcgagtcacgggcaaagccgccattgacgctgattaacacataaacaaacacatttgaattgagattataaaaaaatctccaaaccctaattgatataacgaaattgaaatatacctggtgagaggaggaccagaagaggtgcgatcagaaataagtctctcgggatctcgatctctgtcatccaatcctctagcgtttgcggcatttcgaatcccggcgacctccggtaaggggagaggtaagggtaagggaacggcagaaggagagcgaggaacggcggtgaaagcgctgggagagcgagttaaaccggaatcgaaggtggaggaagaggtagaagcacgacgttctcccaacaaaacatcgtcatccgtcaagtgacgaagcttccgctgacgggtgagcctgccacggttaaaacgaaacaagcggcgatgaaaccgatcccgatcctgattacgatctggatccggagattcagagtaagaagccacgggttttagagaagaagatggagaagaagaaggagacgagaacgagatttgcggaagccaacgcatagcgagagaatcatggtatgctcatcaggtagaagatgtgaacatgaatcctttattatttctctcttacggaattagaatcgagcagaagaagaagaagaaagacggagatggaggcgatgacgatgaggatccatggaagaacccaacggatttaacagaaataacaaaaacaaaaccagaaaaaaaaaagtataacgaggagaagaacgaataaatgattattttacttttttattattaggaccaaatatgttctttttattttgggaaatttatcttttagaggcggtttacgggtttagttcgagttttcgtgacacggtttgcaacggctttttctggtctttttcattttcgccactgtaaaagtatatatatttgaaaattcatttttagaatatttgaccatatttgacttagtaatttgtaaatctgaacttaaattcgtatattaattttaaaaagttaatttagaagtttatttgaattaaactattttgtgagtggtatatatcatatatgaacactaaaataaatgtggtaatttctaatttattattttatgtagaatatattttactacaaacgttattcacttttcttagtttttgtctctacattaattttttctattcattttcaaagttcatcttttgtcatgaacctactccatcatccacattattatagcattagattgtttcttcatttacataaaagcatcacacacacacacacaaagtctgcaaaagttttaccacaaaaatatactactaaaagtctatgatgtgaaaggaaatataaagaaaaagatgcgagaaaatgtcaatttgcaagcgtaaagccgactccaatgtaaaaccgtactgtacggatctcgaggcattgactaaaatttaaacgtggtttaggtccaagttaaccttagtcattagttaagttaagccactttttcgtcaacaagctttttatttatttcactttatagtatagtatttctgatatattcactctacttttacgttttctattctgatccggtggtaatacgcaagccgcaggatgcttccgttcaaagatcttttccaatttttgatctagagttcaatgacaaaccacaataaatgcaacagaattacaaaaaattaaatacttgacggaaagaaaaattctaaataagtaaaagtcccgtatagatcagtcaaagctagaaaaagcagctggaatattcatttcttcctgaaacggagatctatccgaatataataaattcgtatgtaaaatgttttttggatataaccgtgaatttgaaaaatgagaccatatgaattcgatttcacatgctgtatgtaaaaacaatcatacgaatgaaacggatctaaatgaaaattcggtcttgaatttttaacgaagactgttatttactaagaatttcccaccaaaaaaaataataacagaaaaaaaatgaaccagaaaaaggagaaaaaaagaaagaaatggaaatttcgagttcaagcgagggaagattccgaaggtcaactacatttttggcaagattccacaaaacgtcaacggtcaaaataaaccaaataatacgtggcaaatttatctggtcacaacaaacgacacgtgtcattcttagtcccagactcccagttaccactgttctggaccaagtcgtcccagttaccactgttctggaccaagtcgtcccagttaccactgttatggaccaagtcgttggctcttattgtagtcttaagtacgacccattcaaatacgagatgatttttactcactagtattatcaggctatcagctagtccaaacccatttaattggatattagtgaagtaacaacatacttaacgatgcaaaaaaaattgatctgggtcgttcaaaaacccaaaggcaagtagagggtttaagtgttcttccacttgaaaggtttatacaaaaagggttattctaaaaatctgcttctttcctctgagaattctacaaatgatcatttttgtatggaacagaaacttcagagagacattacattactcttttcaaagacttattttatgcttgaacagcttctggttctttcaccgggcttgtggcgacaatcttacacacgggcatggtttcattcttgctcagtagcttcaatgatggatgaaatacaacgtcttgcaataacactttgtcttcaatgtccagattgctcacatctacttcgattttagatggaatgtgctcagctggccctagtagtttcagagtgcttcggattgtccgcaggtttccccctgctcacagtaacagagacgatcagatttaaactaggaacattcatgaaactagtctatgttacccaatgaggaaaaaggtgaaaattttgctctacaccgatgagaaaaaacacaaacacatcaaatatctggtttcttagttccttttaccattggaatgcaaactttactatcagatacaagtgatagatttctctttacaaagcttagctcgatcaaaataatggctggatagcagtaaaacagaagcacatgagcactagccatgcaaaaacaaagacaaaaccgatctgcgaagttctcatcagtatcaaggccaatacacagaatactactcctatcagttctacatgatttctcagtaagcataacctgtgaaactagctgcaaaaaaggcaagtgatgcgaacaaaagaagaaacagttacctttctggagaccaggacaatgatccaaccctttgaaaacaacaggaacatcaaccttcaacttctccccatcatcagcccatacgaatactaaattaagtatctttccagtttcttcgtctctatgaacctaacagaaacaccaaaccattctaatcccatcaccaaattcactcacaacatctgcattttactaaattcattatacgatcgcgattgaaatcgaaatgagtggaagctaacaataccttgaggggaagtactcgacccgattcaacaagcgtcgacgaaccctgaccagctcggatctgaagctggaaagtggtagaacagaagaatgggagaccaacagagtcaataatagacttgatctgcttcttatccgccgtcaatagctgcttcctcgacacgcctcgcttcgaagcatcagtatctagaagcgattgcgggaaaacgacggcgggaatacgaccaatcgtccgatcccgagccgatactcctcgacccgtagcttcacgtggaatcgcctggatcgtctgatactgatgaatacatcgaatcgatcgaccgaatgaagaagccggaagatcagccacctccgccgtcacggatctcaggcctcgccaccatttcgccatctcagtgtggtttagagttcgatgtgacgttagggtttgtttccttcaaaactcaggcgttggagggtttaagctctgtgggctttctatggactatatacattgggcttttattggcccatagtgttattttatcattgtttcggccttttttctttttttttttttttgggttagaatgtaaaaagacaagagatcgtttttgatttatcttaatcgaaatttgcttgttatccagttatatatataactacacaataatatgtcgattaatatgatcacgaataatttggtcgtgcattttgtctttttcgtaataacaacattctttcattgtcttagttatgatttttccaaaaccgtatcagtatgcagttgctcacacgctaagcttatatatacgtccataggccaaagatgcaaatgtccatatactccatataccttctctgattatttaattttgacttattttcttaccaaccaatattactttatttttatatgtttcttttcgtgacttcaaccctctctagtctattattctcgttttgctcatgataattgtgtttcatacccttttttatatatataacatttctatggttgcaaggtaaaattgatgttttgttgacaatagctagctatatatgttatgcttatttcatatgattatattgtatccaccgtctaatctattcacacttcagattagttgtttttgtaagactgtaactagagtctagaggggaggagacaatcagaatattacaataagactcacaaaaaacaataatatcatgcaaataagagacggtccattgcacgtgacaatgtctatcatagcaaataacaaagtcaacatgctgacaataatatataacaaacccaacgaattttctaacttttaacctttcaaatatatatttgttttagaatgagacgaacgaatagtgttttaccttatatctcaattccttcttcaaattagatatcaaccacaacaagtctcacgccacaagaaagaataacgaaaaaacaaaaaaaaacaaatattcatatttacaggataactactcataaacaaaaatatacgtctttagaacagaaaattagtcgagaagcatatctatagtacgttttaaaacaactgtaaaaaaaatggaacagtaaatttaaaataaaaatagaaatagttgtgctatttaatttcttatttagttggctaagaacatgttcaacaaacatgtatatataaccaaattattcgttaatttatataattttatattgcatcattaaatttatataattcttattgtttataaaatctttatttattcatagagcgatgatatgatgtattcatttatcttctttttgtctcttcttaaaattgttcctacttttaaacttccgtcttattcgattggccatggatgacgtcatccaattggttctctattttcgtcgttctactctcaatagtttattacagcaatgccatcggatttgcacgaatgaaacaagtttgtatgtaaagtatatagtcttcagaggtccacgtcttaaagatcggatctcaactcgtagatttttttttgttttcttttcaaatgttttctagttattgttagttttctatagtaagattgttttttgcagtgaaggtttcccaaaactggtttgtgaaatattatcaaaagaactaattaaaatgtataatgcgtacgagaaaaaaaggaaagtataatgcgtacgagtacgtatgaaaagtgccattgtataccaacttttaacgccaatccctttttccttgtacatatttttcgtatgcaacttttctacgtttctacgttaattttttgcctaggtttcataaaactcaacgatacaaatgggagaaaagtgaaaaccaatactctattatttttctatatgggtatttgtgcacccttgaaacttttggttttttaatgattttctgacctaagcgttatcaaactaaactatatacactatgacttttgtattcttatttcctcatcatttttagttaaagtgtataaatatattctgtaaatctgatataagaaatactagtcgattgttttttgttaaaaacattaatagtcgaagttttaaaagtatccaaatctaatttttgaaaaagaatcttgatcgttttcatggaaagattattgtgaaaattatatgtttgtttgcaagttaaaaatgcctacgcgtgaacgtgtccttatcatataagcaaccaatgaattgagctcattgatacaaggtttgatattattcgttttattcactaacataaagtttgaaattgaaatcctaactaaaatatatggattatcgaattttgtggatcaacaaatttaagaatttgaatcatccgctttaatcatatacgttgcatatggatacatatgttaagggcatctaaatccttccattttgttttgaatcttgtaaaattttaataaatgaattgatgagaccagacgaaaatttggaactccatagtttggttctggcgcacgtgcggcaactcatagtgggctttgtctgtaactacgataatacccctactaatggccaaaaatttgatataaatttactactttatttatatcaacaatgaatgcttagcttacatttatttaacgaagttttttctaagaaaacttgactgaattactgcaattaattataagtttcgcaatatagatttaacaaaaaaaatacgtactgtatttgtatcagtgatgaaaacacaaccatgtgcaacattagacttgtgttgaacataacgaagcactttaattccatctccagtgggcatgtgaccttaatcatcttactcgaaagtacgtactgtatttgtgaataacataaaactttatactactattacttaagtcaaatacaaatctaagttttgattcaataattggacgttggactgaattgtcacaaagatttttgctgactaaaaacaaaaaaattggtgtattcgtggggctgactttttcaagtaacagtgtaacgatttcgtatcaatttatttttagagtgaaaatgacttatctcgagacgaagacagcagttagagaggctaattaagtcaaatttaaaaatgaaaataatttcagggataaatctgtcattacatgtacggttgcttaaaacttaaaacccaaattaataattatgagatccaacggcggcaaatcaccctctcttgtaatctcgacggctatggtttgtagcgtattcactaatataaaagatcgtctccgtcattagaaaagccttcctttttttttcccattttcttcttcttgatgatcttttattgattctctcttcgttttaaaaaaatcttcagccttagggcagaataaatcggagatcagatccaataatcgggtttttctgggttttctcagaaaccctagacccgatagtaacttcctactcactcaacctatctctctattgatcatggaatcaaacgatgaagagagtgagacacgaagctagcaacaaaaatatcataaagagggttttggaaaggagaaagattcgtttttaattgaggtaagtttgatttttccttttcttgatcgatgatttgatttagttaaaaagtttgattgatattgatagattttactttgatcgtttatgataatttttagtatcttgttttaatttctggaatctgttgatcttcttcttcttataccttgccttgtaaacagatctgaaaacttctattggctatcttgatcttggtttataatcagaaaattgatttctttttccttctatttcactattctattacttgtacggaaattttcgttgcacgaatcacgataacatttatttacaatctcttcaacttcatagggtctctcatctaatgacttacacgaagcttcctcgatgcatttattttcacgatccctatttcattattttcaagaaaatttattaaaagagactgaatctttttatttctttataatcttttcaggctctcaagtctgaaaagagacaaaaaaaatggcgtcttcaagctctccttgcgcagcttgtaaattcttgagaagaaaatgcacacaagaatgtgtattcgctccatatttcccaccagaccaacctcaaaaattcgcattcgttcacaaagtctttggagcaagtaacgtcgctaagcttctcaacgagcttgcctctaaccaaagagaagacgcagtgaactctcttttctacgaagctgaagctaggttacgtgatccggtttacggttgcgtcggtttaatctcaatccttcaacatcgtcttaaacaagttaaccacgatcttgaaaacgctaagaaagagctcgctacgtacgttggtcctcaagctatgctcccaattcttcaaccgcatttcatgtctctaccacctcaaccgcaacgaccgtcttcttcttcagcgtctgtgttgactcagcatcatcataacttgttgccgatgatggctattccaacaggacaactgtaccatcaacaacaacaacagatctttgaggctcagcagttagcagcggttgcgagagagcaacagaatgagatgtttagagcttatggaggaggaggaggaagtagtagtccacaccatcaaaaccaagctcaagctgagattttgaggtttaataatggttttgactctgtaccggccggttcagttacggttactgggtttaatcagttaagttctggtggtacagcggtaaccggaatgtctcttggaggtaactttgttgatagtccttcgacgaataataattaccatacggatcagcaattacaccatcatcatcaaccgcaacaacatcatgaggctcaactattcataccttcacaatcttctcagccgctaccgctccaaacgcaggagacgcaaacgcagacgcagccgaattcggagagcgaggagggtagaaggaatgtcattggttaatctcgctaattgaggaataataaaaaagagggatactaaaaacaaagatacggcctttgaccttctcgcttgctcgataaactctcaaaacaatccctaaggtacgtggcaaaaaactcgattttaagtttcaaccggataaataattagggtttcgatatttgtttcatatagttttttcttttcattttctctgcattttgaatgttctttatttatggtatagtacagttacagtggtacagaggaggttttgctctttatatataacatttaatgaaaaagccttgtcatttcttcaataactctcctgctcttatagccatagcccatatttttaaactacttcctttttgttggattctctgaacaataatgcattaactaacctagttattattaataatttagggtttaaaagaaaataaatcgtggtgggtcacatcacttcaccaattcttgatatggtaattatttgatatatgttggctttgttctacctactagagatgaaaaagagaatttgtgtgtatcagagtctaagatttgcttacacctttctgtctggaaatcttttaagtgttgtcccagaagatgcactttatacttgcatgtattatcaatttagcatcaatcgcatcgatcaagttctttatattaataatattgtttcttaagtctctcttttggttttacttatatttcctcgacttttcttgcagttggaaactctgactttgctcaaggcattatggacgcaatcgagtttttctttcttcctgattttgtcggacgtccaacagcgaaaagacactcaccacgtaaaagtcaaacgactaacaaagaagtcagcttatttggttgattttgagtcctgcagacagttttggtataaagtataaaccaaaggcctcgtatcaatttgaacaaaagatctccactccatcccgaaacaaatactaccttgcttttttttttctttgtaccctattaatatttttttgacatttcttttggttcaagtaaaaaaaaggagaaattagtgtttttggttgcaaatctatttgtaaattagatgtcaagagaagtgttacttgccctagtggtttatcacatatccgacgtcaaccggaaatattaaattaaaaagtatgaataatctatctttgtatatccgcatttacatttttttttgtttctggaaaagtatcgatcctgttatatatacctaaagtttaaaatgcgaaataagaaacaaaaagagtttagtttatgaaaacattatcataatgataccaaaaaggctaaggaaaaacaaattacaaaaaggctacatcattttttaaaagagagtgtgtgcttcacatataaacaaggaaacgcatataataatcatcaagtagctagatgaagctaaagaagtagttaagtgtgaatgcttggcaattaagattgtgttggttcatttattaacaatctttgaccactcactaatttatttttggctctctcttctatatcatcaccgttttatctttataaaccatccctcaagactctcccaatattacatgatgtgtttaatcctcacgaattcgcatgaatcaaaaccggctgaaaaacagatgtaacatttaagttaacatactcacaccaatctaaattattagactttcattcactttaacacatttgtccataccatgatgatcataacaatcagtagctaaatcaatgtgagtgtggcttagatatttgatctgaatgattcatgagaaacatggatacttaatgttcatgtgcatgtgcatataatagtatattaatctcaccagtaggatgcttagtatagcaataaagagaaggtggtgaaattgatgagcatcggccattaaattaagcactgacccattaattgcgcacttacccataaacaccattcactccttttcattaacttaagagtaaaattatacatacacctcgctatctctaacactagtcacactagtgtaccttcctcggtactcttatcaatgtctcgtgtcgcaataaatccatataaagatttctaactaggtcaatccaacatccaatttaatacaacagtccttagtagattctaatttaagtgtgtctctatatatatatggaccgacaaaatcaatgacctaagatttgactatatatttcatgcaaatatgataaaatgctattcatccaattaatcatcaatattgtaattgggctggccttttgcttatatctttaggcattttctttaacaaaattagagccaggcccatcaattaaattgaaaaatgcttagaagttgtcacgtcactgtccatgtcatccatggtgggattgggctggcctaaaggacttttctatgtaaaaattagaggcaggcccatcaactaaattaaaaaatgcttagaagttgccacgtcagtgtcaatgtcatcagtgtctatttctaacgccgtcaagtaacggaataacgcaaccgaatattctttcatcacatggccgcttctgcagcacgtgactttcaagcttctgttttccttatgaactaagtttttctgtttcctccaaactattttttttaattagaatatcttgttatttataacgaatatatcttcttcttttacttatttttaacacaaatatttatttgtttgatacgaattctcaaaatgagaaaaacgaagaaaaatagaaaaaaatcgaaacggataaatacagagaatttagagaaaaaaggtttgtattttaggagacaaggacgagtgaagtcgtgctttttctttttttatttcatgttaattttaatatttttgggttatagtttcttaggaagcaacatcaatcatcaaaacgcggcggctcttgtcgtatcaaagcaactgaacgttgtcgttttgggacaatccttatctcttggggcaaccaattattgccttttttcttcctctctttccttattcgttctcttcttgaagatatttttccatttattttctcgaatcttcttcttcttcctagattccagcgacttaacaacaacaacaacaacatattctctgctgggtattagattcgaatttctctttttgtgatcagaaatggatcgagctccggtgaccacaggaccgttggatatgccgattatgcacgacagtgatcgatatgacttcgttaaggatattggttctggtaatttcggtgttgctcgtcttatgagagataaactcactaaagagcttgttgctgtcaagtacatcgagagaggagacaaggtttcatttttaaaaatctcatctttttctatttttggaagttgatgatatttatttagtccagtgatcgttcatttttagtgtttggtttagctttcactttccagatttattggtttcgtacttaaagttagcgtttttagattttgatgattatgcttttgagtgcttttaatgtgattttaaagatgtgagcttcctaacacttgaatgatgattttaatttgtgatttatgtgaaattttggatattgaaatgatttttttagttggttttgagtgttctgcttttgtagattaggacagttgtgaatgacttgtaactatgggagttgcagattgatgaaaatgttcaaagggagatcattaaccacaggtcactaaggcatcctaatattgtcagatttaaagaggtaaaatttatacacttttcttcagtacttgtctttttggaatttgttaagccagtgactcttttaaactctgtttcttgtacttgaggataggtcattttgacgccgactcatctggctatcataatggaatatgcttctggcggtgaactttacgagcggatttgcaatgcaggacggtttagtgaagatgaggtttgtatttggttctcttatcgggtttacaggtctccggtttccttatggtttgatctcttcttgtaaacaggctcggttcttctttcagcagcttctatctggagtcagttattgtcattcgatggtatgtagagaatctgtttcatggagcctatggactggttgtattcttgtttttttctaacttgttgttaatactctactttttttcatgtgctgtgaagcaaatttgccatcgtgacctgaagctagagaatacattgttggatggaagtcctgctcctcgattaaaaatttgtgattttggatattcaaaggtatcacaaatgattttgttcttttggtatcagaaactatacacttgtggttcctccattgtcatgttcaaatgtgtttttaaagtgtttgcttatgcatttctttttgacagtcttctgttcttcattcacaaccaaagtcaactgttggtactcctgcatacatcgctccagaggtactgcttcgtcaggaatatgatggcaaggtaaaggcttttagagaattcctctgtaatctctgtatttctaaggatgaatagccaatcattgagtgttacggttaccagattgcagatgtatggtcatgtggtgtgaccttatacgtcatgttggttggagcgtatccgttcgaagatccagaagagccaagagactatcggaaaacaatacaggtaaccgcttaaaacgttgttccttttgttcatctcttgatgttcctcttattctcttaatgattctgaaacacagagaatccttagcgttaaatactcaatccctgatgacatacggatatcacctgaatgctgtcatcttatttcaagaatcttcgtggctgatcccgctaccgtaagtcattccctttcctcatctctaatctttaaaccatcggcgagatgactgatgtttgatgttgtttgttacagagaataagcataccagagatcaaaacccatagttggttcttgaagaatctccctgctgatctaatgaacgagagcaacacaggaagccagttccaggagcctgaacaaccaatgcaaagccttgacacaatcatgcaaatcatctctgaagccacaattcccgctgttcgaaaccgttgcctagacgatttcatgactgacaatcttgatcttgacgatgacatggatgactttgactctgaatctgaaatcgacattgacagtagcggagagatagtttacgctctctaataaaaagccttttttaacaaccaaaacacttctctatctgttctaagaccagtagtgttctgatcctctggtttcaaattctaccaatttttgtattgtctctgtttgtttcttgttttcttcatgcacacatatatcatatatgtaatgtaaaatatcatctgtgtatattatatatatattccaatgtcacacaaaagcaaattaacagttaaaacagttgaagcaagttgaggttatgttctgttttttcctctgtgatcgtcagattcttcatttctggtttcaatattttccacaagaacgcagtatcttcgtcgcatttcacttccagattctctagattcttcacagaatccggtaactcgcatcgataacaatctttcatcgaaatcttctcaagcttcttgagctttccaatttctagaggcaggtttttcagttggaagccaccagaaacatcaagaaaccgcaaattgtcgagtctgtcaatcgtttcaggtagctctaagagactagcacaagaactcagtctcagcgtttcaaggtcccttaagtcacctatagcttctatgactctgcaaagcttgttacaatttgtgacactaagcttcttcaatgaaacaacttgagagatccaatatggtaattcatcaagattgtagcaatagtcaatctcgatttcctgtagactttgtaaagtttcagaaacatcttctaattcgttgagagcatcaacaacgtgacaaaaccataaggacaacttctcaagactcttgagaccaagtttgggaatgtcaagcaaactgattgaaactttctcgaatctgatccgtttcaggtttggtaacgagctgagacaagacaagttagtcaactttgcaggctcaagaccgtgatttatgataatcacaaccttcaattccttcatagtagcaatgaagtttggtaatgcatagtttgatgaagagatattaagaactaaagcttcaacatttggacaatccatttcaaaccaacttgatgcaaatgaatcatctgtaaacaaaaaagaagaagatcaatcatatgaagtaaatatgattaaagggtgtatgaaacagagcaaagaaataattatattaccagtagagatagaaaagagagatgcattaataacaataggttgttttggatttaaacaccagtttgggaatttgttatcttgtatctccaagtttaatcttttcctttcgaaaatcgaagacgactcttttaggcattgatttatagcaaattctctaaggacgttgtcttgtttaaccaataactcattgtagaaaccatcttcatactcatttctcctatattaaagcaaataaataaaggaaagttgggaaaaatatggtgaaaccgttttctataggctttagggttaagaattggtagatgaatggaaagtaacatacccaataggaagaagtttaaggagattgcgagaggcaagatcttggaggttattcataccctctttaccgtatgatgcagaccataagtcaattatagtggaagctattatcctttggtcttcaagaaatgaggccatgtccaagaaacactctcgaagattgtggggcaaggcatcaaagctttgaatcgaattcgaattcataatggttcctatgaagggagaggagaattatgaattaagatgaaaaccaagcaatttgagagaaattttaatctattgaccgactctttctttgattataaaaaacgtgactcttcataaaagccattagatcaaatttataacggaaaagtcacgcggtactttgaagtttcaaacaaaccattgtttgaatcccagaacagaagtttagctagcaaaggaaaaaggagacttgacttcacattttaggattttcaaagaatttaccaacattatatttttaacattaagaatgttgaatattacatttatagtttgtcaaaaatgttggtgaataactctgttcaaatctattcaagttagataaggatcaaggatttagtagtactcttaaatggttttaaaagattgacctacacaaaattctttggcatgacattttctctgtacttggactcagtagccattataatgtatataacaacgaaaataatgaataacaaacattacaagatccacagaagctactacgataacgttctttcacttaaaacatttgaagcaagttcaggttatgctctatttcctcctcctgaactctcaaatttctcatttttggcttcagcctttcccacaacaatccagtttcttcatcgcatttgacctccagattctctagattcgtcactgactccggcaactcgcatcccgaacactttctcatcgagatctttttcagattctgcagtttgccaatctcttgaggcaactttctcaatcctaagcaatgagaaatatccagaaaccgcaagttgctgagtccctcagtcgcttcaggcagctcagagagattcatagaagaacacagcctcaacacttctagtctactcaagttgcctatagcttctggaagttgagagagcttgttacagtttgtgatgctaagtgtcttcaatgaaacaatttcagagatccaatacggtaactcatcaagatcatagcagtagtctatgtcaatctcttgtaatttcgatagagcattagagacaactatatcttctgtgtcgtagaaaacctcaccgaaactacacatgaccaaagacagcttcttaagactgctgagttgcagttggggaatgtctagcaaagtgattgaaactttttccaatctaatccgtttcaggtttggtaatgagctgagacacgagaaattactcaatcttgctggataaaaaccgtgatttgtgattgtcagaaccttcagcttcttcattccagagatgaagcttggcaatgcatagtctgatgaagagagatttagaactaaagcctcaacattggggcaatccatttccaaccatttcgatgagaacaaatcatctgtaagaaaaagagagaccaatcatagttatagagaagtcatatttctagaaacagcagagatttgtataatcattaagtttaattttcagaaaaagaagaccccaaagaattacccgtagagatagacaataaagaggcattaatagtattcaaacaccagtctggaaatgtattctctagtatctccagatttagtctttttctttctaagttttccttaaattcgctttgacagatagccaactccctaaggatatcatgttgagtcactaagaagtcattgtagaaaccgtcttcgtgctcatttgtgctgataaagaaataaataagttccactaatggtagatggcaagaaggtgcaaagatatagatttgaaacataaataacatacccgagaggaacaagtttaagtagattctgggaggcaaggtcttcaaggtacatatacaagatactactacctttaccgtataattccacccacatatcaattattaccgaagcacgtatcttttggtcctcaagaaatgagcccatgtccaaaaagcactccttaaggttgggatccagagcatcaaaactaggctgcaaacattctagcacagttggataaggcttaccaagaattttttccccttcagaccagctttccacctgacctttccatgtatttagagatcgtcctttgagtgaaacacccactacttcaattacgattgggaatccattgcaacgtttcaatatctgcaatactcaccatgtgaaaaaagaaaaagatgaatctattgatatagttacagatttcgtagatcacaaatgtatagaggttcatctagatgaatgaaacaacaaccttctggaggagatcttcgtactcatcaggagacgtgttacaaggtcgcgatgcccaatgaatgagaagggctctagcatcatcatcttccaaaggtttcaaacgataattggaatcaaaactcggaaagtcaaaccgagaagtcaccaaaatcttataatttggtaacttaatttgaaatttctgaaggaaagaatccgctccccgccacacatcatccaacaccaacaatataggaccattttctttaagttcctccagcagttttcttaagccaacttctgcttgagaatcattctcaaatgtaagtgcattgtaaccgttgtgctggagtaaattctgtactattaccctaaagttaggagtatttgacacaacattaaagaagatatgcttgaacttccctgccaaaggaaactacatgagaaaccagctcaactattcacgagtaaaaattgaaactttaagacttaatgtggatcaacaatacatacctttgatatctggatcgtcacaaagccgactaaccagcgtggttttcccgcaaccaggaggagcagaaaccacaagagtaaccacagaatcgtcaaggagtctcttctttaactcccccaatggccaatccaatccaacaataaccttatcaagcttgggaaccgaacaaagatccctaaaaacaggcgcaggaacactcaaaaggtccattcttttacttaaaccatcaaccgaattcacaaggtttcccgtcaaacccaacaacgtcaactgattcctatgctgaagaagctgaagatcaatctgacagaacttaagcatatccttattgattctctcaatttttctagtatatttagatttctcgtaccacttgactcttggaaacttccgaacagctacatcagctctttcgatcgtatccctaagttcctttagttcctttacaccaaagtcaagctctttttgcatcgaatcaatcttttgagttaacggaaacaatatctccattgttgatacgagatccttggacaagggtttgaaagctttgaacttttttgcttcatcaatcacaactttcaggagcttggaaaacacagcttccccaatagaacctattcccaaactagcccaatcgttcattctttcacttctcagacaaaacccagaatccaaaaaaaaaaaaaaaacttgtttgtagaatcgctgaaaatcgaaaaaggggatcactgaaatatcaatgtgtggttcataaaaatgtagatagacgaaggagacgaattgcatagcaaagctgtcgcctttgacttctcagactcggtcccttgccgcgcaatgaccaaggaaaacgactgcgtttgcgtttggtcttttacgttaaccacacgttgttcgatagacggaacgtgctctcctcgtacgtgcgagagtatgcctttcttagattgggcctttttcaaagcggcttattcaaattaagcctttatgtttctacggcccaatataacatgcgtatttgaaaagctcataatttaaaatcactagtacatacaatgatacagcgtggttagtaatttcattacagagcaataaactagtatcaaacccgagacatagcatgttgactcttgtaatattattactcgtttagtctagattgtgatcattaaagagtcaataagaatacacaagctacgaaaatgttttttttttcactcaaaacttaaaacgttagaagcaacttcaggttatgctctgtttcctccgtgtgaactctcaaatttctcatttctggcatcaacctttcccacaacaatccagttacttcatcgcatttgacctccagattctctagatacctcactgaatccggcaactcgcatcccgaacacttcctcatcgagatattctccagtttctgtagtttgccaatctcttgaggcaactttctcaatcctaagcaatgagaaatatccagagaccgcaagttgctgagtctctcagttgcttcaggcagctcagagagattcatacaagaacacatcctcaacacttctagtctactcaagttccctatagcttctggaagttgagagagcttgttacagtttgtgatgctaagtgtcttcaatgaaacaacttcggggatccaatatggtaactcatcaagatcatagcagtagtctatgtcaatctcttgtaaattcgatagagctttagagacatctatatcttctgtgtcgtagaaaacctcaccgaaactacacatgaaaaatgatagcttcttgagactgccgagttgcaattgaggaatgtccagcaaagtgactgaaaccttttcaaatctaatccgtttcaggtttggtaatgagctgagacacgagaaattactcaatcttgctggataaaaaccgtgatttgcgattgtcagaacctttagcttcttcatttcagcaatgaagcttggcaatgcatagtctaatgaggagatattaagaactaaagcctcaacattggggcaatccatttccaaccatttcgatgagaacaaatcatctgtaacaaaaaaaaaaggtggtcatatttctatgcatgattttcaggggaaaaagaagaagaggatcttaaagaattacccgtatagatagacaaaagtcgagcattaataggttgatttaaacactcgtccggaaagttgtcctctcgtatctccaaatttagtttctttctttgcatgattggttccaattcactttgaaaaatagccaactccctcagaatattatgttgagtgactaacaactcattgtaaaaaccgtcttcgcgcttatttgtcctggtagtaagtaaaacaaataagttcatgatcaaatggtagatggcaagaaggtgcaatgaaacaaatgttgtaaaaaacaacaccaacgtacccgagatgaacaagtttaagcagattctgggaagcaagctcattaaggtataacatgaacttgttagtactagaactacctctaccatataattccatccatatgtcaattataagcgaagcacgtatcttttggtcctgaagaaatgaacccatgtccatgaaacactctttaagatgaggtttcaggacattgaagctaggctgcagacgttgtcgcacagtaggattagcgttaccaagaattgtttccccttcagaccagctttccacttgacctttccataaatacagagcttgtcctttaagtgaaatgccgactacttcaattacgagagggaatccattgcaacgtttcaatatctaccatgtgaaaaaagaagatgaatctagtgttttccactaacaggacaatttaagcttaaaacatgaatgttgaaactaataataataccttttggagaagatcttcatactcatctggagatgtgtgaagaggtggagatgcccactgaatgagaagggacctagcatattcatatttcaaaggtaccaaatggtaagtgggccataaactcgtaaaatcaaactgagaagtcaccaaaatcttataatctggtaaatcaatttgaaattttcgaagcaagaactcggatccctgccacacatcatccaacaccaacaatatacgaccatcttttgtgagttcctccagaagatctcttaagccagtttctgcttgagaatcatcgtcaaatgtaattgctccgcaaccgttgtcctggagtaagttttgtactatggccctgaaattaggagtattcgacacaacgctatagaagattttcttgaattctcctgccaatgtaacaaacactacatgagaaacaagaaacatgtgtaaaaatcaaaactttaagacacctcatatatatacataccttcgatctctgggtcgtcacaaagcttagtaaccagcgtggtcttcccacaaccaggaggaccagacaccacaaccacggaattgtcaaggagtttcttcttcagctccaccaatggccaatccaatccaaccagaaccatattatcaagcttgggaacagaacaacgcttcgaaacaagcggaggagcaggagaaccactcaaacggtcgagcttcttattgatgttttggaaataattgttaagaatagcttccatggaaggcatagacttcaattggttcctaaagagaagaagctgaagttgaacctgacagaacttgagcatcttcctattgatttcctcaacttttctcgtgtacttcgatttcaagattatattccacttctcgacatgtgaacacttctcaaccagtaaaagagctttatcgatcgtgtctttaagatcttgtagttccataccatcttgcatcgattcgatctctttgatcaccggaagcaatgactccatcgtcgatgcgagctcgttagacacagatttgaaagctaacaccttctttgcctctgaaatcaaaactttcagaccttccgagaccaaagctccagcaacagagcctaatcccaaaccaagccaatcgaccacgaccattcttgtttcctcttcagattcctttcctccaaaatttgccaaaacagagaaaaccaagaatgaaaaaatagctcacagatttgtctgtagaaactgaaaatctaacatgttgagaaagatttagacaaggaagactatatcagatgctttagatttgttgcaaagcaatctcgtagttgacttcacttcacagtgcctggaaactgcaatcaaaatgtttttttttctgacgtcatctttctttacgtcattgcaatcaaaagtttcaggcccattgatacatatatttttccttcatacggcccattttgatagaccttatatgggcccataaaaacaatgcataattgagaagctcataaatcaatagaatatgatcaaacaagagacatagcatgtgactgtccattatttgtgagaacttccacatgtcggaattgggtcaagcccatgttgactcttttatattactcgtttagtctaaagtctaaacagtgatcattaagagtctattaagaataaatacataatcaaaattagtggttcatagtttaattaattaagaaaatgatgcctaatcaactactcctcacatgcttcatcttttgttctaatatataaaatcatgccggatacatcattgtgttgcttatgtatcaatgcatgtatgtatgtattcgatttcttctaacgtcatttgtcgtttctcatgtattgtgatctgcatgcatggatggacctttgatatgatcggtgagttcattcatcatactaattagatatgtaattaataatataattgaaaacattttaataggtggaccataatattacaccgactaatttcacaaccacgagtttcttttgtcaacttttgcaacttacaatttaaaacattagaattcatccaaacaaaacaaataaaataaaaattatctttttctatcagatttgcagtaaatcagcaaaaatggcacagctttcaatagctcaacgccgagcccatcacaattcacaacagatgctcgttcccaaaagcataatactccatacataaacctttttttttaaatgtagggaaccagaaacatcgttaattagtgccaagaaaaataaacaaaaaactttcttaattgatttgtttgtctttcgttcaatttctgactctttttcctttttcgttttctagttttaaactatttccatttagctttttatggtaaccgttatccgaataatgaaagctaagctttggctggaagcaataatcatataaaccaaaacgcgtgaaaccattcaagtccgttctcaccgcattatccactaccactttttctcacattaacaactttattttattttacactaatcaaccaaaccaccaaaacttatacttttacaacaaaccagaccagcattttcaaatgtgaatgataatggataatgtatatagatcaaatctgccgacaagtatgtataagattcatagttctgacataaaatataatctgtgtttaaaatctaaagggtgtaaatttaaaagttgttgaagttgatttatgagagagttgattatgattatatttgaccaaacccaaaaacaataaaataaagtcactcgagatcttcactgtcattgattggaaccacctttgggactcctttttttttcttctctcacttacttatgtcacccacaactttcgctatctaattgcactttttatagaccaaagtccctacattactctattttctcaaaccccatttagaagaagagttcttagctgtcttcaatctctttgtctgtatcattctttacggaagccatgaaaatggcatcaagaaaaacaacatccttgcttaatcatcttcttcttcttggagctttgactcttttgagcagtttggtgatagtgaaaggagaaagcccttacaagttttacacttggactgtgacttatggcattatctctcctcttggtgttcctcaacaggtacaaacaacaacaacaatttccatttatggaaactccgtatcccatttttgtttgatactcaagagtcaagaccttttatactctttatggatgttttgtttgtttgtctgtttaggttattctcatcaatggtcagtttcctggtccaaaacttgaagttgtgaccaacgacaacatcatcctcaacctcatcaacaaacttgaccagcctttcctcttgacctggtaatttcctttttttttctgattaagaaaaaaaagaccctaaagatttgaactttatcattttcaaatgcttccaaaagaagaaatcctctgttttgcgttaccctgttgatcaatgtatattgtgttaccttttaaggcatttgtggattagtcctctgaaagatttgaacattagtggttaaactcgaaaaagctgaaaactttattgatcaatttaaaggtttaggctaattgggttcacactcgaaattgtgggtttaggaatgggattaagcagaggaagaactcatggcaagatggtgttttgggaacaaactgtccgatccaaccaaactcaaacttcacttacaaattccaaaccaaagatcagatcggaactttcaactacttcccttccactgcttttcacaaagccgccggtggattcggagccatcaatgtctacgcaagacctggaattccaatcccttaccctctcccaaccgcagatttcactttactcgttggtgattggttcaaaaccaaccacaaaacgcttcaacagcgtttggattctggtggggttcttccatttcccgatgggatgcttataaatggacaaacccaatcaacgttttcaggcgaccaaggtctcagctttccacaaattgttcttttgagtaaataggttgtgtttgttttctggtgtttactctgtgtctttggtttaatctttcagggaagacttacatgttgagaatctccaatgttgggttatcaagcactttcaatttcagaatccaaggccatacaatgaaagtagttgaagttgaaggctctcatgttattcaaactgattatgattctcttgacattcacgttggccagtctttagcagttcttgttactttaaaccaatctcctaaagattattacatcgttgcaagcacccggttcataagaagcaagctttctgttatgggtttgttgcgttattctaactctcgcgtcccagcttctggtgatcctcccgctcttccacctggagagcttgtttggtccatgagacaagctagaaccttcaggtttaaagatcagttacttataaataacgtgtaaatgtttaatgcaaaggattagtttatgaatggtgtttgcttttggttttcagatggaacttaacagcaaatgcagctagaccaaaccctcaaggatctttccactatggaatgatcagtccaacaaagacatttgtcttctcaaattcagctcctttgattaatgggaagcaaagatatgcagtcaatggagtctcttatgtgaaatcagagacgcctcttaaactcgctgatcactttggcatctcaggagttttcagcaccaatgccattcaaagcgtcccatcaaactctccgccaacagttgcaacatcagttgttcaaacatctcaccatgacttccttgaaattgtatttcagaacaatgagaagtcaatgcagtcttggcatcttgatggatatgacttctgggtcgttgggtgagtcttcttcttgcaccgctcttatagtttctaacgcaagttagatttttgctaacatttctctctcttatgaatctagatttggttctggacaatggacacctgcaaaaagatcacttcacaatcttgttgatgctctgaccagacacacaactcaggtaaaaacatcgaataaaacaacgacaaaaaagtatgattgtttctctagacataaaacaatcatacttttactttgatttgtttcttgtgttcttgatgtgttgttgttactggggaataaatgcaggtctacccagagtcttggacaacaatcttagtgtctttagacaatcaagggatgtggaatatgagatcagcgatatgggaaagacaatattcaggacaacagttttatctcaaagtatggaattcagtacagagtcttgccaatgaatacaatcctcctgacaatcttcaactctgtggcaaagctgttggacgacatgtttagagaaaatcctcttacagtttcctctgttctttcttaaaagtgatttactttaaggctttttcgattcaatttggttgaggttttgcgtttgttcgttatggtcatgagagtatggctgatggcttacttgtagtaaacaaagggaagaggaaagttatatgtgtcattggtggtaggctagcttggagttttataataatcttcctatatacaattctattcatgtgttttttctaatcgaaatctcttgcggtctacaaaattcaagccaaattcaaacattcgagacttcaaaattctaactattggtgcatttaacgatttaacgattggtgctgaatgcatgcatatgattcaaaataaggcttaggaaactgtagttgctcactatatattagaaatgggccaagtcaaataaaacagatgggcttaatgaagcccaataggataaagagaaatatcgaagaaatgatgaagcaagcttatgaaaaagttagtccaaatccaccaaaaacaatcggcgagaaaaagggggaatcagtttcttgcaagtttcaacaaggacgatcagaagaaatcttagagaaatcggaaaattctcttactcgggttttgcatcggtgaatatgaattgcgaagtttgtcagctaaaggaactggtataaattttcgtcttcttcatctgtttgctaaaaaatcagtccaattttgtagtcatcgagtcgtgtttctatttctggaattgttcgattggtttggatattttttcgcaggaagtggaatccttcgagatacgcgaagttttgcgctgtaagtttccgacacttgacatgctttctgtatccactttcgttgttttggtatagaaagaaacaaaatcggatcttacgatctaaccatgtttcagtttaagatcttgtgctttagatctcagattagggcttagacctgtagacattgattcgaattttgagttttggcgatcgatttcttgttatctggtttggttgtggaattgttattttttgtactttaaaagtgagaaggtgtaataatttggcacaggcattctacatacgattgtctttcatcgtgcgcttggtcttatccgccctaaagatattgatttggagctttttgagatcacttatgtaagatttcaatttctttctcgaggttacaagtttaaccaaatggtgagtatgcttttattttgatactgttgggatttcctttttcccccatatgtcacaggtacaatgcggtgaaattgaagtggagaagaaaatcgatgaaaagattgagcagttcattaactggattgagaaacacccaaacaaaaagagtcaggtatatacagataacaaatgcttgatttccatttcattgacagtgaaccacatattccataccttgctcaagcaaggattgaacgtttctgcagcatatagggttgtataatgaagtaatgatctcatccttttcattgtctcatcctttgtggctgttaatgatctctttttctttttgccaagatttgtctatcgttctatgaagtcaaaagcaaacagccttcttggttcaccaaaatcgaacggttgtactgggaacaatggtacatcaatctgaatgtgcttcagcccactaagccccctgtcggaaagtctcaccattctaaactagttatggaccctggaggttcgattgatcaatttcctgttctcatctccaaaaattacatctttttattattataagagtgtgaagtgattgtcatgctctaatcaataactgtagaggcatcggaggagagaagttctcgtaggacactgcttgagcaatcccttcaagaagtcttgttccaaatcataaaattcgtgaatgagaagaaggatcatgttcctcccattaacgatggtgtaatctactacccttttgagatcactatcccaaggtacatcagtcttcatttattcacatatcaaactgtgttctagagatc

SEQ ID NO: 976 - DNA, 31132 bp, Arabidopsis thaliana
ttagtctttaggtgtagcgatccccacagacatagatgagtgaagaatgttctttatatctttgttgtacaagtgttgaaatgagttaagttttgtttcagctcatcggactctgcctttgggatggatatgttcaagaggatactacacagtggccatccatcaatgctcggctaaattccattttccacttaacttagtacatatacactttgatgtttcttggtgcagcctaactccaatcaacactttcctagttacattttctgtgtaaatatattatatgttaccctctcctcgtcgatggataatgttaccttatctatgctttgttgtatataagtgatgtgttgtatataaatttcagacttgcatttcctaaacaacgtggactgttctgttttccaagatttctaaagttggaattgacattaaatagagccaaaaaaacaaacaaacaaacaaacgtttctctgatttgaagtttcgttcacaagtaacctaactaaataagaaccagatcaactaaaactgaaagttagggtagagaagctaaaagaagaagaagatagattgaaaccctccgatgaagtagaagctgatccgatagtctctatcacgctacgtagtctccagacacgaacccgactttgctctcttgaccttcaaactgccacgtggcgggtatttgagcaatgtggcttgtagtagttgcagcatcagtagcgccacttgaaaacggccagaccgttattccttgcccatatctgacgtcctcataatacgacccgtgaccaagcccaagaccaaaagcatctggcccattaaacccgccaccaggcccatttctgctcacggcggcgttgtagttgatcaaagagctgaaaccgccatagaacgacgaagcacttcccttcgccgtcgtgataccgccgttggaagacgactgagggaaaagaacaggcgtagcttgtaagggaaagttccggcttccgacaacggaggtggtagcggcagaggaataagtccgggaacgttttgagcttttacgggaaacaccaccgacgggaatgtcacggagagtacctccatgagtccagtaacggcgacaagacttgcagaaatgacgaggttgtgagaagttgtagttgttgtagtaacagaacttggtgttggttgattcacagcgaggacaagaaagctgctcttgttgatccgtcggaatcgcaacagatcctccttggccgtggggaatcttaggaacccgacgagattcactgaattcagaaggcatgttgttgagaagagaggttatctgaaagttgagagtttttgaagctttggagagttaaaggttggaactttgtgatagagtaagagtttccttttatggaggagagggagagagagagagatggggaaggagaagaaagtgaagctttttgacagagtatgttgggtttattgtgaacatagagagagaatagatatgctctgtttctttacttcattatacgtagctggtggctcttctttcaagattttctgttttgaaataaaaccacgattctctaatctctccatccataatctgtcacacgttttgatggcatagacattagtgaatgttggaagaaaccaaaattgaaaataacttatgataaataagtgaaagaaaaatcatatgattacatttgctgactaacaatgcttttgaaattttaattttaattatggtgttatacacgtcgaatttctgagttaaaagttaaaaaaggtttctacatgcaatatttgttttaagaaatacattaaattttatgtcaaaagtacgtgtctacgggaagtgaagactgaactgtgaagagagtaggctacatgtagtagagactattgagcttatcgatgtaaagcagttcccaataatacagccattatattgttaagtgtttaggagggctcattagcctaatttgttgtgtgcatcttttccaaaaaaagaaggattaaatggtatatggacctaagagattgatggtgtgtgtagatgtgctaccaatcactacaggtccttaatagaataccagtataaatgcagaatcaatgcgttcaggtcctcaaaaaaactacatttaaaacatcaagtaaaagtactcaacagttttacgttaaaccaacttgattatcaattttaagttttgttatggtcttatcttatctctcagcatgcatcaagattaagacaatgttttcaatttgttttatcattacggtgtaataatagattataaatcttatgttgtttaggagctataaaaagtaaaaatctagacaataccatgaagacagaataacaatagtcgggtgaattctgacttaacatgatcttgaggaacaagacaaatggatctttaaggtagagagagagagtgtgacaaatgtgatttgttccacaggaaagaagagagggtagtaattgtaaaattggggaggctaaaaacagtcaaaagagacagaagagattcgttttgtgaagagacagaagcgaaggttgtcgggtaaagaatggatacggagaagctaggagttaagaagcatgcaaatcttcactccctttcacaccaaaaagcatccaacattttggagagagacatgtgagaagtatgtgccaagacgtgtctacactggttcagagccgtccttactctgtgtaccgaccggtctaatctggtcaaattctgacacaccttctctctttatcccattctttttgtccttttcctctctgagtctcagtccttctctgtttccttttgaaagggtgttttcgtcatttaccttctggtccgtatttctaatgggcctaatatgtataccccttggaccatgggccttaacataagagatttgtgactgttgtattttagatgtgaatctgacaccctgctaaacaaaccccaagccgagtctatgaaacgaaaccatatatgggcggattttgttatgacccaaatgaaatcaactacaaacttacgtggaaaaaacaacattgttgggctaaattatcctctctctttcttgctaactaatcaaacgatagttgataatttgatatagttcttctagatatataggtattgatactgtgatgtgatttgattaaaatgatatgcaatgtgacatgacagtgtaaagaaaacatgcaataatcgttctttattataagtccctaattatatggcttttatgttgtgtttgtgcatgtttcaccaaacatcccattatgaaaaatatattcaaagctgaaaataactttattgatgcatggtcatctaaaaccacgatctgtgtcccattttgaaagtgaaaacttggtcatcatcataatagtaaaaggtgcctagaaattaaatattcaaaataaataaatttgaaacaattattacatgtcaataagaggagacaataattacaaaaaaaaaacgcattaacaaataaaataatactccacaaaagagttttatttatgactttcgaagttgttggaggaaatatagaagactctacggggaccaataacaagagaagtatagacgaagcccaaatgcaaatcatctccgtaatttttttgtcttgttgcaacaaattattattattattttatttttattttatttatttttgttgcaaaaaattatgatgaagagcgatatatttttggaaaatatctttcgaattcttgagttgttgaatatacaaaccaagtggagtaactgtctagtgaaaataatgtaggaaactttggataataaattgtatcttgtagacctttaaaatatcaaattagtggcgaaaattgttccaaaacttgccctttattcttgcgtcaaactcagattcttgagctcaaaattttcatagtctgaaagattaatgtgccaaaatatatcacatctctactcatgaaactgggtgcgtgcgtctccacttccgttgtgttcttttccatggtcggagaagtgaacgtcacattcccatctgttactgttcttttgtttgtctctttgtatgtgtttataaactatgcacacacagtccataggaagatttcaaacttgtttaatttagaaaaaatcatgtaagaaattaattggaacgtcgagaatttgttgcaaagccactttatgaaaagtgtgagtagtcaaaattaaatgatttaatcaagggtgaataagtaattgtagatagatagttgactaatcattgcatgagtaagcattttggatttgataccagtcagcaaggattctctacaagctataacaatcgaatgcacgattgtcccttgccttgatctcttctacattaattaagttaattcaaattttcagatttccatatataagtatccgtaacgtatacgttatcgactatgaataaaatttgtgcgtaagctgttaacaaaacttaataatggaaatatagaaatgtttagtaaggagaggattatgattatcggtaggagattagtatttctagcctaaaaacaagaatttacaataatatgatatttttttacttttttatttatttatttatataaagtatttgtgaggatccacatgttatagttatggatattaaattacactattgttgagcccacatcacctactaatatttaatatttattttaaataaaggcttatatatatttattcataaatttggccacttttatgagccaatatatatgttcaatcaataaatgcgtgggttggatcataaattgggatatttattatttacttgctcaaaaccgtttcagacagatatagaaaaagattggtgaagcagacgaattacgtaatttagagctatttacagagaaaatacaaaagaaaatatataagaaaagaagtccacttggattaaaggaaataatatctcaacggctaatttttagtttagttatcctttatgtagtaaaaacagctaaagttcttttgtcaaaacaagattagctaaaccaatatattcaacacacacaaactagtaataattactagaagtatgtatatatattctcaccaagaatctctgttttaggtgtaaagaagagaaaaacaagaaaattagcatcacaaacttaaataaaagtgaaaaaagaaatgggaggatctttctttaggtagttgtaatttgtatagagccagctaaaaaaagagctttcaaaaacaatggagaaagaaacagtaaataaagaaaaagagcaaagaaagaagctttcatgggtcccaaaataaaaaaaacaatcaccaaaagatatcaaaatactgaattaaaaattcaaataatcatatgttatgatgcgtggattgaatttaattttattattaaaaatgatatattggaattggaacagcaagtaacagcaaagattaggcacttgattgatatataagcttttaaaaagtcaaatggcattttagtcactttttttggttttgagggacagattatcaaaccagagtcagagagattatcgctcagaatttgctctgttttgttgttgctgttgctttgatgtgaaaaggagtatctattttctcttaagtttggtgagacgaagaacatgaagcttctctgtgtttctcagattttcttttgagcttttttttgggatttgagtctctttgcttggtttgtctgttcaagatgggacaaaggttttgacttttttgatatctcttaccgaattgttcaagctttgattttttttacttgatctgggatttgatttgatttgtttctatttcctccttctccctaatcagtggtgatttttggtttctgggttctgattcttttgatccgaggtttccaaattagggacctttttccccaatttgattagggtttcagataaaaagccaaactttgggaaaaattagggtttgatgcatatctcactttggaagccaatttaccactgtgctgctgctctagtactagacaagaagagcagtggtagtagtagcagcagcagcaggaatcgagatgtgactcagcggaaactccatgaatctaagctcagggaagctcttgaacaagcatctgaagatgggttactcgttaaatctcaagacatggaagaagaagatgagtctcaagatcaaattcttggacggtctagatcacttgctagactcaatgctcaacgagagttcttgcgtgctacatcactcgcagctcaaagagcatttgaatcagaagaaactttacctgagcttgaagaagcacttaccatttttctgaccatgtatccaaagtatcaatcttctgagaaagttgatgaattgagaaacgatgagtatttccacttatcattaccaaaggtatgtcttgactattgtggatttgggttgttctcgtatcttcaaactgttcattactgggacacttgcacttttagtttgtcggagattagtgccaatctaagcaatcatgctatatatggtggtgctgagaaaggatctattgaacatgatatcaagattaggataatggactacttgaacatccctgagaatgagtatggtcttgtgttcactgttagtagaggctctgcgttcaagttgcttgcagagtcttatccattccacactaacaagaagcttctgactatgtttgatcacgagagccaatcggttagttggatgggtcagtgtgcgaaggagaaaggtgccaaggttggtagcgcctggtttaagtggcctacgcttaggctgtgttcaatggatcttaagaaggagattttgagtaagaagaagaggaagaaggattctgcaactggtttgtttgtgtttccagtacaatcaagggtcacggggtctaagtattcttaccagtggatggcattggctcagcaaaacaactggcatgtcttgcttgatgctggtgctttaggtccaaaagacatggactcgcttggattgtctttgtttcgaccggattttatcatcacttcgttttatcgtgtgtttgggtatgatccaactggatttggttgtctgttgattaagaaatctgtgattagctgcttgcagagtcaatctgggaaaacgagttcgggaattgtgaagataacacctgagtatcctctgtatctaagtgactccatggatggcttggaaggtttgactgggattcaagataatggcattgctattaatggagataataaagccttgggaactcaattacccgcattttccggtgcatatacttctgctcaggtgcaggatgtctttgagacagatatggatcatgaaattggttctgatagagataacacaagcgctgtgtttgaggaagctgagagtatctcagtgggtgaattgattaaaagtccggttttcagcgaagacgagtcatcagatagctccctctggattgatttgggtcagagtcctgctgattctgataatgcaggtcatctgaacaagcaaaagagccccttactggttcgaaaaaaccacaaacgaagaagctcgcctaaaccagcttcaaaggctaataatggcagcaacggtgggaggcatgttctctctttcgatgctgctgttttgtcagtatcacatgaagtgggtgaagaagtcatagaagaagaaaattctgaaatgaatcagatagacacaagtcgtcggttgcgagttactgagatcgaagaggaagaagaagaaggagggagcagtaagctaactgctcatgcaaatggttcgagctctggaatcaaagacagtgcgataagaagagaaactgaaggcgaatttaggctgttaggaagaagggagaagagtcagtacaatggtgggagacttcttgtgaatgaagatgaacatcccagtaaacgaagagtatcgtttagatcagtagatcatggagaagcatctgttatcagtcttggggatgaagatgaagaagaagatggaagcaatggagtagaatgggatgatgatcagagagaaccagagattgtttgcaggcacattgatcatgtaaacatgttgggtctcaacaaaaccacctcaagactccggtacctcattaactggcttgtgacctctctgctccaattaaggctgcctagatcagattcagatggagagcacaagaatcttgttcagatttacggtccaaagatcaaatacgagcgtggatcttccgtggcattcaatatcagggatttgaaaagtggaatggttcatccagagatagtgcagaaactagctgaaagagaaggcatttctctaggaattggttacctaagtcacataaagatcatcgataatcgaagcgaagattcaagttcttggaaaccggtggatcgagaaggaagaaacaatgggttcataagagttgaggttgtcacagcttctcttgggttcttgacaaactttgaagatgtttacagattatggaatttcgtggccaagttcttgagtccaggttttgctaaacaggggacactcccaacagttattgaagaggatgattcgtcagaaacttaaaagacatgagcattggatatattttttccagcacttcctttactgtacttatatgttattatccgagaacattttcttgtatgattttgggaagttatgtgagcagagatgatctcagacacgatttcagatgtctgcatattgtaactgttcatctctcttctatctttgtgttgcacaattcattgattcatatccaaattttagaaccagaagaaatatttaaaagctgtgccatatctaagcttgatagtttcttcttttcaagattccatcatctttatgagaaatgcgatttctaatgcagattccttagtctgtaagaaccggttttcttcaacaatgtcagtcgtcaagttgagtaagaccggtcgttcagggtcattgaaggtattgtcacggactcttgcaacccatttcgcagcttcccaaacaccaaatctaacaatgcgagagaagaaatctcagtcttaaatctcaaacattgatagagtcgccaaattagaagaatggatacatacctagtattgaatgaggaagtgactaaaacagctggataaagaacatccttaggaatgttgtcataaggtgagtattcacgtatagcgtgaaaatcattgatatctcctggatatccaaactcttcgtaatcttctgccgttaatggtagtattggatatattagagtatgagttggatcaagaaaaggaacctggaacagaagaaataatatatgaattttaaggtttccttatcaatcaatgcctcaaatctttttgatccgcagttttttattacctttagaaccgcagcttggaagagatcggggcaatgattgatagctgaagcaacaacgagtcctccagcactgtatccccaaccagcaagcttgttttcttctactatattgttctcaacaaggtacttggcacattgaatgtaatctttaatggagttaagtttcttcgcgcctcttccgtcttgatgccacttctttcctttcccacctccacctctaaaaaccgagaacaatggatacatgaaggaagtcttagcttcttgctgttgaatgttctgaacgagaagagaaagatgatactgacctaacgtctgcatatgcgagtacccagccacgatctaggaggcttttaagttcactacgccatctcttatcaagcatttcaccgtaagcaccatgaacatgaagtagaccaggtttttgattctcctctttctgagctcttgagtaaacaatacttaatggaaccatggctccatcatgagaagatacttcatggtaatcacaagcgtaaaactcagtcaagtcattccacaagttgtcattctcggcagtagtatcctcagtatcaaaactgacagttctggtgcctgagggtatattagggctctcggtggagtttgcagtgccatataaaacccgtgttctttcgtgaagcatgttttgctgctgtactatattccattttccatttaatagatcgtaatcaaccactgcatcaggcatctgcaggacaaaagtatctaaaacgcaaaaaaaaaaactatctacagaagcagaaatagcatgaggaattgttctcctaccaccagagaagaaattgtaaaccgcattgttggagaattgaagtcgtagtttgtgccaggaaagatttgagaaacatgctttggaagaggaagataacgaggtttaatatctctcagatggacaggtacctgtgtataagaaaacaagcatggtcaaatttattaacagagcatcaatctaatcgatgaaagtaactaagtggagtaagctttacccgctttgtcttaagaggtagatcaaccacacaaattttaaagctctgcatttccttcacaataagggatagatgttttttgcagaaatcaacatcctctatgattaattcagggtcgttgataaaaactgtctgcaaacaatagatgaacacaaacaaatcagaaatgaggaataatggtaatcagcagatgaaaacaaatattgtatcagctaaaccaacctcccagatcctttgacaggaagagaagtgaacaggacttcggagaagataatgatggtcgactgttccaccgtcattggaagcatttgtaaataaatacaggaatccctgatgatgctcgattatgcagtgggctggagcattgtgttcccaaaccaatgccaaaccagaaaatgggtcagctgcatttatcagaaagacctaagacatagtacttgttatgatttcaagtcattcaaaaacaataaaaactaaagcttttagcagatcaatttggagctttcacctttgaaaacgtagtagagaatgtatttacagttacaaagtggaaatcttttgtatgtcttatgttaacgtgaacattgccctcgaattcttcgtgaagcaaaacatcttcatccgttgacccgatcgtgctacaatatatcctgataacagaacaaaagaaaaagattcatacaggccatttttggaagaacctaacaaccaaaactgatcatacgaaacctgcatggccgttttttctgatcagtaacgacatagagcaaagcctgcccattctttgcccacgctatgttagagacacgatctgcgtgaggcttactacataaagctccagaattcaagtttctcacacacaacttaaagtaatcgttatccttatcatacatagtatatgctagaaatttatggtcaggagatatctctgacatttcctcataagcataacctacaaaagagacaccaaaattgcttatccctcttaatccaccccaagtataagagcctcaaatatgcttatttacctccaaatctctcagcttcctgattgtaatcaagcagcttctgctcaatcctcttcccagatgtgtaatcaaaccctgcagcaggagacttatgagaaatgaactcctcgtgcaagctcgctagcctcctacacagtactggatactgcttcccttcttcaacccttctataatacaacctaattccaccaattctcaaccaaatcaatgtccaattgcagcaaaaaggacgaaactttcaaactaatcgacgagtttacagatagaaaaatccaagctttttatatcttaaaacgatgctaaacaagagaatcagtataattcaattgacccaccaaggtccccaacgaagaggaggcgtggagagctcaaaggacaaacgagaagccatttcagactgaagcttggtctgaatccgatcagtatcagccaaaacggcttcggtatacttctcctcttgctccatatagatatccatatgcctcatcgccactttatcttccagcttagacatccaactgtatggatcctcccacgtcgcgtcgtggaaggtgaaactctgcggcttcttcggcggttttggtaatgctggtggtggtggaggaggcggtggagacttcggaggcttgtaacagcgacattgttgtcgccggaaacggcaattatgacgggaaaaggtccgagagagattgctcaacattgcctccggttggttatttgggggtttacagggtttttgcgtctcaggaaatttttgtcattaagcttacaaaatcggacccttctgaatcaaagagaggcttttgtcttacacaaaaattcagatcattctgtattatacaaaaaacaaagaaaattcagatcattttatataaatttggatacaaaaaaactatttagatttagcatgaacattgaaaaacattcgacagtaccaaaaactagacgtatagtgcatgcagtacttgtcttccgatcatatccatacaagccaaattaacacatagttatacaaaattatttgttttaaacataagtatatgatataaatacgttggaaggcatatgaggcataatttgtaacctcagacgttggaaaagcgcaatctgtacggtatatgataatcattgcgaatcctctccttaagctccatctccgtatccctcttgaccttcgtcttgaacgctttcatcatttgcacaacttgtttcacatctacttttgatgcctcagctatctccatcatccgttttgatcaataaaccatgcataaacatgccataacttattattaccttcatctgtcatggactccattattgtcgtgtgcagcctaatcttctcgtcgtctacctttgaagaagtacaaggaccaaggcgggaaagcaactacaatgaatttggtagaaagttacgatgtcttgtattcgctatagtaagtaaacaagagtttattgagagatgatactatacatgtttctccaatcctaatcgtcgcttataataacgatacattattctcaaagtatatgcatatggcttatcccatgggtttcctgcacaaaaggtggaccaatcatgagtgtccatactcatcaataacgagaaaccaaagcaaacaaggctaagacatgaaggaattttgcttactcaagagactcctgacaaaagcttcagcttgaaatactcaatatatatataccttgcgtaaactggaacctcatctttggcagccttgttgagacggacaaaagcatcgaacttgaaagtatcagcacacactaaagctggtctgaatcccttcttccggtggtaacgagcatacttggcacacgttttggtcttgtcaacacctacactcatatttcataaatacgttttctcaaacatgtttactaagaaaaacaaaaaacagagaatgactaaccgacctcgtaatccgatgaacatgactatgctaggttcaagctttccccgaatgagtgcagattttcccggatctagcttactagagagctcctgtaacatcatctgaagcggtggttccgagttagttaaaatcaactaaggagattagggacataattacaaagaaacaatcgtcaccatgtagattagggcacccttcttcttgggcgccttaggcagattgataatttccagacttttcgtctcaatctcatccacggccaatctaggaatatcggcgtcaagcaaagcgcatgtgatctcgttcaagcaactcttcagtttcgtgcagtccatgttgcttgttttattcatctcttcaaaagaccggcctatccgacccctcacttcctccaacgccatccagaaaattagagattcggtcgcgatttacaggttagggctttggttttgctcggatacataaatacgtcttgccgggactgccccaggtttggctgtttaataagttgtaaaaatcacaagttttacagtttacacccataatagtaataataacaataaattaggggagcgaaagcaaaattcctgaaatttgtttttcctttctgcccaaacaaaaaaaaaaggttttattcctttattttttccaaccttgtcagactttagaacatcacataacagacgacaaaaaaaaaaaaaaaaaagaacatcacataacagctgttcctctcatctctcttataaggtcctctgcttctgagatcttcgttgcttctttgccttctggtttagtttaaaatcaatcactaccaaaagccctaatcacagaagaaatcatggttgatctcagtaaagacttacaatttttcaaggtctttctccctgaattcggttctcacgaactggtatacttgttttatatctcatcagtttattcttataatatcaaaatatattccatgcggagattaatttacaaaaataaatctgcaggtgattcctcctgcattcatcgatatgttagagaaaccattacctaaagaagcgttcttagtcgatgagattggacggttatggtgtgtagagactaaaacagaagatacagaagaaagattctgtgttttcttcacaaaaggttggcaaagtttcgcaaacgatcaatctcttgaatttggagacttccttgtcttcagctacgacggcgattccagattctccgttacgattttcgctaatgacggatgtaaaaaagatgttggtgtcgtctcaaccacggatagatctagggtttctcttgatgaggaagaaccggatgatatttttactaaaccggatcgtatgagagattgtgattgtggccagagcattaaccggaaacggaaacgcgattcggttaatgaagaccctcacgtactggttgatgataaaccggagtatgtttcaacttacaaaaccaaaccggagcatagtgaaaagactcagagaacagttaaccgggctggaggtaattattaacatgtttttttttggtttaatttacattattgcgttttttaactctttttttcattcggtgttacctagatacttgtgacatatcatggtttccagagaagaaacacaatggatttgaagaatcggtttacaaacccaagcatccgcattttgttaggaatatcacaagaggttcacttcagaaattggtgagcttaaagaacctttttttttatataaatctgtattaactcataataatggttgtttacataatatcaatttctatgtgtttgctaggaattaccgttaacttttctgagatcgaacgggattgaattggaggaagatattgagctttgtgatgaaagtggaaagaagtggcctttgaagattctgaatcacgacagaggattcaagttctcgcatgaatcatggttgtgtttctgtaaaagccatgagatgatactgaccaataagtgtctatttgagtttattgtcccaagtaatgggagatgcagtgagattctagttcgtattgtcagtgggagattgcctaccactatgaccaaaaataattaccaagttattgatatgcaaccttaaaataagtaaacaaatatatgttatgtttcgcttctattgtgaattttgtatatatcatttgactattccgtttctacattgtttatgtgtcataccgtttaatttatcagaaaatttaattagagaatagaagtcagtagttgtaatattaaaaatcaacatgatggattgaaaaaaacaacaacaacatgattatgttaattgtcgttatgtctcgttacgcaagcaatgacaaagataaagcagtccattaaagggattaagaatgcactaatcgcatgagaattgcacgtaggagagcacatagtttgtgtccctttcttataaactaatgaaatgccaaatcagccaccagttttcacagaaccaacgggacaagagcccacgtaatatctattattcttcccttaaaagatgtttttttaatgtaacaagttgcaattatatgaatgcgaagtctcaccaatccattaatatatataaatacacacgagtgtgtgttgtttactacacaatttcttcttcgttccattaacaacaacaacaaaaaatcggaaagctttctaattttctttctctactacaatggaatttgcgacttcgaaaggagaggagattttgaaagatgagcaagtgtccaagcagctacacctgatatcgtctgaaacgcaaacgcaaacgctgaacaaaaaagccgttctaaaccgcatccgcaaccacaaatgtattcacaaaatcaagagtcttcttcacaccaccgcggctaacaacggagccaccgtcgacgctgattattatcggtggattgatagcggcgatgtcttttcttgtccgtgacagagattttgacacgtgtatgtcacgtgtgtttgtgattctctcttttctctagtattcaagttcaagttgtgctatatgtaatcctagtgagtagtgattgtagttttcgatgttcatgatgaattgaatcattgatgagttcaccgcagatctttactggtttcattgttgggatgcggtaatggataaattgggccatgactgattattgttttgattgggctttctcaaatattaataaaagcccaacaagtagaatggtttttagcgcaataatacattgcagctaaatcgaatcaaatacagtatactgtataacactgcttggagagcgtaatcaatcagcttcaaagtccaaaccaaaactaaaaaaggattcattcaacaataaaaccaacaaggcaaaaaacaaaaaccaaaataaaaactggaatggatccaagtttcatgagaattagatcattatcaaaagagactagctagtacaagacgtaactccatcactcttatcttcgtcttacacgactcatatagtaccaacttaattaagtcacaaaaggttagatatctctagagacgagctcctgatctcatgaagaagatgagaagagccttctccgtttgtatttagccttgaagcaagcctgtcttaacctcttagtcttatccccaaattccaaatcgggaacttcctcaatcatcttcttctccatctccaaaagctccaaagcgttcctcagcttactcttgggcgttctccccttcgtgttccctaacaagtcctttcaaagaagaccatcacatatataagtgttgtaaccccaaaatgtataggcaatttgattgtaaatgtctgttgacgaacgtaccttgagattagcaattagagcgtttaggctcgtgagcttacggtgaggccaacgaggaatacctaactcacgacatcttttcttcaagagggttacaccaatgttaagctccttggctgctttagttatcggcatgtagaagtactgcttcatcatttcccttgacatattattgatgactccatcttctctatatcgcctcttcataattatcctcttctggcttgttttctctttcattgtgttaacatcttcatgcaatatttgctccatatttggatctcccatggtattagttcttgaaatttcatcaaggtttggttcgacctggttattgtagttaccattattctcgttccaccatccactcgatatatctgctacataatataagattagatttacaatccaagcttgcatatatgtgtgtgtatatctacatacatttatgtaaatatatatacctagagagaaagtactagagatagcttcaagatcaagtgaagccagaaacgtatgatcagccgcaaaggtagtagatatatgattaacaatgctgtcttggagagaaaaccaattttgggtttgaaaatccttaaaagggtcaatgaaagagctgcaaaaactcaagacaaccaaaaaaagcatttgagattcaacgcagggaaatcatttttttgtttgaccaaacagtagaaacatagtgacttatacctgtgaggatcgacgaaaagtgattgatcgagaaacgagaatatgtcttcttgaaggaatgattcatagttgttggcctctaaccaggtcattagaggtctttgatcagccatttcgattgaaagtggatatagatagattgtaacgttcgttagtcttaaaacaaggaaaatgaatcgtgtgtatatatatatataaacaacttaacgtacatgcatagatagagaaagtacatgataagtgggaagtgggtatttagttctccgagatgatgagccgtcaaaatcattatatgttttctgtaagttacgagagagatagtaagtagaaattaatgattagtgttgattattttggttaatagggataattcgtttattaaaagctagtaatatcttctaataataggccctaagtttgtaaacgttcaaaaatttcataggcccgccccatcccatcacatgctatgcgcgttcatatatcgttgcttgttgtcatctttcaaaatcttctcttttttcaaaaataatcatgaaaatctcttttctctttaaggacgtatatttgcgtgagtatatatgtatttgacgaataaatattgacttatatttccataaacaaaaatcggtggaaaaaagtggtgtgttacatgcaagttcaacacgatatatagctggtaaactcaaattatacaatctaaatatcaaatggtaaattcaaaatatatattaactcaatttcgttagaggttaatacagccaatattcaagacaatgatcttctggcataatcatttcatttagatgtcatatcatattaccagaacactttacgattcaaaaatattgtattaaaccaatttaccaaaaaacaaaatgtattaacgaaatgtttatagtccatctctttcgtaaatgttgattttttttaataattctctcacacatattaaagacatttaatatttatgttaaatattaatactcatttttattttcccaacaataatgtatgcagcattttctacgctaaagcagtctcaataattataaacatctattaattcaatttattcatatatcttccattcatatttttgaacttcatttaattgaccataattaatagtctaatactcccacaccaaaatggattatatattcagactttcagagtatatatagcacagagaataaaaataaaataataaaaaaaaataaaaaataatatcttattataaaataaaatataaataaataatatattttatcttcatataacaataaaatactttaaaacttataaaaataaatcttaatgaaagcgtaaagagtaatatctccctctataataaataatttagttttcaatagtaaatataacatttccacctcgccgtgtatgatcaccgaccatgtccttctcagtcatctccaccgccgtttaattccttctccgtttgttttaccacgtcttgctcgatactcagccgccgcatcattgtaagattgtgccgccatctccgccgtaagaaacgttccaagccacctccttgatttcgatctcggatcccatatctccgccgcccatttacccgatggttttttccttactcctttgtatttcttctccttctttacctctcggtgcggccgttgtaatgtgcagccgtagcaaccggcgacgccacagagaggacaagggccagcgtctggaggcggaacgcttgtgatgatcaagtttgatgatgacgcgtcgtcagctccggagttagatatcacttgtcgcagagcagagaccatgatctcgtgctcttgatctcttgtcaagtacgaagaagaagggtgtggtgcaacaagtgtgaaattttcgttttgatcattaaatagaacattttctgaattatccattttggtgggattagactgacaactattcattttttcctgcaaatggtgtgaagaacaaaagggagtgagcatggtttttatagccaatgaatggaaacataactgtgatgctttttttagcgtttatgtggcctgacattttgctaccattcgtctaaattattagtcacatgaatgtgattataaaaacggaaaggctacctttgtatgtatgcggaaaaaaatttacaaaaagacgatcatactcgtttgacccaagaaaaaaaaaagaaaaaaggtcaaaatgtttcgctcgatcatgtttaaaaaaaaaaaaaaaatagtggaaaacactttttatattagttgatttaaaaatattttgagtgaattgcagactataatgcgagtttgaatttgataagataacgtaatagtataactctttaatcaaattcactaattgttttgacatgttcgaatcaagaaattaaaagccgcacgtatttatcaaattttgaattctatgatatttaaaagttaaatactgtgttgttattaaataaagaaataatatgtataatatataaaaatatatactatatgggattttttaaaaagacgttaaaaacaaatgttatattaatgttttgtaaataaatatcaaagttttttataagattatatttgcaattttgcattacacttatttcaatcttttatttttcattcgttctcaatcacttaattattctgtcagtttcatacagtatgtaatacacgccgcgtcattctcttaaaggagcacgtttcgaatatacatgtgggtctcaacgagactttctcatgcattatgtaatacacgcggccgagaagttgcttcatgagctaaaatcctactgaatttgatcaatcatatagtttcgagccgattattcaatagagagaatcaagtagactaaaataaacgctgacttctcattgctgtgcactaatgcatatagtactcaagtttaacttccctaccaaattgatatatatatatatatatatatatatattattttttcaaattgataaatttacatatatgaatgtttcttaacaggcttaacttgtatttttatatttatttgataataactccattctgtagaaattttttcagtttggaatattgtcgttttagaagttagtcaaagtacatatttgttctgtactaaaaattaaccaaaaaaatgggatagaccagaattccaattatcacttagttttgtatgtatgcacgagtatatctagtttttatattgaaatacaagtattttacatttgagaaaccgtaaatacaaaaacgttttagtagtaagccgtataaggatcatcttctgcaaatggttccaaaactcagagaagaaactcttatagcttagaaggtttctctctatgtgatttggatagaatataatcacagactatacatgcaactagtttagatcctcggactaaatccagaaaattagtgatcgactccatcatcagagtttctaccttctggttgagtatctgcctcaataaagtgccattaagaaacagaacgagaatactcttccacaaacagaggtaatcatcaacacaaaacaagcaaaaacaatgataaagcacaccacaatgcaaatgttaaaggccactacagaggagaagactctccaataaaatagaggtcttttactcaaaactttttgggctctatctaactttttttccatcaaaactttaatttgaaaacctcttattaaaaaaaaaacacacgcaagtggtttctcgtaaaacatataacccatctaggtaatgtattaatttctcccaaaacatctatttttccccctataaaacgatatatagttatatagcttaatttctcagtcatctccgccgccgacttcttggtgaatgcttccttctcccttctttgagccacgtctcgctgatcttttttcgacaagcgcagccgctgcctcatcgtaagcatccgctgccatctctgccgtcggaaacgttccaagccacctccttgttcttgtactcggatcccatatttccgccgaccattttcctgataataacttagtaaagttataaaccgatggaacaaactcaaagatgttggaacaaaatttacttacctgatggcttcttcctcactcctttatgcttcttctcctgcttaatctcttcatgctgtgggaatgcgcacccgtagcaactggtgacgccgcaaagaggacaagggccagcgtccgaaggtggaagagcctcacttgcagcaatgtagtgagatgatgacgtatcacctccagtgttggatatcacttgtcgcaaagtagaaaccatgatagcatgttcttggtctcttgtcaagttaggaggttgtgaaataggggtgaaatttttgttttgaacattttctgaataatccatttttttggtgtcaaactgataatatgtacttatttagtgaatgcgaaggatcaaaagtgttgtcatgaagatttgaaaacaatctatatagtaggaaggtgaagcctacctggcagccaatatctaatatatgtacatgttggtcccatcaatatatatatatatatatatatatatatatatatatatagaagctcctcgctacacttctctttcccactacaaagttttcattttcctccgatcatctttttcccttctcagttacacaaatctctcacccaaaaatttcaaaaattctaacatctttctaaaaatttgctctttctcttacctgagtgaaacatggtcgacgttgaccggagaatgaccggtttgactccggctcacgcagccggtctccgccgtctctcagctcgcgccgccgctccatccactcctacgatcagaaacagccttcaatctttctcccctttcgccgataaagtaatcaatcatcttaaaaattcaggtatcaaaatccaaccaggtctctccgacaccgagtttgcccgagtcgaagccgagtttggtttcaccttcccaccggacctccgtgttatcctctccgccggtctctccgtcggcgcaggattcccagactggcgttctcccggagctcgtctccacctccgtgccatgatcgatttaccagtcgccgctgtatcgttccaaatcgctaaaaacagtctctggtgcaaatcttggggcttgaaaccacccgacccggaaaaagctttaagggtcgcgagaaacgccttaaaaagagctcctttactgattcccatctttgatcactgctacattccttgtaacccgtctttagctggtaatccggttttcttcatcgacgagactcggatcttctgttgcgggtcggatctatccgagttcttcgagcgtgaatctgcttttcgaagctctgaattcttcccgagaattctcactaagcaacgttcagtgagcgagaaatcagctggatcatcctcgaatttttcccggagaagcttagatttgggtcgggctaatggtgcgggtaagtcgagatgggttgagttttggagtgacgcggcggttgatcgttgccggcgaaactctgcctccacatcatcgtcgtcttcttcatcgccggaccttcccaaaacagagactccgaaatgggtgaaccagtacgtaaaccggatcggttcggttttaagaagaggcgggtggagcgaatccgatattgatgagattatccacgtgtcagcatcgggtttctttgagggcgaaatggtaattatcgataatcaaactgttcttgatgtgcttctattaaaagcgggtcggatctcagagtcgctccgtaaatccgggtggagctccgaagaagtctcggacgcgcttgggtttgattttcgaccggaaaaggagaggaaaccggttaagaaactctcgcctatgctcgtcgaacaattcgaaaaacttgctgaatgggtttctcagtcatgaaacacattacaaatttacattggaatcatagtaatggtgatataattgtatattgattactgatgttttgcttcagtttaatgggttatttagtagatttagtgtatgtggagcagattttatataatttaatttaggatcacaaacgcacgtgtgacggctttcccaaacaaacacaaacgaacgttgatgggtcacgcaaactgtggcaaagacggcttcgttcgaacgcaaagttgttatttctaaccccaaccatgttacaatatcgagttacgtgaaaccatgcattatgtaacgaatataaatctaaacacaagattaacaaaagacacatgttgaaatgtaaacaattccaggacatatgtgtaaattaccaatagtgacttaagctcttcggagtaaatccgtaaaacaacaatattttggttaatggttgattgtattactgaaaactaaatgcttgacattaaaccttttacaaaaacaaagcttttagaaggaagaagaaacacatgttaagctcaatcgcaggagattgattcaagaaaaaatatatattacttagtagaagcggttggtgagtcgtgagtgtcttcttgttggatgtttgacatatcaggaaccaagtagcgagcagcaggaggccttcacgatccagtcgacttttgctcacttttttgacttaaaaaattgtaatagttggcgtcaccaaaagtttgttgactattatttcgtataatcatagaacagataaataaaaaattatttgtactctttgatcttagtgtcttacgtactgaaatatgagattgttttaatttatggtccgggaaagtcaaagaacgagtaatttggaattttgcttgtgaaatggaaaatgtgtgaataagagaactctctcctttttggaccgacgagaactgattcagtttgctttttttttcttcttcttgtttttcaactttatttatttgacaatccaacttttttattaaaaaaatcaacacgaatacaagggataataattatttttggactttcaaatgataaaaaaaaatgcgtaaaagctagaaagaaaagaaaaaaaatatagataacctaactcagagaaaaaacactcgaccgttcagatggtggaaattatttagtgaacgataaaaacaaacttaaaagtataatattggatttaaagttgtatcagatgacttgcattattgaagaaactatacaaattaagccaaatttacaaagagatgacctcaaccaaacccttaataatccaaaaataattcagttagatgaattgaatcggacagcctatcgttggatatcactacgaaataatatgtatttggatgtgttacgtgaacatcagagaaaaaggcaatgtcgttggttacattaattaaacattattataagcaataatgatatccttaataatactagtcctacttttgtgttattgtatacatgacccgtcgtcgcattatttattaagctagtgactaccgtttaagacgatcagtgtattttcactatcgaattgtgatatcacattttgtatatatacacgaaatcattcaataatatatatgcacacatacattatctaagccattaatattgttcctccgatcacgtgggaatgccaccgcccatcacgtgccttccccaaccgtctgattttcttcacgagagaagaccaaaaagagcaacgcaaataattgtaaacaacaaaaatcataaagaagaaaactcatgcaaaaaccacatgaatgtaccatcgcaatttaataacaaccacatgcatcgtctttagagaagatgcataaaatcacagccgttgatcacgtacaaagtacgatcgtataggccgcggcgcaggagatcgaatgagccaagaaatatcaactgtgtattttgatcgaaaggcttggtcggtcgattcaatgttttgcaattattaaagtaaatcgagaaatccaaaatgaacgatagaagagatttgtcgagaagtcagaccaggcactgaattaactacaaaactattgactttatgaaagaaggatattaaaacatatgcaaaacaccaagtggaatgggacagtgactattaatgaagatgggatcttacctcaaacaccaaaacatgtcagtaaaattattgtttcccaccttataaattttcttttcttactttcacatttattatccatacacatgaatagtccgttgttcagaacaagattaagaaaatgaaaattgtccaaacacataattatatgatcttcttgtttctcttaccggttcaaaatacttatcatcttgtggttttttgttcatttgaaaagaaaagtaaacaatttgataatataattaccttttagtaatcaaaattagattattgttgcctggaagttgaagaaatgaagattaatgtcttgtataatttatattttgtttcagacctatatatacattgtcatgcaaggaatagctgaaagcagattttttttcttttgagaaaattactactcaaattatctgccaaaccgattaaaattacttaatttcaccatcggtttacttatttcaagctgtctgaagtaatttatcgttgttactctcattcttcctcgtcgatttcggagttttcctgattactttcaccctaaacgccgcctgacaaaaccaaaccggataattttcagaaaccaagaccggttattgtaaatgattcggttaaaagaaaaaccgagatttggtaggggtgatagatgtctctcaccttcttatctgaaccaaactcgatgatgtcggacgatctaaaccgcgcgggaaaattcggtgttgctctatatcttcttccttcgttactagaaaacattcaaatatcaaatcagaaacttcaaagactcagatataataacctggtcagagtatccatatagacttactcggtcacataggttccgtgttcgcttcgaagatccatcaagaagaaagctccgtctttgtaaatcacacgagcatgcatcttcgaaacctaaaccaaaacataattaagttcgttgactagttctctttaagtatctcaggtcacactatcagatacacagtttatatacctgagacgaagggatcacaatgcgcattccaggaaaatcttgatctggttcgcttctaaaatcaacagagttttcaaaagtttaaaactgtaagatctttaatacaaagtttctaagtttccattgactataaatctgagaggaattcagaatggtgagttgtttcatacccgacgatgcaaggttgatcttcatctttggttagacataatgtttccgaaacgcaacaatcgtcgccgtgtggaattagataccatctgcaaagaaattaagactcagactcagaccaaagcagtatagagagcaaggccgtttttttgttaggtaggtgaagaaatataatggaactaaatgtcgaattcagatttgtgagtacatactctccctttatagtacgttcaagagcatcgtcatcttcaaaccactctcgaagccggtcatcggccttgaaagaaatatttacattctcatattagtcatttagtgaagttttttgagtgagaaatagagaaagaaagaaacatactttgtcagtgagtctgcaactaggtggccttccttggagtttttcactgcaaaagcgtgtaaacgagttggctttacaggtctgtcaaatcaagttctctttagataaaactcacagatagaactaacctgttacctccaaggacccagtcaagcatcgatggcatagcaatgtcaacgaagaatctaccaccaactcttcctggatgtggtactctaaactttgtcaagaactgcagaaacaagatttggaattgagttagaaatgaacaaacaagaatgatttccatgtatagtgaaaaccataaagatactcacagacagaggaccaagcccaacacctaagtatgctttgtaagtggaagccataattgcagccatcctcgccattgcatggataatagcgactctcagtcttctagattcctcatatctaaaaccaattcaagagcatgtttagtatccaccagaagcccaaactaaacaaattgtgttttagttttaccttttcaaagaggaaacaacatcaacaggtgtagtcgtttcaacactctgtttccatgcttcatcaagctccaatgctagttgaaaactatcctgcaaaatacatcaagaaatttccctcaataacactttaaaatcagtcaaaaggttgagtggatttatatattagatagatacctcaatggccatgcatccaccttgacccatatttggctgcatcgcatggatagaatccccgagcagcgtaacacgccctttaccccaagtaaaaccaggacttctatcataaatatctcttctcagaatggcttcctcctcagtcgcatgcaacaagtcgagtacattgtcgcaccaaccgtcaaatatttcaaacaaccttttcttcatacctgaaaaatcaattagaaaagaagcttctgtgaactaatactaaatacgatccatagaaagaagtaaaacaatgcagaaatttaccatttggagcatcagccccaccagctggttcctcgtgaaatgcataccattgcatttttccaccaccaacatccgaagaaacaaagtactgtttgtgtcccaagaaaacccggtagctttaagagagaatgaaacagacccaatatcagaaaaagattcataatcagagaagatatgcatgagatttagactgactgcaacatacccaacagactcgatatccgctggtataaaatctgcaatccccgtgtaacaagtgtagcctgaataagtagcttcactacggccaaacaaattatttctcacctacaaacaaaaatcaaaaggcacaatctttcagttctatactcaacaacgaaagctgtttgttatactctattcagttaaaacctaccttagaccaaatgccatctgcacccacaagcagatcaccttcatagcgttgaccattctcgagtaccacagtaacctaaaccaacaaacccatacagctacattggattctttccttatatcaatagtctcttttaagtaaaaatcaatcatccatcaccttatctccagaatcttcaaaatcaacaacattactctcgtttctaatcacatcttctccaaccgcacgtgctagaatctgctgcagagtcattctactaattactctagtcacaggaagtccccgtgacgccgcaggagtgaaagtatcaaactttacatacctaattgattcacaaacaaaaatatcaccacaagtttccaataatctgattggctactcaatcaagagatctcagggaaactcaccaagtaccagagataccatcaacgagaccgttaatccgatcaccagtgatacacccagcttccataacttgttcagcaacttcaatatcaatagcttccaaagcagctaaagcgttgctctgtatttgaatcgggcctctgtattttccttctcctcttatagcactcaaatctttctcaaacactaacacatcgaatcctttcttcttagccgctaaagcaaacaccaatcctccgattccacctccggcaactaaaaccctcgatttcttcttcttctccgtcaccgcctctctcttctcctccttctcaactaacgccgtcgccgcctttactccgagcaaagctcgacggctcctaaacccagatactcctccgggttttccggaaaacgatgataaatctaagtaaaactgtttagaaacaggactaaacacatgggtcctcgtgaaatcaagctttgatggagatggattgatagagtagcaaaacggagttgaacccatctcgatttttctttcaccgacgagaagagcaaaaactccgtttagaattcttgatcaaagttcaagactttatctgttgtgatgcctcagactcaaacctgagagaagaagaagaagaaattggtttgaagaagaaggaggcaaatgatggaggaggaggagacaggtggcatcagcaacgcaacacacttcatctctgagtgcctacaaatatcgccttctgatgttgacatgtcttttctctcctccattagaaattcatttaataaactaatcaatatatttagaaatgtttggtaaaaatatttgaacgtgacgtgatcagcgcttgtggtggattttttttggattgtgagtggataaatcatcaattttcaatattgttttcttatccccattttaagccactaaattgatttttattttaacttttggttgacgtgtcacaacttttttctttaatatataaatcttaaatttaattgtgatatgtcgacgaaataaatctgttataatagtatttttcatcatcataaaatcaaatggtcttttataggtactaagctgcacattttattgggccaaaataacggctcatagaaaataacacaagcccattaagatgggcgtgaatggtgacggaagagtcaaatacgatgtggactaataatattgtgtcacctggttataacataaagagtagggatccagaaagtagtagttaacaaaagaacactcaacagtagtaagtagagagtagatgcataaagaccgtaaaacaaacccatagcctagaggctagagctcagagatgagaagggatccagtaaggaacatggttgagcattggtgcatgaggagggtaaaaggaatggaccgtaccagaggttagatcgtatgaaccaagaccatggccaatgtaatagatagagttaggtttaagccccgggtacatgcttgccgtgaggcagaacgcttcacttgcgccaaggaagatgcagagatctccaatatcttccgtgtaactaaagtctttgctcttctcatcttccctaaagaccatgaaccgcttggttttgctgtggagaccttccacttctccgtctttttcctctgtgtgaatgcattgtgcgtacctgcgcataaagagaagaaagcagctcaatctctactttgaatttatccaaaagtagctagcctcttaatagacaaacttaccagttgaccaagaaaagttcaccagagggagattccaccaagtgcttgctcatgaaacattgatccaacatctcccgacctgcgtcaggaatcttggggaggttggagaggcgcagtttttgatacttgagcttgttgttgttgctgttgagatgcagtgaacccatgtaaagacccttaacacttgtgaagtaga

SEQ ID NO: 977 - DNA, 74342 bp, Arabidopsis thaliana
aagctttgtctctcttggaaaacatgatattataggctggatatagaggtaacgaggtctcaatgtgagtccactttgagtcccaacaaggcttgcatacacttagatgacttccacagaactttgcagccacagtaaagtcttggaacatcagagaaaacttagagatgaaaaacttagagaaattgaacaaggtaatggtgaaatcagagaaaatgcatctttcttactctataactctctctctgtatatatagactttgtttgggaatttcaaactttccttttttcacgcattcgttgatgtttcctttttctaaaattctttttgtgtttgttatttcccctttttcacttagtttagacttacgaggaaactagagcaataatgagatggaatcaactaaggacagtcttgtagaagcacaggctcatgtttgctaaggatatatgatttgttagaagagatgaaatctgttgagaccgaacttaaaccagggactggtgcagcgatgacgagaaagaagcaatacaatggatgatttggaaacagagctctagaggctgagagacttgggactgaagcaaaggaatcgcttttggcttggaatggaaagagaagagaagatgagaagaattcacttcatgatgatgagaacaataggctttgcttgaagctacgctaaccggttggtatgaaaattactctcttcaacgccgtctcgtcttttctaggaacatcttcatacccattaatactcacaactctagaattcttctgcaaacacacaaagagatgcaaaaaaattcagatttcgcaatttccataagaataaattaaaaacagagtggctctgtttttgtgagtttaccaagaaagaattgcattttccgccagaaggtttcttgagactctaccaccagaaaccactttattgtataaacattttattcaataattacaaagataaacccttttatgttatggatacatctctatagacttggaaaacacaaggaagggttaatctagtggcattcacataatcttgaggtgtatgatttgaaacaccagggactataatccccaaagccctaccacccttcaacaaccatccttcactgtactccgagcccttctcagccactatagtgaagcttcttataaactccaatatagcactccacatcatctttataatccctcgcaacaagaaaaagttttcgtccgattgctctctcattacctataagtcacaaaaaatattggtcgtcagtttatattttcaagtgtgaatatatagatagatagatagatgtaaacctttgcttgatagttctggtcgtagtagatgcaagtgccaaagtgtttgaacatcaaatccttatcatcgtacggcaatcttggaacaatgtcgttattataaacaaatctataatactttatattatatttttctaatttcttctccataaattcaccaaacttggaatctccaaccctaggctgtccataagtatacaccccttgaatcctctccaacaactcggtctcgtggtgaatcacaagcacagccgtgaacaatatcgcgagggctcctcctaagctatgaccggtcagaacaaacttggtgtttttgttttgagcgatcagagttttcaaagagtctcttattgagtagtaagctaaaggggattttcgatcagggtttgagagaggttctttaggccaactacaattgttttgaagccctagagctttcatgaaaccaccatggatattcccaatgtttgggagctcaaaccatgtaatgtcgaaatctgaacaccaatcttcggaattaaacagttctgtgcctctaaatgcaaccaccaccgtcgtttcttgaccgttggatcttgttgttgtttcgtcagtagacattataaaggcttgtgttgtttccttttcttggtactctgttttcaaccacaaaaaaaaactttataaaaatatgattaaattgtaaataagattaaattactaagatttcttttattatataatcataccgttccaatagtcaacgagacctaaatacttcatattccagtgattctcgacgacatgtttaatacgggctgcgttttcgtaggcaatttttgaagccataatggacaatgcagcatagtatttctctccatcttcacgattcaacgtcatgtctaaacttaccctcgtgtctaaatgtccgataaatgactgataattctccgatgtccgttgcggcatcaccacttctcctgcatacatatccacaaaattagtattaattgtaaattgtaattgttattagagacgaataaacggaaaacatcaatacctcgaaggaagagaccggagaaagagttattggagaggaagtttaaagagaattctaaggcggagccaacgagagctaaaagcttggagaagaatcgaagaagcttgagaaggacgagagagacaaagataagccatcgatgtcggaaactgtgttcttcggtttccgagctatccactgatctcggtttctctatatctccggagaataacaaacgaacaagttcccatggccggagctcttccggtcggagaatcagatatcctctcggttcatcgtcatcgtcgctgttcatcatgttgattcgattttgtgttagtatagtactagaatattgtacgaatgcaattatttatgtacgtataactctatttataatgttagaatggaccgtattgtagatttggaatatacttggagttgtggaaaacgagatttgttttttttttgcaacagtgatctacacatttggttttggaatatgaatttttcacgtgggtttaatgttttggaaaattttaaaatttctgagagttttcatctctaacaaaaaaaaaaatccccaacggtaacctataatatagtgggcctatttgtgggctgacaatataggttatgtgcccattgaatagtgatctttcaacccaactttttcttttcccacaataaggccatgtgaattataccattttaaaaattatattttcaaattaacaatttgatcataatttaaataaaaatggtacaacatttatcaaaatgtataactaaacatatataattatgtaaacctataggactaaattaacaaaagacgttagtttgaacataatttttcttttctgatgatatatccgttgattaaaattctaacaactagatctgttgaatcattgatatttgtctgtttaccaagaaccaaaacaatgtatacatattatatatatatatatatactgatatgatcgtatatggatgcatattagtggtattgtacgtgatactttacaaattacaaatctataaacgaaaggaggaaatattctgatatccatatcatcgaaatgaaaacattatcttatattatggttttgtttttcatatgtcgtgtgaggtgcaccgggaaattataaatgagtacatttaacatagcacaagagactagatgcgagtagtcaaagaatgcaccaaaataccgaaaatcaacaaaacccaaaaagaatagaaagatcaataagatatatatataaaaaaagtatacaaaaaccaaaatagataaaattgggatctgcattcccaacaatacctacccattttaaaagcatactatattatattcaataaaatcaaaatctttatcatcccacctatttgcttgtccccattcttttccgaattctactacttttatcctttcaaattacataaaaatgagtacgtctacgttttcgttttaggacgtttctaccttctaagatatagattttgacttttttgcagaggaattttttttaaaacatataattggttcgattttgcagttaaattgtcctactattatatggtaaccttataatgccatcaaagttgactatctcgaatactatttgatcccatttttgattggcatggtttagtttacatgcatttggtatgaaattatataattagattacaataacaccaatgataacagagaagaatgcatgaactttatcctgtcacggagaacatgagaatttatccggaacaaaaaaaaaaaagagatagagaagaggaaggaggaaaaaggcattgaagaaaagataatacaagaaaggggaaaaatatcaaaatttcttcaatatttcaaagagaaaacaaaagaataaataaaaaaagaagaagacgatagaaatgtgtcagaagaatacagagcacttgcccaagaagatattataagaaaatgtctatataaatctaatcttaaggatattgtaatgatcagagactctctgtggtgatgttgggacctttgtgggatatctcacgtgggacgattttttattttcaataaccaaacaacaatgtaaaattctatggggtgaatattttatttgtttgctagattgtgcgaaaataattggactgattatttttttgataatttgatattgattcaatttgattattaatataaagtgggttgttagtggagcaacgagtatagatgatgcttgggacatgaacacgattgtattgctaccttgccttgggaggcagcctatctcagctttggtacattacacattattaaacaaataaacaattaaactatgctatttgtttccgatattcaaatttggatatatgcaaaaaggtttattcttaattatcgtttaacttagtatcaaacaacaattttttatacagtatatttctttttggtaattggatcacccaactaccaactaaatgtaataatcgcacgattttatttaactttttcttattaactagaatgtttgtatctactagaccttgcctctcaaagacatgcgatgtgctcatataagttgtattgatgttaccataactagttacaacgctatcatttaccaatcgaatctgtaaccatttgcatcgaatatcgttcaatatcagaattatcaacatacaatggactaagagacagcttggccactaccatgcaaaggttaaccaatcatattcatatattatagacatgtcgatgtatatatgtctgtggtccttctaacgttttttttttcttttttatttactcatcctttgttcccactgtgctgtcacatagattcttcacagatctttcgagagagaaaaaagagaacaacaaatcgaaggtcataataaagtcccaagactatatgaaacaaagttgtgaaaaatttccaattttgtaataatcgagatggacccgtatgttatcttctcgtttttgaatttcataagtttgtagactatacatttcccttgaatttaactaacttaaaaattataattacaaagtgcttccaattcgaaatgatgtgagttataaacttataatcagtaacacataacaacaatgtgaaaataagctacattgatacctataatattagtattaaatgtgacgataagtgaagacagttttcacaacagatgagtattaattgtagcgagtagggcaaaagtgaaaaagtggactaaaaccggtttcttgattgagagagtgagggcagtgaaacgtcaacgtttcgtgggatttagcatgttttggtgtcaacataggagggtaaaacaaagatcgaagcacttgctttgtctgcctgtttttatctaatcatggggaagaaccatctaaggagaaaatcagagttatatgtaaataaactagaaaacaaaaaccagtcttaaatgtgattttgtacaaataaagtgagacagatcttgaaagaacagtgagagcttgtggtgtcttttggattttgtgtatttttaaggtaagaatcatttattgtcatttgttttcaattaattaggatgctgcttcttgtttacggtacatttttaggttatgttccatcattatatttaaatattcaaacgattatctgatcacgaatcagatccatcttaaatgatactatatcatttattattatttttttacacgatactaatgcatactatttttgtatagcaatttgtaaatcagttataagaatgaaaaaatctccactttgttgggaatgatatcgggttgtcagatgcagcagatgatgattcttcagttttcgatttcaacataaaattctttggttaaaaaagcaatttacaagagagaaaaaaaggttgagaattttcataaaaactgaaagcaccttcgccagaaggaaagtcagtgggggtaagcaacaaaagtgtttaataaaatctactatatagaataatacataaaaacttccaaaaatgaataattcgaaatttaagatagtgagtaacaaaaaaacagtaaaataaaataaaaaaggaatgaagtcgttctcagatcggctttgagaagcgtgccatacgctaaggcttgatgtcaactgagatccaattaatcatcctgacttatttcttatctatctatatacgtttgttcctccaccatttgttatatatacacacacacacgcatgtattaatgtattaaccgttctcgttatgagtctgtgttaatttaaatctgaccagaaaattttacagaataaaatactgctccctggattctgacatatctcatgtggatgtggggtaatcttataaatcatagtcctctctctctcttattataatattttggttaagtaaccgtttttcttggattgaagaaaacactttcgttaattagtgcaacaaaaccagttgataatcttttactccagctattatatgaaacctaattgacctttttcacatacaaaagtgttgattatgaaatgaatacaataataatggtggaaaaaatggaatactcgttgttgtgcttgtgagacgaccggttcatgaaccttgctttgtcgcgtaacgcgttatgccttctttgcctttagtggatctgaacaccaatagatgtaagccacgtgtttacaacaaacatgatctggacggtcgataaatgcgataaaataaaccattggtcaattatcgacggtcatcatcgatactcattaatggaaccatttttcttacttcttttagtctttttttacttgtttttctttttggatccaagttatgttacgcaataattctacttatagtaactcctacgtgtacacactttttcatagcttctattcgcaaccgaacgaaaatattatggctttataaaaatgatttttcctaacattaatgtttgggaattttatcatcatacaagttcaaatatgaggaataaaatccacctcaatattttacttgccttggtatataataacctataatagttgatatatgatattacattggtaagttagtccgaatgaccgaatgcatgtggaatttgcacttagacaagaagacaaattttgaaattgaatatatacatatatgcccataaatgtgagagttgaaaatgggaagaaattcctttttattatatatgtgtagcataagttaaagaagatggatgggccacaagttgctatataaatccttccacttcttgttgtatactattgcttgagttctgattgggcacagtagtaccattgccatttctctcacacataccgtctctttctctcatcatcaatcatcaatcatccaaaagaaaaaaccctaaaatttcacttgtaagcttttcaccagtttctctccatacccattttatcagcttctccatatctttctctatggattctgacataatgaacatgatgatgcatcagatggagaagcttcctgagttttgtaaccctaattcctctttcttctctcccgaccacaacaacacttacccttttctctttaactccactcattaccagtccgatcactcaatgaccaacgaaccaggtttccgctacggttccggtttactcactaacccttcttctatctctcccaacacagcttactcttccgtttttcttgacaaaagaaacaacagtaacaacaacaataatggcacgaacatggcagctatgcgagagatgatcttccgtatcgccgtgatgcaaccgatccatatcgatcccgaggcggttaagccaccgaagaggaggaacgtcaggatctctaaagatcctcaaagcgtggcggctaggcatagaagggagagaataagcgagaggattcggattttgcaacggcttgttcctggtgggacgaagatggatacagcttcgatgctcgatgaagcaattcattatgtgaagtttttaaagaaacaggtgcagtctctggaggagcaggcggtggttactggcggagggggaggaggaggaggaagggttttgatcggtggaggtggaatgacggcggcgagtggtggtggtggcggcgggggagtggttatgaaagggtgtggaacagtggggactcatcagatggtgggcaatgcacagattcttagatgatgatgatttttaattttattattattatattaatgttggagaaaaagagaaaaatgattctggagagggaagccaagtaatttatgtgagagtctttaatttaactttattttcttgtttagataatgtgtaatgatggtttttaaagccaaagactctccatggttgttggagcgagtttgtaaattaggaactattatcattgtatccttgttaatcaaataattaaagcagtattatgctttcagctatcaggcttgtgttcattttttatttgtctaaaaactaaatgctgttttcaacatgcaaatatctatacttttttcttaaattaaaaattaaaatttcaaaatttgagtttatactcttatacttgtatacagatttgagaatatgactaaccaaaaagtccacgattatttattttcaattgttaatgtctaatctgatggatttgaggaagaaattaacatcttcattaaatgatcagtaatttcaaagcattaaacaataaaaattatttttcacttaaaacaaaatcttacaagaaatttggtctatagaataatttcattaagatgctattaaatattcaactgggcctttgcttttgtgtaacagtctcaggattggtctttttctcattgtttacacaattagtagtcttttatgttatcagctatattattcaggacccaaaaacaactggacccatccgaatctttttaaaaacacaacctagctatcacaaaggctgttttgatgaagcccaaaaagacctactcgtataccaaaaaaaaccaacgaaagcctggcccattaatctctcatcaaatcaggccaacaatccaagggctcacaaccaatcatttccacttctcttatcctacaccgtgtcccaccagatcactcatcgtcacactaacacactcaccaaaaaaaaaactcaaaagcacaaagctcgaggaggtccataaatggcgcatttaattagaacccccaaaatctcttcacaactgtaaaaccccaatcacctctttacatgtgacttccttattactctcttcttcttattttcctcctcttcttcttcgctctagtttcccccaacaatcgccatggcagcttcgtctctcaatctcctcctcattctctctcttctcactttcatttctctccagagatctgaatctctttccgataatccatctctcactcttctacccgacggattcgactggccgatctctcactccgatgaattcgatatcatcgacggtgaagaaagcttcgaagttacggaggaagacgacggcgtaacagatcgacggtcattgtactggcggaggacgaagtattacatatcgtacggtgcattgtcggcgaatagagtgccatgtcctcccagatctggaagatcgtactacactcataactgcttcagagctagaggtcccgttcatccgtatagccgaggctgctcgtcgatcactcgatgccggagatagatgaagaaagcttaaaactccatgggcattttcgtaattttgccaaccatggtttattattatgatgtttgtatttgtaatgttcgatgtttgtttgtaaaccgtgattagttacgttcgttaaacggtaaacccggtgattataatttcgagttcttgctatataaatggttaagtactaaagagtcgtgaggggtggattggtaattttagggatcgttgtgggttttttgtcggtggcttttaaattatttgtttgtactgtttatgaatttaaatccgggtcacatgtctttggacttatttgaatatcaccatgttccaatttcaccatccatctaaatatggttcgaccgttgttttgatttgttattgggcttttgttatcattgcatcgctgttgttggtgggctgttactttggcccaattgaggaattgtggtctaggtaatgtataaacaaagtttatgagaatctgaattcacgaatcgaaaaagtgcatatggtaagaagacaacaaacagcaattcatgagttagagattgtctttgtaacaaagcaaaacaatacatgggttatttgccttaatattcatatgctaaatagaatgttacgtttcatgcattgtaagcttcaatgttaaatcataatcgaaagttctcaaacacgttgtagtcgagaaatggtctcgtctgatgaggatatgatgtggactgtggaggcgttattgcaggaaaaaagtcatacacatatgtcaacacttagttctaccacgtaataataaacagaagaaaatcgttttcatgcttccagatacttaagttttgcaacctaaaaaaacatgatgtgtataccataaaacatgcacgtgttaaaaaagctcatgatcttatcttgaatagtccagagacggctctttgccttttctctccaaatttcaaacatggaagacaaattttaaacgacttgtatttggtatgttttaggatgacctttgacccacctcgatagttcaaattataagaaacatgtttaaattgaaatgcatgaacttgtgtttggcggctgattatgcgtttggtttagagatgaccaaaatttgaatttaataaaagactaatcgtccttgtcctaaaagatactatatatattttagtttgacttttagtatatacgtagaaacaaaaaattaaagattatgcaatgataaagggtgtgatatgacgttgccctctccctccctaattcaaaggggtcaatctaaattccatattacaaggaatattccaaaacttttgattgtggatatcatcgaatgacccttattgactgacctacaaggttaattccacttgggcgtcgaagttgaatttgaacgtggaataaaccaactgttttgatccagttttaaaatagagtcgtgtgtgaccccaaccgatatatactgttttattttgtatcttctattatactacatacttccactatagtagaagtctagaagataaagttaatttcgtggtaccacaccatatatataaaagacctagaatttgacgttatcttcgtgtaggaagatgcctcgcaaactactgtataatgtttaagaattcacataaaattaagtagttgctaagagggctgataaaaccaaaaaaaataaatatatattggtggaaatctccaagaaataaactgtgggctgccagaaatttatttcccaatttacaataataatagtataataagctacaaaaaaaataggatagcattcgcaagtcgcctgctctttttcctcggattcagtgaatcatccaagtcgcctggacggtgttggttcatcatatccatttaacattcacatttctctgcgtttccaatagtatatatacacaaaaataaaaatcatttaagttacattgataaagattctttatttaatagctaaagcaagttgtagtagacatgctcgtagagatcgcaactccacccaatctaatggctagggatcacgtccatgtgacgccttcttacaatattcaaacaaacaaaaaattgtgaaaacgaaaaaataatagtggtctatgattggttcatatggttttcccacttattctcaaaagtttaatttctcgattctaaataaatgaagcatgtgatggtaacggtgttactgcttacaaatttaatttacaaaacaaccttccctttcttccttcaacttgtcttcgtctcgatatttgttaggctccgttacaacgtcaattatctttctttttcttattacacaaatatcacagagaatacagtaattatattttgaatatagtataaattgtttacgtactgaaatagaataaaaatcagagccgccgcaacttgcgaaagtctgttggggtcgaatgacttcagtgcgaagcaccccttccactcccgcgcttttcttggccattttaaaaatgaaaatatcaaactcaatatcaatttaaaaaatttaaaatttaaaatttaaattgatttaatgaagtcatgcccatagggatccagacttgagcaggcaagttggccatgaagtaaactacataagagcactataataatagatatatgtgataaatcaaataagaaaaatgattggagagttgtctgataaagttctcttttattttctccttttcttttgttgaagcatcgaaaacagttgcgtctattgggaaatggtaaatttataacattaaagtaaaacttagagctcacatgccaaagtttgtgtactaaatttctgttgtatacaaaatgttataatcaatagtcgtaagcaaacatctaaatagagtctaaactgtatttttcaactactttctaaattaactttgtttacttagttctattggttagagttgtgattttatcggacatagttgtaagcttataacacacatatctttaattagtcgtattattcgaaagcatattagttttctgcttatcgcagttggtgccctaataagaggtcgctaattagtttactttagagctaactattctaattagtaaacgataattgtggaggataacggcggaaaatatcaaaaaataaaaaaatatattaaagcgtttacaacggagaaggatttgattcttgggttggtcaagaaaaaaaaaaattgcaactccaacttgcttggtatggttttatattattaatggtccaaagaatatccacatatctacttcattattaaaaaaaataaaactaatactgatctccataaaataatgtaagaaacatgttatgtgtatatattatgagttcaggacgtaattagagaattactaatagtgtgattataattagggacagctacgaaggggtggcatatgcgagaggatgattctattccatgcctattcacacgacatatgcgaaggaagagagtccagagcataggccaagaaaagaatattatctctatacaatctaagttatattttgttgttaattacagctacaatcggaaatatatgaataccaaaaaattacggtaaacttcatgtatacacatgcatatgttatagtgtttgtttctaatagtgattgtttcattgcaatctttttttgttacttaaaaaaatctacagtacgttttcaagtattttgaataaatcatatcacgcttgttttgaaacataaatgagttacataattaaacttgattcaacgcaaattcaatagaaactgactactcttagcaacaatataacgatcatgatctcattgaatatcaagcatgttactaattttactaccggtcaaaaattaatatatacctcgtaagtgataatattaaagttatttatacaaaacaatagtcgtgctacaatatttatttatccaatataataacgaaaatatcacgtagcttaaaatttcattttggtttaacagctcaacaaagaaaaacctcctctcgtcacgtgcattaattactcccaaaattcagtctttctacatttaattatattattttaaaaaataaaaatcgtaacctcattttttttgtttaataataccaaaaaaaatcagtataaattgaggaactcgcaccattaaccgtcacaagctttcatgctctgtttcatgttttctctctacacgcttaaatattcaatcttttaatcaaatctgattcaaccgtgtcgtagatttgcttcaatggagtggattcgaggagaaactatcggatacggaactttttctacagtaagtctagcgacgcggtctaataacgattccggcgagtttcctccgttaatggctgtgaaatctgcagactcatacggcgctgcttctctggcaaacgagaaatcagttctagataatctcggagacgattgcaacgagatcgtacggtgtttcggcgaggatcggacggtcgaaaacggtgaagagatgcataatttgttcttggaatacgcttctagaggaagcttagagagttatcttaagaaattagccggtgaaggtgtaccggaatccaccgtgcgtcgccacacaggatcggtgcttagaggtctacgacacatccacgctaacggattcgctcactgtgatttaaaactcgggaatattctgttgttcggtgacggcgccgttaagattgcggattttggattggcgaagagaattggggatttaacggcgttaaattacggtgtgcagattagaggtacgccgttgtacatggcgccggaatctgttaacgataacgagtacggatcagaaggtgacgtgtgggctttaggatgcgtagtagttgagatgtttagtggtaaaacggcatggagtttaaaagaagggtcgaacttcatgtcgttgttgttacgcatcggtgttggtgacgaggttccgatgattcccgaggagttgtcggaacaaggaagagattttttgtcaaagtgtttcgttaaagatcccaaaaagagatggacggctgagatgcttctaaaccatccatttgtaaccgtcgatgttgatcacgacgttttagtcaaagaagaagatttcgttgttaatatgaaaacagaggacgtctcgacatcgccgagatgcccattcgaatttcccgattgggtttcggtttcttccggttcacaaacgatcgattcgccggatgagagagttgctagtttggtgactgatatgatccctgattggtctgttaccaatagctgggtcaccgtacggtgacgatagtgattaaaaaacaggggacaaaaacagagttgcagagaaagactagagcttttttttaattcctagtcagatccaacaattctaatttaattcgttgtataaatatttcttattagaaattgactatttatttatatgtaaataccagttttgtattcatgatctcaaatcttgattctctttagtactatatggaaattgtattcatgactcatgagcccattatctcgattatctttctccatgaatgtgaataaagatcgtatattcagacataatcacacggaataagagaataagtttaaccaaagaagaaaaaaaacaaatcttttgcaaagtaaagatcaagactcttggacaaggctcgtggccaccacagaacagctcacttcaaactcagcttcatcttcatcaacccaactcaccaatccataaaccacgttctcttgtaaccctcttggactctccaatctcacagtgtagcttagcttctcgtttttctcgctgaacattagtttctttggctctacgacgacgtttagacccttcaagcctctcactctcacgatgtagcttctctttgcttctcccacgtttgtcaatgtcctcttaaagatcttgggactgctttgatcagacgtgaagtaggcaatgattgaagggtaattgagatatggagatggctttttacaagcgtcggagatattcgatctcgtgatgatattgatcaattttcttgattgttttgcctcgtgacaaaggaagtttatgaaatcttgtggagttgtatcatagattaggccagggtttaagactttgttcgtactcacatgccctgctccaacggctaatgggttgtctaaagtcaaagccgttgtcataattgcagattttatagccgatggactccaatttggatggacttgctttataagcgcagcgactccagctacatgaggtgcagccattgatgtcccggttaagagattgaatccgctgaataacggtagtgctcgagttccggtgatttgctcaaccgacggccaagcagagagtataagtgtcccaggagctagaatgtctggtttcaggatttgagggaagcttgtgaatggaccccttgagctgtatgtgccaacttctggcgctggttttgtcccgattaccgttttacgaaactccagctttgcggtcgcgttgtttttgttgcttgatgcgtagctttcaatagtttctcggtgttttgagccgatgaatgctactggaaactggaattttattgtgtcttgctcctcaagtaacttatctgttattaaaactactgctgcagctccggtggatctgatttgatgaagtttgctaccgatgtttatgttttcgttacagacaacaattctgtttgcgagagtcttgttttcaacgctgccagattcgatgtaagttactggaaactgaaccgaagggaactctccaggaaacagagatggaaaactgaaactaactctgtttccaaacgttagggttccttgaaattgcctaccaattgttcccgctccaaccgtcataatccacggcgctccgttaatcaaactccagtaatatggcccgtcgttaccgccggaagtaaccacgaaaacgcctttttgaatcgctgcaaaagatgcgactgcgattggatcattttctagaccgaaaccatcattgtcgtcatcatcctcaaaactcaatcctagcgacagagatatcacatggactccatctcgaatcgcttgatcaatcgctgcgattacatctgatgagtaaatcccttcttcccacgcggctttgtagattgctagatgcgcgtgtggtgcgattcctgaggcggttccttgggcgtaagagaagtaagacgcgttcttaacatgattcccagctgcaatggctgcaacatgagtgccgtgtccgattgtatcgtacggtgaagagtattggccaatcttggtttctctcaaatcagggttgttggcgaacaaacccttgttgaataccttagcaccgattagtttcttgttgcacaaggaagaagaattgaattcacatgctcctttccatttagacggaaccgaaccaaccccatcgtcgtgaaagctgggactatcgggccaaattccggtatctataataccgattactataccagctccataattcgagaccggccatgtaccggatgtcgaatttaaaccgataaactttggagagaaagtggtatgaagcttaaccggtaaatctttggtgaacgagacatacccgggtttgtgtttaagacgttggagctcagagttggtgagaaccgcgctaaacccgtgaaccgaatcggtataagcgtagataatctttggttttctattggttataactgaagtaagagttgtggaaaaccagctccgatgatcggaaaatggcaacggtttagcggataagtccatgtggatgatgtaaggagaggtctccgccgttacaatcgctacgaaaaatgagaacaccagaataattacgacggtcatccccatgtctgagcaagtttttttctctggtctcttcaaagtgaaatgaattttggtgttagtaagaaacaattatagtgttgttgttaatagatgtttagtttttattatgacaaaaaagttgcagagaatgtaacctttacttggcttttgcttttgttaaagtggttttaggtggtcggcaacacatcatctctcatcattgtttttttttcttttctctttcaattgggctttatcatagagaacaatgattttggatatgaacttattagtagtttcagcaatagtttagactttcgaatcggtaaatatcagtaacttagaactcaggctgaaactttgattcttttactgtatttagctagattctacacttggtggactccatcagcaattacttcacagaccgaggtagctcctacaactctctgatgcttgatctcgttcaaatagatgtctcataattgcttcttttttgtttttgtttttgggctttattaaagaggagtaaggcccattaagagaacccgtttgtttgttggattcggatttggcaaatggatagcgccaaaatcgtgtcgattttcccgccatctccatttcttaatctgggttcttaaacctaaatcagttactcagcttcaccaaaccaccaaattgaccggatttgtaaaaatgtccggcgataattcaacggaaactggacgaagacgtagccgaggcgcggaggcgtcgagtaggaaagacacactcgagcgtctgaaggcgattcgacaaggaggaatccgttctgcgtcaggtggtgggtacgatattaggctgcagaagccaatcttcgataccgttgatgacgaagagtacgacgcacttgtttcccggcggcgcgaggaggctcgcgggtttgtagttgaagatggggaaggtggcgatttgggatatctcgacgaaggtgaggaggaggattggtcgaagccaagtggaccagaatcgactgatgaatcagacgacggtggtaggtttagtgggagacttaagaagaagaagaaagggaaagagcaaacgcagcaacctcaggttaagaaggtgaatccggcgttaaaagctgcggctactatcactggtgaaggtagactttcgtctatgttcacatcttcgagtttcaagaaagttaaggagactgataaggcacagtatgagggtattcttgacgagataatagctcaggttactccagatgagtcggatagaaaaaagcatacgaggagaaaactaccaggtactgttccagttaccatcttcaagaataaaaaactgttttctgttgcctcgagtatgggaatgaaagagtctgaaccaacaccttcaacttatgagggtgattctgtttccatggataatgaattgatgaaagaggaagatatgaaagaatctgaagtcattccttctgagactatggaattacttggaagtgatattgtcaaagaggatggatcaaacaagataaggaaaactgaagtgaagagtgagttaggtgtcaaggaggtatttacattgaatgcaacgattgatatgaaagagaaggattcggctttaagtgccactgctggttggaaggaagcgatgggaaaagttggaactgagaatggggctttgcttggttctagttctgaagggaaaacggaatttgatttggatgctgacggatcacttcgtttcttcattcttgacgcttatgaggaggcttttggtgcgagcatgggcacaatatatctgtttgggaaggtgaatctctagatttttcattcatttttaaagttgttcttttggccttaatctagagaatgaattcggtctctctttttttaacaattcaggttaaaatgggagatacttacaagagttgctgtgtggtagttaagaatatccagaggtgtgtttatgctattccaaatgattccatatttccttcccatgaactaatcatgctcgagcaagaggtgaaagactctcgactttctcctgaatccttccgtgggaaattgcatgtgagtttgactacctttgttacatgctaagaggaagcaatctattttcctctgttgttcattgtttttggctgtgtcttctcaggaaatggcatcaaaactgaaaaacgaaattgctcaggaattgttacagctcaatgtttcaaattttagcatggcgcctgtcaaggtttggatatttgacttctttttcatgtattctagcagcaatacttttcttttgactctctattctgctctttatgtacgaatatcagagaaactatgcttttgagaggcctgatgtgcctgctggcgaacaatatgttttgaagataaattattcatttaaggtacatttcagctgttcaaaataaaactaaaaatcgtctgttttcttacatctcaacaatatgacaagtttcctcttttataacaggatcgtccacttccagaagatcttaaaggcgagtctttctccgctttgctcgggtctcataccaggttctagcttcttactgctgagtttcattacctttccatgtgtttggtagttggtttgttaagtttgtattttctggtcttctgtaagcttcttagttaactatgtatgctggctatgtcaatttagcacggtgcaattttttcatccttatcaaagttaattcatatgcagtgctttggagcattttatccttaagaggaagatcatgggaccttgttggctcaaaatttcaagcttctctacttgctctccttcggaaggagtaagaccttaaatctgtgccataatcatataatcagtgatttttctagttctgtttatctccgctaatgagaggacttgccacttgtgcaggtgagttggtgcaagtttgaggttactgttcaatctcccaaggatatcactattttagtttcagaggaaaaggtggttcaccctcctgctgttgttacagccataaatttaaagactatagtcaatgaaaagcagaacataagcgaaattgtttctgcatctgttctctgctttcacaacgccaaggtttgttctacaacatttaaccaatgcttcttagccttttttgttgttgttgttgttgtctttgtgaagaatacggatgtatgatcatggcattaccaatcaccagtaggttttcgtaccatgtggttttatattaacgctcattttggacgattgtttcttgctcaaaagacactctttctgtctacattagtagcttgacatatgatgtgcgtgctccttgatctttcagattgatgttccaatgccagctccagaaagaaagagatctggtattctgagtcatttcactgttgttaggaatcctgaaggaaccggttacccaattggttggaaaaaagaagtgtctgacagaaattcaaagaacggctgcaatgtattaagtattgaaaacaggtgtgttgcagctctgttactgaataggctgtgtttgtgatccttcacatatatctttggcaattcatgttggcttcgtccaatattttgttccttttcttactgcagtgaaagagcattgctgaaccgattgtttttggagttaaacaaattggacagtgatattcttgtgggacataatatttcaggttttgatctggatgttcttcttcaaagggcccaggtaaagcaaaatctctttttaccattaagaaaaatggttgtgtctttcattttattttattttcttatctttctatgatatgcttcatattagttttgtaagatcttgtctttccaggcctattagatgatatttaacgtaataagccagcaagtttttatttcatgcattgtacatcattagtcccttttccagtctctcctgttgtgatgatcatgtaatagagatatatacatgtctgtcttgttctttaaactgaatgattactattgtgcaggcttgcaaagttcagagtagcatgtggtccaaaattggccgactcaaacgctcttttatgcctaagcttaaaggaaacagtaattatgggtcaggagctacaccagggctcatgtcttgtattgctggaaggctcttgtgtgatacagatctgtgttctcgtgacttgttgaaggaggtatgatacccttgcaggtcttgtaagcagtaagttgaagctcagtccctcatgtataagcatctgtttcttgcaggtcagttattctttaacggacctctcaaagacacagctgaaccgggacaggaaagagatagcgcctaatgatattcccaaaatgtttcagtcatccaaaacacttgtggaacttgtaagttcttcgatgagcccggtcatgtctgttttatgtatgagttggtactaccacattagggacgataggttatgaatccttgcatgcgaaacaatttagtgcaaactattgaagaataaataatccagtcatacatagaagtaaagggattgcagataacagcagtcacttaaggttgatgagtgatgactgcatcttaattgctcgcttgttataaccctttgattttcttttctttcagattgaatgtggtgagacggatgcatggttatccatggagctcatgtttcatctaagtgttcttcctctcactctccagcttactaacataagtggcaatctttgggggaaaacacttcaagtaatgactctccctctccctcccatccgggaaaatatgtgttactgtgctgactcatgcattttttgttcatgaccagggagccagggcacagagaatcgaatactacttactacatacattccactcgaaaaagttcattctccctgacaaaatttcacaacgtatgaaggaaataaagtcatcaaaaagaagaatggattatgctccagaagaccgcaatgtagatgaattggatgctgacctgactttggagaatgatccgtctaagggcagcaaaacaaaaaaaggtccagcctacgctggtggactggtcttggagccaaagagaggcttatatgacaaatatgtcttgcttctggatttcaatagtctttacccttctattatacaggttagcagattgtttctatttctcaagcctttggtggatgtttccgcctgcttggtagttaacagtcatgatattttcaggaatacaatatctgttttacgactataccacgatcagaagatggagttcctcgtttaccttcgagtcagacacctggaattcttccaaaggtatagtcatcattacacgagtttgcattttactgtgactattttcaattccgtatatattttctatatgttataggttatccaacgtcaaatctataaattaccccaacccaatcagaaattaattgaaagaaaaattcaacaaccaaaatattttgcctcattttcttttcctaacctctcaagggatatgcgagaaatcctcagaacaatgcgacctagctggtcagtattgtattggtgactgctgctttctgtagtttaagtaaacctaattctgacataatcgtctaaattattgctatatacatttttttttcctcgactttaagtttctctccttgatctggtatgcccatgaatcccactatatgtctttgttttagttgatggaacatttggtcagtataaggaaaagcgtcaaattaaagatgaagaaggaaacaggtctcaagtactgggagcttgacattcgacagcaggcattgaagctcacagccaataggtttgcattttatggttttacttgtgcggcaataattgccaatcaccgcaatttgatgtttatgtttttttattcattctaaacacagtatgtatggctgtctggggttttctaattcaagattctatgctaagcctttagcagagctcataacactacaggtaagtgatgctttctgtgttttctagtgacatgttttttctttttttctctatttttgcgtgatcaggctgattggcttaacattgcagggaagggatatcctgcaaagaaccgtggatcttgtccagaaccatttaaatctagaggtaactcttatacttggagtctcaggaaatgcatttcagtagagaaattagtgaactgtgtaaacaactctgttctatcaagtctagaattaaaatcttgcttttacgtaggtaatatacggtgacacagattcaatcatgattcacagcggactagatgatattgaagaggtgaaagccattaaatcaaaagtcatccaagaggtaggttggatactagatttatctctatatagctttccttggggaaagtgcttctctaagaagattataaaaaatttatacaagaaaaatcagacatttgattttgggccttcccctttcaatttttaggtcaataagaagtatagatgtctaaaaattgactgtgatggcatatacaagagaatgcttcttcttcgaaaaaagaagtatgctgctgtcaagttgcagtttaaggatgggaagccttgcgaggtaattgtttttttgtaaacatttttgcataccctttcttgcagaaaattatgggtactagatgcattctcaatgcaggacattgaaagaaaaggtgtggatatggttcgtcgagattggagcttactctcgaaggaaataggagatttatgcctgagtaaaatcttgtatggagggtatgttttgaaacatcaactaaagaacattgtttttactctctcatgcaagcacaacaagtctcttcttctgtgcagatcctgtgaggatgttgttgaagcaattcataacgaactaatgaaggtaatctttgttatgatttattaatctttgctaattagtttgatcgtctttatcatccaacacatgttgctttgtccatgtaacagataaaagaggaaatgagaaatgggcaagttgctcttgagaagtatgtcatcaccaagacattgactaaaccgcctgcagcttatccagattccaaaagccaaccacacgttcaagtgagtatgagagctattattctcgttatttctcccttattatatgctttctatatattcacttaacttaactctctgattgtgtggctaaatttttcttctcaggttgcactcagaatgaggcaacgtggttataaagaaggtttcaatgctaaggatactgtaccgtatataatctgctatgagcaggttcccaaaacagaagaccagctaaatattataagataccctttagttttttctactaaatattttatgcctcctctgtgcagggtaatgctagctctgctagttcagcaggaattgccgaacgtgctaggcatcctgatgaggtgaaatcagaaggcagcagatggttggttgacatagattactacttagcacaacagattcatccggtggtgtctcgtctatgcgcagagattcaaggaacaagtcctgaacgtctagctgaatgtttaggacttgacccatcaaaggtaaaacagctttcactccagcaaatttccgattcatattcagtgatcatgaattcatgataactgatgtggaaataatgttttattctagtaccgaagcaaatcaaacgatgctacaagcagtgatccctctacctccctcttattcgcaacaagcgatgaagaaaggtattgatatctttcccatttgtaatttgctatcatatatttgcttcacggatttgcaatattcctcaaacttaagatccgcaacaacgtaatttacatggaaaaatgcagatataaaagttgcgagcctttagcattaacatgccccagctgctctactgctttcaactgtccatctattattagttctgtttgtgcgtcaatcagtaagaaacctgcaacacctgaaacagaggaatctgattccacattctggcttaaactgcattgcccgaaatgtcagcaggaagatagcacgggaataatatcccctgcaatgatagctaaccaggtaggcaaattttgttgaaaaggatcctaatttgttaagtttctcagaataaaaaatatgtatccttgtgatttggcctgcaggacaaatgcttcagttattaactcattatcatgcctttcaggtaaaaagacagatcgatggatttgtgtcaatgtactacaaaggcataatggtggtatgtaaaaccttctcgccttgttttttcctcatagttctgaacatttgtgatttgtccttcttaatttatgctaagacgttttcttgtacattttgccttcaacagtgtgaagacgagtcatgcaagcacacaacccgctcccccaactttcgtctactcggtgaacgtgaacgggggacagtttgcccaaactatcctaactgtaacggaaccctcttacgaaaggtatataccatcatcaaccttataactcctatctctctattgcttcacagactaactcttgactttacagtacactgaagcagacttgtacaagcaactgtcatacttctgccacatcttagacacacaatgctctttagaaaaggtttctactttacaaccttgttatattattaatatcaatttgtcttgtctatatccctaaagttatcggtaccatttgaaataacagatggatgttggcgtgagaattcaagtagagaaagcaatgacgaagataagacctgcggttaagtcagcagcagcaatcactcgaagtagtagagaccggtgtgcttatggatggatgcaactcacagacatagtcatttgatagttgtaataatcatctcatatgtaagtaaattagtcttttatatataatctgcttcagacatcattataatcaaactactcagattttgttcactcctaaagcttattagcataactataactgaacatagaaatctggccaatgctaaaactcaaaacattgttcactcctgtctggcaggtactagaggaattccgatcatcatcattgtctgaatgttatcttcaaagcagagtggctgtggaaaagcacattccttgacttgttttagctggttccagcgagtgaggagcagcgagaagagtctctaggttcaggtcttgctctaaggtctcattgatccttgtatgagttggaggtggaacctgtggtaatcgcatagggtttaagcctaaaccattcataacggctaaagtctgcatcatgcagtaaatcaagttaatgatctgagtgatgtaatttacaaatcagactttgaacgtatataatcatagtaagtaggaaaaaaacctggacttgaagttgaagctgcttcagatattctatagcttcatcaagcattgaggctttatcagtctataaacaaacaaaagataacggatcaatcagaacaatgtttctcactatctctgattcgaacaaagattgattaaccttgttggaattgggaatgagtttctgcaaagctttcattttctcgttgatcttgctcctcctcttctgctaacactcagattctaatcaactacaatctcaaggttcttcttctttctaaattaagaatcttaaaaggaagataaaagagaaaaccttttcagacaagttgtggaattgagcatcaatgtttctcttcaacgaatttctctgtttagctccacttctctttagtgtttagccattccaaaaagaaaagagactaattttggtttttgttttcttttacaaggaaagccaagtgaagcatctctgcagctaagaatagttaagtttataccttgtgttcgaaagcatatttgtcttggccagtttcagagactccataaccgacggaagaaacagctccgccggaaacggaagggaagaaggtctcagcggaggaaacattagtactcttcggtggtgaagaaggttgagctgtaggagtacgggaaagaatctgtcggagaaagctcgagagttcgtcggaagaagatggagggggaagacgatcaccgacgtcagaatcacccatctctctctctctctctctctctgctctactctgtgtgtaaaaattatcactgtggctttttcgtagtaaagcttataggcgggggaggtaggacgcgtgagatcacgttcttcagagaagcgcgtggaggttctaaaagaggcgagtggcgtgtcgaatccctatagacagaatctggtgtctcacatcactctgtgtgtgaacagtttccttttgtagcaattttatttaataatattatattttttacctaataaaaaaaaggaaaaaagcatttttggaccaccaagtaaataaaaaacatacatttttattgtttttttcaatgtgataagttaaattgagaggaggggatgaaattatgaaaatcagtaaatgaaacggttgaaaaaataagagtattgataagatagagcattgatagactatttaattattattatgactaaacatgaaaatggacaattacttgaaaagtaaggtctcgcaacagtttcaccatttttgacaaattacaaaaatctattttttccttcttttttgttgttgttgttgtccacagataaagtgtgaataaaactgcatgcatttcgaaagattatttattcgagagattatttaacacaaaataaaattcagatattataatggtcaatacaaagacgataacatgtccttgatcattagcctttttttaatgcatccaaagggaaatatatataatatagtaattaaaataattatggttcatagcaaaaataagaataactagattttaacccgcggtataccgcgaaaacaatttattttttaaattaatatatataaaagtttgtaaattgtatctatctataaaatatttttattgtatagtttacaattgttattaagtaacgtcctgccaaacccgtcccgccaacccgtcctctaaaaaaactcatttattttatgaatgtgatcttatttatgatatgtttatgaattattgtctaaatattttgtaattttgtagtaattaaatgttatcaaatatctctacggtttgatgattataatcatgcagaaaagcaatatcaaaaatgataattttgtagtaattaaatgatattaaatattttagaagttttattttagtaattaatcgtgtagttaaggtagagagattttggaaagattgttaaatgtcaaatatttaattagaagattttctttctaattatcaaaaacaattattaaatgccaatgacagccgctgtaaataaatcccaactccagaatttatttcacaaagtggctgcaaaaatatatatatagatgataataatcaaaatcagaaatcaaatcaaaatccaacttgccatctaaataaatggaatctttctaacttgataaaaagggaaatattggtaattatggttcatagcaaaagaaagaaacaaaaaaactgaaatccaacgagataaacggaatctttcaaacttgataaaacatttaaacgacttctcggttgcaaagaggacacttgttcgtgaccattagccaattcttgatgcatccgaagtgaaagtcatgcccacatcccagtttcgaaacttcttcattgtccttcaatttctgctgacagatcacacatctcttcgtttcatcgtcgctacgcttttcatatttccttcttattagattctcatcaatcacttcctcgcttaaaccagtgcgttcatctcctgtttcgtcagtgatgctcaataattcctagaaaaaaaaagattcattcataaaattatcgatatctaaactctgcagcttatacaactctagaatcaagaaaccaaaatggtacatataatttttattaaagagagtcctaatctcttctacatctaggattcaaatgcacttctttgaaaactacacatgcaaccgactagttaaccaatactggaagcattaaattttcaatgttatcttgcaaaaaactctaaagtgctaacttctaagatacaatgttcataacaaatgaaaaaatggtgaaggctttcaaatgtgatgtaaacactttagtagtttttgaagatatttgcatatcaaaacttaatctagtctagttataacatatataatatacctcgtaagtgaagatgtctccatgagaagatggatttgtatactcttctagtgactctgtttcaaattgttcatttgtcgatgactgtaaccagtttctccaatactgctccaacgtttcttcctatacaatttcaatgtctatattataatatccaaaagcattagatattagataattacccaactaagtgatattaatgttttccatgtaaaaccgaaaaattttaaaccaaacaaaatacatgaaaatgattattttaagttcactaaatatcatagaaaatttaaacctttctttgttttttaaatggcaattgtttttttttagtcttatttccacaaatattgtttcataaactctaaatatacttgaatgctaagagatttgcatatcgaaacttaatctagtctatatatttattatatacctcgtaaatgaaggtgcctccatgagaagatgcatttgtatactcttcttgtgatcctgtttcagattgttcattggtcgatgactgtaaccagtttctccagtaacgctccaacgtttcttcctatataatttcaatgtctagattatatctaaaagctttataccttttaaagaaaaatattagataatagataattaattactcaattaagtgacattcaatgttttcccacgcaaaaacagaaaatttaaaaccaaacaagatacgagggaaatgattacgtaaaatcacggaatgtcaaaacaaatcaaaatcctttttttttttctttcaaatgtcaataatattggatcttatttcctccaatattgattcataaactcttgaaatatatttgaaatgctaagagatttgcatatcaaaagttaatctagtctagatttatactatacctcgttagtgaaggtgtttccatgagaagatacatctgtatactctactactgatgttgtttcagattgttcatcgttccatgattgtaacgagtcctgctcgaacgttgtttcctaaacaattttcatgtctatattatatccaaataaattatttctcttaaaaaaaacattagataatagataattacccaactaattgtcctcagaagggaaccgggctctattgccggaccatcaccgttcacatcaagcgttggatctggtgagatgtcatcagcatcaactggtgagtaagtgtcccatagatcccagtcgtctccaaatagtagccacatgaagctaaaaggactatccggtatctcagaattgtcttcgtttggatccatacttttggagaaacatattacctgactcaaaattttttttcaaggggctagattaagctgaatttatatagataattaacactttcaagtatcatcaccatttaactcttccattcaaatgcaaatacttgagtggacaggatagtcttaatattgataaagtaatagaaaaaataaagacgttatgaacaaagaaaaaccactaaatatattgtagctcagttaaaggaaaaatatatataccaaattaaggcttaaacgataaataatgcatataacccacttttcagtgcctccatggataaaaggatttagcaactttaaggaaaaaaggtttataccaaaaaaaagttcaaggagaaaaagaccactgatttacaattgttgggtagtttgaagtcccaaaatgttaaaaattcaattaaaaaaattgtgacagctaataaaaatggaactttagctggattcggaagatttattttattgaaaataaggattctgttttaattatagctctaatacagttgaattggttttttatagaaaaacatttctttattgaattttcttcaatggaaaaatatcattttagagtgaataagtacaaaaaataataaatgttgctttcaacaaaaaaaggaaggaaattttatgttttggctttgtatatttgctttcaacgtcattaaaacgctttttaaaccggagatatgcatcttgttttcctcatttacaagttcacaagatgattaattacattacttgggtcatgggcttaaaaagagagagtttgggtccaactaaaaaggctcagtaaaatacgtaaatgggcctagcgttatagcgagaggcagagagagaatttacacgacgacgacgtcatactcaatggacgtaaatgtccaaactacaaaagtttttttttttttttgtgtattaaaaaaaaaatctcaagttaaaaacacatcaagagtatattacagcaacttgtgtgttaaatcaccaattgtgaataaatcggttatggaaatcaatcatttttttttttggtttaatggaaattaatcatttgatcgttaagagtgtcactaattcgatacgtcacttgctgacgaatctgcagatgaaataggcatggtatgataaatctcgttaagaataaaatttcacctagatgtttgagtaatttttgtaagatgatgaaaattgtaacatttttcattgaaagaagcaaagagacaagcaacaagacaagagtgtccccacgcatgtgagcaccgttaaccataatagaaaaaagatatcttcatctaataataggtgaaaaaatcttataactgagcaaattttagagaatgaaaatagtgatctgtgaaataattttttttttttttatgatagacctcacctaacaactagaagaaataatataaaaccattattacttatattgataaactcttacaagatcactgtttccataaatcttgacaaaaatgtcactccatatgtttggtgtacaagactagaaactgtagttttgagttatgttattataatgttaaactgtattatgctcaaaattgaactccttttgaaaggtggtttatcttctttactaatcgtttcttcattttctctctaggagctaggtgggaaaaagattcaaccttgtcttagaaaaagaaaaccaaagctaatctttttcttttgtacctctctttcaaggattaacaaaacaaatcgatgaagcccgggttttagtacctaaacatctctttgtctcgtctttgaaaacccccccaagtagatccaacatcattcatatctctctctctatctctgcataagctacggagcgatgtcggcgtgcatcaatggcttatgcagagccgtgactgtctctcttcttcttcttcttctttctttctctttttcctcagcttgctccaatggaaattgccaggttcttgattctctttgcttattattctctggtttatggctatcaaatttgggtctaaatctttagggattttgcatttttgtgtctctttcagctgctggattcatgctcctcggctactgattgtgtctctggtttatactgtggagactgtcctgccgttggaagaagtaaacccgtctgcacaagaggccaagccacaagtccaacttccattgtgagatttagttcctataattagttggatttctctagagtttccaatttttgaagatgcgttgtttcaaaagatagtctagatcacttggtctatcaaaagttttgaactttgaagatgggttttgctgaagatttcatttggttgcattaaaagatagtctagatcatttggttgtatcaaaagttttgaactttgaagatgtggtgatgaaatttgtgtgtgtgttttttgtagatcaatggattgccttttaacaagtatacatggttgatgactcataatgcctttagcaatgcaaatgcaccacttttgccaggtgttgagaggattacattttacaatcaagaagatactattactaatcagctacaagtaatgctcttattaccaactctcttattatagtttcctctttttttggataaaactcttgaatgtatatttttgttctagaatggagttagagggctaatgctggatatgtatgacttcaacaatgatatctggctttgccattcgcttcgagggcaatgtttcaacttcaccgcttttgtaagttttatcttcagcttaaccttgctggatcgaaagcttgaaacctgattggattggtaaatgtgaactttgttttctttttgaatcagcaacctgcaattaacatactgagggaagttgaggcatttctgagtcaaaacccaacagagattgttaccatcataatagaggattatgtgcacagacctaaaggcttatcaacactgtttgccaacgctggtttggacaaatactggttccctgtttcgaaaatgcctagaaagggagaagattggcctactgtgactgacatggtgcaagagaatcataggctcctggttttcacttctgttgctgccaaagaagatgaagaaggcgttgcgtatcagtggagatacatggttgaaaatgaatgtgcgtattacacacagtttatatctttaatgaaaattgtctctgagaataaccttctcttgccattttcttatgattgtctaaagctggggatcccggagtgaagcgaggttcttgtcctaacagaaaagagtctcaacctttaaattcaaaaagttcttcgctattcttgatgaattacttcccgacatatccggttgagaaagacgcttgcaaggagcactcagctccacttgctgagatggttgggacttgtctcaagtcaggagggaatagaatgccaaactttcttgctgttaacttctacatggtactgaatcaatcatataactataatatgactgtttttacgagatctagctaacaaaccataatattgcagagaagtgatggaggcggcgttttcgaaattctggatagaatgaatggaccggtactttgcggttgtgaaactctttctgcttgccaggtattaacttattaactcgcgccaaagttacttatgggtatgaaataagatcttacaagcctaaattatctaaaaccggcacccgtattttggttcttgatgttgcagccaggagcagcttatggttcatgcaaaaatgttactgtacagacaagaactccaagcatggattcaacggctggaagcaactcaggtggaagctactcaggttcagttcagttctcaagatctttagcttctgtggcccaactaaacaacattgttgtcttctgcttctcattgcttccgttgctgatatttctactatgacacaaccaatcaaaccacgtggagagattcttaggttagagaatcttgatcacttctttagaacgaatgagagagcctaagttgacatgaattgccttagaaagagtttctgatttgattcttgtattgtagactgcagagctataggcagaaatcttgtgtatgtgtgtcttcagcttctgttgattgttatgcaacttatatatatatatatatagacacaattctactccaatagaaactttactgaatatttatatatatatgttgttgattgatgagagaacacataagatatatgcagattcaattgtatgaattactatgtacacaacaaacaagaaatatgatgagcaacactagacagcatgcagcaacggtggtggattctgagcattgagaagcaattccatgggtttgatctgaagagcaggactgatggtaagtaaagcaatgaagcaatctacaggaactctagttccccataagttgatggattcgagttttctgcatttgtttacaagaacaagaaggcctctctctgtcacatgacggcaacaccacattccgattgtctgcataaaggattccaatttcgaaagcgtgattctcatgaatctagagagaattatttggttagatgattgttgttaccttaagctgatggcagcgttctgcaattgcgaaaagagactcatcggttataaatgttcctcctatgtttaggtgttgcagtgaggaagttcttgaaatctgtcaaatcaaaatcaagattctctgaaatgattaaaacaaaaaaggaatcttcaagattccagtgcacaaaaaacggtgttagattttaccagttgaacaacaccagaatcagtaatggcggtcatgccccataaagagacagagtttaaattggatacacatcttgcagaagctatttggtaaagaccattatcagttatatgacaaccccatctgcttcgagatcttcaaatatgaaagaagaaaaaaacagagtttatagttctgttctgttttttgaccaagtcaatatcctatctcaaacaccctaaaggtaaagttggaaacttgaccaaaaaattcagcaaatctccactatcccaccaatcttgtttactcttaatccgccattgaaggacaaatcaagtacgatcatagtacaagaaacaaacaaagagcaaaacagagagaaagagagagagattacatgtcgagttctttgaggttgaaagcaagatgaacgagacgagaagtggaatcatcgtccattttccaaccagcaaagctcagagtttctcttctcgccatcgattgatttacagcttttctccatttcttgcaaacaccacttgccctaaaaaccccaaaattcaccaaaaacttcaatctcacaacaatgatttatttaatcaaaaaaagagaggatcaaacttgtaaggatcatcaatgaaaacacttactgggccaaaacggtgaaagaagtagccaacgaaaatatatatgcaagaaggtctaatggtaaacgatcaatcgctgcttcttcatccatgacttgtatgattttagagcttcttaaatcaatatttgtagaagatttttatgtattaagaattgtttgtatatatcattagttcttcataattgcagaggaagcagatgttgtctttttcatggtttaactgcagaagatgtggtcatagttccgtcatattttttaatcgttataacaaaaaatttgaaattaatttatatgatttaataaatgtttttattacacggtccaagattttgcgtagaagaatacctctaggactccgtcttttttcttctgtacgccacgtggcacatgccacggcctacggtgcgtaataaaagatctttcttattcactcaaaaatacattattttttgtgttgcttgcttcacaaaatatttaaatgttagtgaactaacacatactttaattgttaaatttgacatgacgttatctgtaattttcttttctcatcttacgtttgtacttttcgtgttcaatgtgtttatgcaagaagaagttattttgtcaaattacttataggttaatttattcattaaaagacaaagagtaaagaaggaaaactatctaaatagatttctgttgacaaagattgttttcacatcttcaactttattcaagacacacacaaaaaagtacatttgatttggttgattttacttatacaacacatacatgcttcaaaaactcttcatcagtcgataatttttccaaaacactagacgataaacacgtttgaaactcgatgtttccttcttcgatccccggataagcaatgagtttaccatcggtggtatttcccggtccagctcgaaccgctattggtttaccccaaccgaaatcgtttccatacacattgaaccgaggagagctagcaattgttatagaattactaaaagccttagcattcaatatactcggtttcttcacccaattctcagcaaactctctaaactcttcattcgtttgtgacccaacagttttgtttatttgcaatgcagcccaaccaagcccattgtgaagcatctccgccacagtagtcgtcaccgtcgcgaatccgaccacgttaccgaaacactctttctcaagcggagggtttagtcttcctctcatatccaccagtaacttgcaatgaatcacttcttccggattcagaccactgtttctgattatcgatcgccacatatacgctgaaaccgcttgaagcgacgatattttccgatcatcggagtcaacctcgccgttagctttcgctttaagctcagagatgtttctactcgtgactcgaaaaatcttctcttgtaataacgatgaagtaacaacaacccggttcggtgtctccgtctccggtaacggaattcgaatcggatactcaataccgtcgagaaaccatccacggagaagcaaaggaggaaactttctccgatgatcggcatcaaacccgttaaagcaaatctccgaccaagtattgaagaaactccaaaacgaagatccatctgcaacaatatgattataaccaaaccctataaaaaccccatctttcaattccgttacttgaaacgcaattaacgactccgagattccttcacagctcctaacaccattcgccgggaaaaaacgattcaagaactcagggacattactatcaacaggttctaaaacatcactaaccgaaacggatttagctgaagcgtggatgaatttgacacctgagccatcacaatcgacgtaaaacgacgccgttccagcatcttcgttctcgaccttgacaagacgaccagcgaatgggtagaagatcttcaaagcgacagagagagatgatttcaactgagagattatatgggtttccgggtcgggttgaggaaagagaagacctctttgtgggtattcggatcgaagaaagaagagatcccatggagtgagatggatcttaacccgatccgattcctcgttgtagctctctggtcgaacaatgctcttagagatcactactacttcatctgccattttcttttctcgagtagatagatgctgataaaattcactagtccactactagtggagtgtataatttctttatctttatattttctgtttttggaatcaaattcagacatgacataccaaactagtgaactacaacgtgtttcatgttatttatttggttatatagttaagcccattaattgtccctagcccctaggcccattatcaacctatcgtcgaagtttgatggaattttttacagagctcgacggaatgttgcaaccccagcggcgagtgtttccgattccgttcaggtacgttactatatatataagaatctctaaattcgttgaattatccgaatctgtttgttcatggtgatgttgtgaaccgaacacgaaagaattgcataggcttattattgtattaatttgaaaaacgagagagaattggtgtttggcttagttaaattcacattgctaaaccaaatcatctcatacaatgcttacatattcgttaaattcagcatctttgactaatttttccactacctgaggcagtaaacaagcctgaaaatcaagacttgcttctccaattcctttgaaaacaacgagtcttccattgagatacggtggtccagctcttgcagctatcggtttaccccaaccgaaatcattacagtacacatcgaaccggtgagagtttgtgacaactaaatctttgctaccaacagaaaccggaatcttgatatttttcacccaattctctgcaaatgctttggctttttcatcagtttgtgacagctccatgttgttgatttgcattgcagcccagcctagtccatggtccagcagctctccaaccgtgaccgtagctatcccggtttggcttacattcccaaaacactcttcttctagtggcggatttagccgttgcctcatgtttataggtaacctgcaatgagtctcttcctctcggctcatgccactgtgtttaaccattgaacgccatatatatgctaacaccgcttgaatagaagagatcttttgatcagcctcgtcgttggctttagcgtcaagtttcaaaacattctcttttgtaacatgaaacatcttctcttgtagattggttggtgttgttacataactagttggttttgtttcagggtctggaatatggattggataatcaatctcgtcaaagaaccaacctttaaggtgaagacgacgttggaaagtttgggatcctgaagaatctttcgagcaaatctctgaccatgcattgatgaacttccagattgaagtggcatcagccacggtagagttgtaaccaaaaccgatgaaaaccccgtccttcatctctgtcacttgaaccataagtagagatcttgagacaccgtggtagttcttgatccccgttgcagggaaaaaggaagcgaaaaacccggggacagaaccggataactcaaggacatcactgagctcgatgtttttagccactgcgtgaacaaactccacacctgaaccatcgcagctgatgaaaaacgagacagtatcgtcgtcgttctttagcttcacaagacgaccagctaaaggatagaaacgatcaagtgcaacagagagtgaagcttgtaattgtttgacttcaattttgtgaaagagaagacctctttgaagataaccaaaacgaaggcgagagagatcccatggagtcagctgaatcttcttcacagaagtcggtttcttaaggcttctgggattaactatgctcttcgagattaccaccaattcttcttccatcgttttacctttttcttaatcagtgaggttttgggttacgtgaggttttcaaatgagtacatatattgaaagcactaattaaaaaaagaccaagatccaagaaacaagttacatcacactttaataatgtttgtgactctgtgtggcctgagttgtttttcattatttgctttgtcattttgtgaaatttccacgtgtataacaacaaactttaagaatatgttaggaaagtgaataaagaatctctatgattggtcgtatttagcatgacttaatcttttttttttgttaaagtatgactatatcattaacaaaaaagaagaaaaaatgactttatctttcgttgatgtagacgtacgagtaataatgtatgtcaataaatttaacaattataaagcagtctttatttagtgtagaatacgaacagagcgatacatggatcattatcaaagtttaaagttaaactggtgttaccgacttaccgttaccatatatctcaatacatggatatatatttcttataatataaatagataagtgtgtgaaattattttcttaaaaagataaataatcataactacagtattataaatacacaaattaagaaatatgtaacgtgtttaatccttggtttgatcagaacttttaattatccgatgtgtataaattttgaagaagggcctatagttttgtttcttgatgggccaaatcaggcccaataatgtcgtacatggttgttcttcatgtaccggagattcggcggcgacgaaaccgtcctcattgcgccgccgcaactacccgacaaacaactagctttcgtattacttccttgtatctgatttgataatggcgaaaactaaacaacagaaatctaagcctaagaaacaaccgcatcaggttttcttcatgattctcaacttcaatatatgatttttgtattcccaaatcagtctgattcgattagtattggcctgttttgctctgtggaaaatattgtaatttgtttgtgtggttgatttgaaaaagaagcaaggaaaggattgtgatctctctcaatttcgtgctcagcttgacgctttagggcttaagattatccaagtgactgctgacggtaattgtttcttcaggtatgtcttttgctttgatcatcgaattcgatttgttttttgaagaacaaagcaatcgtgttagattgaatagtgattctctttcacagagcaattgctgatcaattagaaggcaatgaggatgaacacaacaagtaccgtaacatgattgtactttatatagtggtaagtggcagccattacttagtgatatttggaaactgtctctctatatgtatatacaatacttgatggcttttgacagaaaaatcgtgaaatgttcgagccttttatcgaagatgatgttccttttgaggattactgtaaaaccatggacgatgatggaacttgggctgggaatatggaattacaagcagcttctcttgtcactcgcagtaatatatgtattcacagggtaataataacaatgcctcttctcatcatctgcttcgtttttatcgatacgtttgtttgagcagtggtatctttatgttgcagaacatgtcaccgcgttggtatatacgcaactttgaagatacgcgaacccgcatgatccatctgtaagtatacttggttctgttaatgattcttttatcggtttgaatttgcttttactttaatagtttctctttcaggtcttaccatgatggggaacactacaacagtgtgcgttccaaggaagatgcttgtggaggaccagccaggcctgttgtaatagaggttttacttcaaactttagctctgtgtttatctgtaatatacataaattgtctgtttttctgtcctaataaattccagttgtgtggaaggctgatgctaaagtttcagcagcatctaaacaagcgaaagctacagagagcaagtccaaaaataaagctgataagtgtcatgtgaatgctggagctatcaaagttgtcatgtctggtagttgttgtgacaatactgagaaagctgaacaggtgataatgcgatgcttggttaatgtttgagagaatatcatgatcattagtcctctcttatctttaggttctattacaagttaatggtgatgtggatgctgctatagaattcctgatagcagaccaaggaatggagtctttgactgaaaatgatacagaaaccgcctctgcatcagataccatcaacccaaagcatgcaagtgatagtccaatggaaaacaccgagcaagccagagaagaattgatagaggaggaatcagctagcggcaataacagtgaaacagtccaagccaagtgcactacacagaccgatgataaggtttgttggctcgcttaaaccatgagatagcttatttccttatgattgcattaaaatatgatccgaatataaaaggatttctgtgaaaactgcagaagatcccaaggaataaaacatgtccatgtggttcaaagaagaaatacaagtcctgctgtggaacagcaactgggagatcctctgtaaaactgttagtgtaagtttcttaaaacggttctgcaaaacactcaaagcagaacttaactaaagatgagtgtttcttgattaatttgcaggagccaaacaatggagtcgaagaaggggagaaagaatttgagaagaggaacatcgaatgaagttgaagcaaatgcaccagatgttggtgctctttgtatataattaagtctcactcactcaaggtgatcacgttttcactccatttattcacaccaaactcttttatctgtttagcaagaacagtaattggttactaaatccgtttggttatctctctatttcaggcgaagacataaatttagtatgaacttggagttaggatcactcgcgagtataccttttttgttgtctgattaaattaacagaaagaaaaaaacttgttataccgtactcaagaacatatatgtattacagagcccaaaaatagctcgagaataactcaaattcattaaagcataacttggttaacactagctcagatgatgattgtgatgatagtgatgatgatgatgatgaatcagggacgagagaagtggaaggtgcgaggaatgcggtaaggggaaggttgaggagagaatcctgatgatgctgccattcccaccactcgatttcctccaccgtccgattgctgcttttccgatctgacagtcgtcgtcatcattgctagcgatagatcgctccctaataatctctcctcatctctaatcctacttcttatgcttgcaatctttaaaattatcatacatatgaattatatcaccaatttaattattttccgacaaaaacaatatacatacacaaacatgaacacttacatcagacttgagtctaaactcttcagatgatgattctcctagacttagaccaagattatgaccgttcctcgtcgtctctgttgatttttacaatagaatctggtgactggagtaaattttaagacaaaaaaaaaaagtaaaaataaatttacctgagctaagatcttcttcttcctcgtatactttagggtcaaaattggtaacagcgtctttcccattacactttattgccgctttatcataagctctatattcaaatttcagttttttcatatttcgtaccaggaaaaaagtaaatattttttttggtgatgagacagtgaataatgaagaagtacctagcagcttcaatctcggtatcaaagagacccaaataaacgtacctgaaaagatagcaaacaaaaaaagcaaacaggacacttcaaattaataagaaacagactggaaatttaatatttgcaccaaaaactatgaagaaattaatactttttgttgaggaattgacccaaacgtgactcccatcttccacatttgtgcaaagtaacacctctgtatttagaactgcctcttggaaacccagtgctttgccttctaagtacatgcataaactcttcctttgtcaaatttcccatctgcaaaaaaaaaaaaccaatatttcattgtgttttcttctgagtagtaagtaattaaattactagtataacctaaagtagatatatccataaaagacttatatagaacctgtttcaaatcgtcaaggtagtcttcaatgtcgaaattaatatctgcatctacacctctgaatttaatcgccgctcgatcataggctctgtctcaaatatttattgacccatattatagccaataacaaaataatgaacaaaaaatgatactagtatagtaatgcgttagctaggttcgaaaatataccgagcagcagcatgtgcagtgtcaaatccacctgcatatatatgtaacaacaattagaaggaaacaaaaccctttgttttgtcaaataaatcgaagacacaaaagttaaatcgtaatttttatgtatatgaaccatacctaagtacacttgcttcccacagtccctgcataatattccaaaacattttatgaaaataattgaaatgataacactacatatggttttaaaaggtattatgtgatttaccaaatatgtgactcccatcttccggttcgtcggtaaaacgtaactcctcgatactgagagctacgtgagcgaggaccacgtcggctcttctttatcggcggtgatatctccggctcttctggtcgacccgatccgcttggatccgacttaccgacactattgaaaccggaccaacgaactcccggttccatgctttgagccggaaagaaattcctggtcaccggaagcacaaacggtagccacgttgcagattgactcatcccgtttgacacgtgtccgaccggattccctctactgtcggattcttcgtgatgatcgggtgagtcgttaaggttccacattatttgttgttcctttgtgtaaagtaaagaggaaaaaaaataagaaacttgggagagaaataagagagaagaagaaaactcagatgagaataaccatcaaagcaaataaaggtaggttctaaataaataactaaattatttaatagaataaatatctgactctattcaagtattcatcattagagaggtgcaggatttttttttatcaatgaaaggagtcaaaggaaaaaaaaatatttatgaagaaattcattttgaaaattgattctttcccaatacaagtgtattagactgtctcctagtttttggtctcctgagtattgacatcacatttttcttttatataaaaagggcaagtaaattcagaaattcaaaagtttgctgaaattattatggactaaaatgtaggatgtagatgggagtatctttattttttatttattgtcctatttaatttctcctactccaactactcacaatttatcattttaggactataatttatatctttctttcttctccgaaaacaaattgggacatcaattcagcagcatatgattattttcaacatcaacaacataatcatgttgttatctacaaacaaaattttatgtttgtttagtggagcgaaacttttttaaaaatgtaattccctgtatatttgttgaatatagaaaattacaaatgtgtaaaaacaaaaacaaaaaacaggatgaacaaatccgtgtaaaagagtttcgtaggagaagaaaaggaaacggaaataatgtgatgggaaaagaaaaaaaacgaagtaatacctaaaatgcccctatccaagagtacgggaaacagctttttctctctttccattgctttgattacaccttcactctcttgttatacgcgcgtgtactcactctcccttcacattttgatttttaatcattgttttcacatttacttaaggtatttacatcaactcagaaagaataatcatcctgtctctccattttttattatgttcatatacatcgacattttatttaaaaaattaagaaaattagaaagaaaaaaaatagatgaatttgaaaatgtattcgacatataacctttttgagatttctcgcatatgggatttttattaacgtctctactgtttcttaaaaattcccccatatcgttaaagtaatgttttatttgaaatcagcaatgaaaaattattgcaacagttggttatcgtttataaaaagataatcataactctggttaatcattcatcatgcaagtatgcaactattgttttactttactttttttataatgatgttaacagaatcttgatactgatatagttatacttattttttttgtagtggatcattttcttttcagaatcgtacttatacttgcatgtttctcttgagacaagttcaagtttaattagtagcgtctgctgacccaaaaaaaaaaagaacgaataaaattgtctatattgacacacagaattttttgtatttaaaaaatttcaaaacgcatatttctaaatacgtgtttagtagttactaaagcaaagaataggtgtgggtaaaaggagatccaaagcgtgaaagaataatattacaagtgggggaggaaaaagccaaaccttcccctaatggaactatgacgatgctttgatgctctctgtttctttccctaagtagtaattacaaaaactccctctccctctttctctctacgcatatatcgactcccataatggcaatcttagccccacatttcccataatggcaatcttagccccacatttgtctcgctaacaaatcatatcggatggcgtttttctttttgattgtagatagcttttttcccctatcatggaatccaaccaatttgaagatgccacaagaagatatattgttaccaaagtattaatcagtgattagcatgcatgtaccatatatttttattcaatagcgaatctatagaaatcaaatctaggatatatgtgtatgttcagtatttatgatggattattggttttagaattcatatattttatacttcttcacatatattatcaaaatccaatttcaaacttcgaaagactcacattttaacaaaagtaacacgcgtaataatgtgaataacgacgttttcaaataggtttgtgcttgtccacatcttattcaaccttatcatgatctataatccagtttctgactaaacaacgtaattactatttaaatgaattaaactaatctggtttaaagactgtttaaaattaagtacatgataaacgtgggctgtatgaaacttttgactagtgaatataattaggaatgcgtacaaactttaaaatattgagagacacataacaccaaaagtgtgtcggcacaatcatctcaaactagaaaatcttattattattactgatgttttgtaaaaaaaaataaaaatacgatgacagcttggaaacatcggacggtcgataaaatcatcctcgtactgtcggtgaatctagacagttgaaattatgggctccacttttcattaagatcacggaagcttgatctctccacaactcacgtgactcacgtgaataaaaacatgctacgtatctacctctttcaaatttacaagtactaacacagccactgttcgaatcatcataatgtcttttttatatcactgtagttgatagttgtgtatatatgtatacagtatacttgcataattctccgagcaagattataagatttaacaaatttcgtttcaaataattttcaaccataaatattttaataatctccttaatcgctgaaataaataaaatacgactccgggcatcgtcatctgactagaagctatgattcggagctagtagttgtaaaaaactttttttgtctcgaattggaattcaagaaactgatgggtgcactaaagccgatatatttatattcttattcgagaaactttctataaataaactgtttttttatatattcgaccaatgcatccaactcgatttccaagtagtacataccacaatggtataaggcatcgcactagaattcgacaaataagaaaaagataaatcagacttgtacaatatcgataggggcatatgaatatattttgaatttttgttttcattttttgaaatcttttattacaatttacaaagtcatctttttactttttcagttattgcaattgcacgatgcctcaccttcattttgttgtcccaagttcctcccagctatacaaaattacaatgtctcatgggccgccaaaatgggcttaccaaatgagatgagcctttaattagtggaaccaaaattgacgcacttatggtgttacttcaagttcaagcagtagtttcggcctttttgaaaaaggcccatttattgtgcttgctgttacttacgtcaacgtgaacgtataagtgccataatattatgattttgattaattcaaatatattattgttttttttttgtgaaaatgtaaattgttatttgtttctcgataaaatcaaaccataagtacaagatgttgattaatttataaatatagttccctgatcaagtacttaattggatagcaagctaattaggccattactaccatgcaaatggtttcaaatgtctaacaatttttaagataactccatcgagataatgacaacgggaaacaaggatcagacaggaggtttggggaagatggggacttgggtcaatgattttaaattgatcaatcgaaccgtgtatattgaattggctttttggtcagattcgtgattagggttcaattctagtactttaccggatttcattttgaaattttatttatttttattaatagtctaaaagaatgctatcacttatttaaaataaataaataaaattataaatttggttccgctcgtgaaaaaaaaaagaaaaagaagtttggtaacagaagaaaaagtgaaggccgatcaaatatcaaatcaaagctccacctttgccaatctcgtcttggacttattcacctgtactctttcttattttggtatctttgcatttttctttcctttttcatgatagcaaagattaaaaacactaaaaataactaatataatccacggctgagaataatgatattttttattttgctttcccccattaataattaaaaaaaaaaaagcctttgcataactatcacaagaaaatggagaaatgcgccgacaacaaaataaaaaatggagaaatacagtaaatgtatatatatacacaacttaatttcccttggtccctgtcacatataaatagataaatataaaacgcatggtgaaggaaactttcaagctccgatataaataaatatacgtaataaaaaacacatctcaaaataaaagcaacaataattaatttgtaataatagaactgaaaaagatggagcatataaaatctaaatggtacccacagaacaaatggaaatggagcagaagacaaaaacaaaacacccccaagtcccccccgacgactcaaaatcttatccatattattatacattactgtggagtatatgaactttatgaattaggagaaaaactaaatggacgtagttaatagagatatacaatgccaagttgcttttatatagtatgcatgtaggtcatcctttgtcccattattattcaacttgatatcccatcccttcgatttaatctccctaacaatcccctaattataaattgttttgaataaacatcataaaaactgttcctcttccttaaggatctttttctaactcagttatatacttatataagatttcctaaaaataaaggggaatttttgtttatttaaacttgtgttaattatgggaacaagtgattttttagtgtattttgggtattcctctttaaacactaactaaagtaaagtaaagaagacaagttaatgataagaaatagggcgaattttccattaatgagtattaatgagtagagtaatatacattttgcattctttaagcaatagcctaaaattccataaaccgcaaaactcgcaagaaaggaaaaaaacaaaacaaaaattaataactaaaaagccctaaattttcagataatgaaaaaaaaaaaaaaaaaaatcataaacggcgctaatgattcgtagaagcaagccgttggcgtacgttagcaacagccaccgctccaaactatatatttttaatgtttgctttcccattcttcatcggagctttccgggtcgggtaatttattcaagtcaacccgatccaataaccggccgccactcctcaatctcttgtcatcctcatcttcttcttcttcttctcgttcaccgttttgataattccgatgaaaattcttattatccacatcactatctcgattctgaccaaaaacacggtggcggttattttgcaccgccgtgcccaaagcatcaacctgagcaccgacctccgtggctttcttcctgatggtcgcagccgacatatcctcgtcggagaatttctccccaggaagaagctcagggaagttaagcctcgccgtaggtcctctaagatagaaaaccgccgtgtcgtaagctcgcgccgccgcctcgggagtagagtaagagccaagccataacctagagcgcttgttaggctcacgaatctccgccacccactttccccacttcctcatcctaattcctttgtaaggtctgtctctcttcctcgtaccggggacagccacgtcagcaactccgccgccttccatggaggatctaaaccctcgaaagagaaagactttcgagatgggttttgagagagagagagaggcagagaataaatatgtcggagcaggaaagagaaggagggagcttgcaggtggtattatggtgatggaaagaggagaaaaatccaaaatcaccgacaagagaaaaaaaaaaagtaaagagagggagagaatttaggttagttggatttagaagataaacttgtcatgcttctgtggatttcttttccgacttataacaacattttcttttcctttttaaaaataaaaatctgtttcattcgaaattatcagtttctacaaaaaaagaaagaaaaagaaatatatatgtatatatatatttatatatattggggggatgatgaaagctgtatgttgtgtgatgatcatttcttatttttaatggaacagaaaccttttaagaggataggcggaagaagaggtggtggagatgacatgcgcattcttattctattattatttttatttttaaataatctatacatatattctactatccatatgtattatagtacccaaacctctgtgtgtttctattttttaaatattttctctacgaatatatactccctcgatatatttttctatttgtacataccaaaattattagtaaccaaattttctgataaatttattcaaaagatacctgaactcctctgtccagatagacaaagtaagctatagatagagattcagttattatatagtatatatcattgcccccaaactcttccaagttaatatctaaagactaaaatcatatcatatgtaaataaaaagattcatattgcatggtgaaaactttacgaacagtctttatcaaaagtataataataataactttacaaatagagtcgtacatggacaacgttttggctactacaattcttatagtagctagatgacttattaaaggaaacgaaaaatgaattctatagatatatatatatatatatatatatgatttttttaatctgttacttcaacatttgaaatatacaatttgattttttagcatcatataaaaacacaacgaatggttgtatgaaaaatttaataatatagaattatatattcctatgttagttatcttcatccatgtcatgagttttgtaaatgtatttttttctgttacctttcttttgtacattttaattttagaaacagaaaattatttcatcgctgttattttagagtttagttgatgaattatggaatgaaatttaactatatatatatatatatatatatttttttttcacaatgaaatttaactatactataatggaaaattactttaactggttctatttaattagggtactattacggaatacgggacatacgtcattatacggtactataggattagtggaggaagaaaggtaggtcggtggtcggtggctgggatataccgttaggaattgactttatgtgtactcaaattacgacacgtcttgtgttttgtcctttttgtccctttgattccattccccctcccgttttgttcacttttgtcctctttcccatttttcttctcttgtcctctctcatttttattctcagggagaatttcggtataatgtatcccttttttctatttgaacccacttacgcagttacgctccatcatcatattttcttatttgtttatacatacagacaaatcaagtatttgggaacaataattatgattaactacaaaaaaaaaacacagaagtaaaattataaactaataactttgtttcccaacaaatattaactgcaacaacaaaccaataatatgatcaacaaaataataatactaacaataagcgtagataatagacattaattaattggtattatactatttttttttttgaatattatactcagcaggtggatattgattatgagtatcaatatgccaatccccgaaagaaccgatcttttcaatacttgttaatgttattttcaggagtgttgagttgtattttcttcattgaaaattgatttggataatgatctttattgttataaaatggattagataacagatcatacatatactaataagttggaccatattttatgatgttgctgctctcttgacttgttttcttcacgatttcaataatatgcttctgatgtgaacccatctactatatacctccataagtcataaatttctatatagactttttctctaaagccaactttttttttgtcttcaaaaatttgttggtggtcgttaattatatattctacacatctggttatatttataatatgctactccgatttattttaatgtttatagattaaaataaattgtattggagccaataagaaacaattacaatatttaaagattttcatcaccaatttatgttcctttcataataattttaagatcatttgggaatcgtttcacgccaaattttgttttttaaaaatattgaaattatcatagaaaacaagctgtggggtaggagttgagtgatatttggattgttcccacgactttggtttaaatttaaaatctcaatataagaagaataattacaaaataaataatttcactagggaaatatattagagatttgaataatgaaacttttagctgtgacccagttggcacgtgaacatggtgccaattaccgcggaaaagcaaaatatcattacattttctataaactggaccactttgctacatgtttattttccaaaatatggggttgctatatgtttaaatatcgtttttgtgttatatcaatgttgttatatgtgtttataacataaatgaatacaacagaatcagtccaacacagttgtataccctttcgtaaagtatcatagatgatcttttagttgaatgaatatatatatcacaccaaccgatacaatatagtttagttgttaatttatcattacttattagaagaaaaacaagattcaaattcacagaaacaattatgttaacaaattcgtataacactgtttatgcttagcagcttttgttggtaaggaaagaaccggcgaaaatgtattgatctccctaaatcggtcggagtcgaaaaaacaagtaccttgcaaatattatcgaattaacaaagcaaggaggcggcttattatctggaagttctaaatttgctagtgcggataagaaatcaagtcaacagtgtatttattaattatttgtatcaatcctacaaccgaatttatatttaggaaatagatccttctgtatttctttaaaggaccacatgcaaacacaaaatcttcgtatctgataatcgcacaatggaagtatttataggctgctggtatcaaaatgggctttgtaagatggctgtagtttatatatatgagcttttattattgacctagttatgggctccattatattctatatgggctttaattcttgaactagttatgggctcttttatataatgtttatatatgggcttctgttcttgaactagttatgggctccattatttattaatgtcaatctcaccaaaaacaatatatcagaatgtcgattataaaatatgttgcatttatgataagaggcttatatttcaatactaagagaccattttttgtatgaggaatgggaactgtggaaccaatataaaacaaaaatattcatattcaaaaaatacaaatgaattttaactttctgtaaatattgatcaacgacggtattggtttaacacttctacaaggtaaagtgccaaaaatagcacaaatcaaagagaagccattgcattgagaaaaactttgattccatattcttcttctttatataaatttctgaactatttaccttttacatatatactctctagtttaattcttttcaaccaaaaatgtaaaaattgctaattttggcctctctcattttggatcataaatactctgacagaggtggagccccaaatccacaattatttgtggtaaaaaggccaattttcaacggttgatatcatccacggaaaagaaattaaagaaaaagcaaacttctttgactttcgtcctctaaattccaactgtattacaattccaaccccacatgctaacaaaattacattcacgcaccctatattctcctttctctaaattaaccccctcgcttgggaaaattgttcggaggatagctaggaagtttcgttttcaccggaacggatcgttttcttcagccataacactctccttaatctcctgaatcatcttaatcacttgtctcatcgttggtctttgctctggtgatgtcacacggcaaagacaagctgtttcagtcatcatcccaagcctattatcctctgttccttcttcttcttctctcattgctctaacccaatcaagcatatcatgaggcgccataaacggatgccttgacgcattcttaccagtcaaaagctcaaagatcaagacaccaaacgagtaaacatcacatttggaagttggtctacgtgatgattttctgatctcaggagctttgtaggaggatgagtcaggatcatcaggtgaagcagaagaagagtctgttaagacactgaggcagtaatctgttaaacaggcttcaaagtcttgtcctaagagaatgtttgtggattttaggtttccatggactaatgctgatgatgtttggtggatgtaatataagccttgagctacatcttctgcaatctttaaacatgatgtccaatgtaatggctttgctcttgacgatcttgaacctgaaattttgtagattagttaggtagggtctctcatttggtacaatatgggaccaataagcaaatcaagcaccaacagtaacaaacattcttaagatgtaaacctctcattcttggaaagtgttcacaattctagcaataagagtatttatttgttccggcatttaagcagtaacacaaggtctagagacaaagctatggcaaaagacgagatttcacgtggagaaaacagcacagagttccaccaaagtctgtcttcttccactactagtagtaagtaatcaaacggaaatttcaaaaaagagcaaaacaacaaaacttttttttatatataatgataaactaaaacccgcgattgtcgctgtgtggtcatcttcaatgtcaacaagttaacactactaagtgataagtacacaaaacccttcacacacaaagactcaaattctttcatagttttagggtttaaagcttaaaataaacaaagagtgggtcattatagtctctctctacgaccccaaaacggttagtcacgtcatgattaagaccagcactattaaaccacattttaaattaaagaaaaccataaactcggtgctgactcagtgaggtaataaacttaaacccttgagattgaagaagatgagagagcttaccgtgaatgagattgaataagctgccattaggatgataatcgtagatgataagtctctctccgttggactgaaaataagatctaatcggaacaagattggtatgtctaagtccaccaacaatctccatatgattctcaaacgcttcttcactcgtcactgccgttttagcagcgtctagtctcttcaccgtcacaataagctgattatcaagaaccgctttatacgtaatccctactgatcctcttcctaataactccgctgaagctctcattagctgctccattgtgtacattccttgacttctagattctccacagaaaacaagattcccactatttggtattcgctgctctgtttcttgaaattgaacctctttttctcgcttttgagattcggtatctgagttcaaaaccggaactgctcttgttcttggagtttggttttgtgattgctgttgttgagataaggaagcttctccttttggatttggttcatatattccatcgtcgtttcgtttctttatcaccagagagaacacaacgaggcaaagaccaagaactataagcgaagcgagaccagcggtgaaaccaaggactaatccactttctttacctttcttcttcgtaactaccggagggataaccaccgcaccaccattctgcgcctgtgcgctttgtcctaacggagcttctgacgacgtcgttttgttagtggagccaaagaacggcgagcgtgaagcgcaagctcggttaatgatctcgccgcagagtccagggttagacctaaacgacgacgcatcgaaacgtgatagagtcggagtaacggggattactccggtgaggttgttaccggagacgttgaatgacgtcagaaacgactggtttaacgacggtagagttccgttaaaccggttaaagtcgagatttaatgaagttaaccggtcaagtgcgttgatctcagagggaatcgaaccggagaagttgttgtgggatatagagagaatcattaaccggtgcagagagagaatcgacggagggaaagcaccggaaaactgattccggctaaggaagagagatttgaggttaacgagatgtgaaagatcaggaatcggaccaaagagcgagttattctcgagactcagaactcggagctggtcaagacggctaagagtagctgaagagaagtagccgcggagaccaacgccggagagaacaagacgaacgatgcgtccttgtgcacatttaacgccgcgccattgacagtagtcgtaacgctcggtgagtgaatacaagagcttgttgtcgagatcggcggtggatttgaaagagagtaatgcaacggcgtcggaaggaagtaaggagttgaagtaatttggctctgctccggcggagacacggaggagaatgaagaagaagaagaagggaagaaaaaagttcagtgtcatttttttttagtaacttttttctttgcaaagtcactataagaatttcaaatccatattaaatgcttctgtatactttttcttctaattaaaacagaaagaaaaaaatatgggaagcagctgtgagagagattttgggactgtggagcagcagatcacgtgctcgtgacgtaatccttttttttttggtataggaaattaaaaaattgcaattgatcgtgttatttatttataagcaaatcttataggtaagttgaacatataacttttgttgcaaattatacctaacgtttatacatgtattgtgtaggttagaagaaaatgacactatacaatccaaacgactttaaaaggcatttatatttcttgaatctttgtataattgtaaccattaaaagtttaagattttgtttgggaatcatgaaatccaaaaagttaccaggctgttaaaaaatagcagaaccatgcattttctacaaaagagttttgtttaaccgatgcggtcaaaattatgttttccaagaaaaatagcattgggggactgagagtcacgcgctgagtgaagcgggtgagaatcagcgtctggagcctttacataagcgacggcttgagcaagtccgtgagtggctatagccgttactgattggtccgtaggaaatgactagactcgtagccaagcatgtgtggtccttttttttgtttttaatttgtcaaccttacttgtcctttttactctttaattaaaaaaacaaaaaatcaaaatagcgacgttttatttctcaaaacaaaaaatacatagttaacggaaattatgtggaagaaatggtgagagttattgacactgtgacaaaaagtatggagagtttctacagatttgtacgattttgggtccaatcacaataaaaactcattgttcccactcttctatgtttttttaatattcactttgcttgatgcactttctttataaaaagattcaagataagcaaagcgtgctgctttagtagtgacacgaaaacagcatctccactctccattagcgtcatttccttaaacattgagtttcaactttaaggattacaataagtattcactgtttctttatataacaaaaggttaaaagtgtggtggctatacggagaaaactaagctaaagtgatttttgacttcattatttgtaaataagatctaaaacgaagcacccaccatttctttctttagaggctaatatgtgtgtgtcactttaaaatgtaattatttcagcatataaatggctaatcctctgatataagaatgtacatagggtctatagagacttttagcatcaaacctggaatctgttatgtaccacactaaagcccaaataaaaatagaccttgttcaacgggcccaaatcaggtggatttcagtaagagagtccttttgaggcaaaagcagagtccatcaccatgtgaagtacataattttgacgttataatacttaaaccatttgaagttggtttcatcacataaaaagtacataattttatctagcataactgtttgggttaataccatcaacttagtttaggcgaattttgtatcacctacttatattttcctagtttagatgaaataatgtttgtttttaattgtttaatattagtataagataataataataatattgtaatgcatagttttaaatataattccttaggaaagaagtcaacgaagaagaagaagggacaaagacttgtggcctgtaattagttatggtgtcactttgcagtaaccaaaacgccgacacctctcttccctctcttcttcatttcaccagctccatgcatatacggtacaaccaaccacctctattctaatcccaaacaccctcccctcttttctttacacttttcttattaaactttataaccaatacaaacatttggtgttttgtttttttgtattcttcccaactaactccaaaacgtatgattgtagtttaggacttgattgatttatagttcacaatttataaccgtaaaaaccagtcaacagcattttaacccttacactttttactctcaaaaagtacatgattaagatctgtcactttcactcttttaaaatttaccagacgcttattttgatttacggtgatttgttaattaggtaatatccgtgttagataaatgttattttctaagttgtattagagagatgtcgccttcagaaatctcccacacgaagctaaattttggaaataattaataagattccagagcaaattagtcttctagaatataataaatactactatacattataatacctctaccacatttgtgacgtcgtcgtcagtctctgataggtttgagttcatatatttcctttttaatacttctcaaaaccaaaacacttttgtttttaaaacagagtcatcctcttcgtcttctttctctgaccaaaacagagcgaaaagcaaaaatgaaaagtggagggaacacaaacactaaactcatacttgttcatccatacattcaaaagcaaacaagcacaaatcgtctatggcttctcgctttcgtttctttcttcacaatcgcttttctcctaactcttctctacaccaccgactccatcatctcttctaaaaacaactccgccaccgtctcctccgccgtcaattctgccgtcaccaccgctaccatctctcagttaccaacaacagccatcaatgcaatgcttcactacgcttcaagatcaaacgacagctaccacatgtcatacggagagatgaaatcaatctccgacgtcctccgccgctgctctccgccgtgtaatctcttagtcttcggtcttacacacgaaacccttctctggaaatcgctaaaccacaacgggcgtacagttttcatcgaagagaatcgttactacgctgcttacttcgaagaaatccacccggagatcgaagtcttcgatgttcagtacacgaccaaagctcgtgaggcgcgtgagcttgtgtcggcggttaaagaagcggcgaggaacgagtgtcgtccagtgcagaatcttctcttttcagattgtaaattaggactcaatgatttgccgaatcatgtatacgatgttgattgggatgtgatcttagttgatggaccacgtggcgacggtggagatgtaccggggaggatgtcgtcgattttcacggcggcggttcttgctcggagtaaaaaaggcgggaatccgaagacgcatgtgtttgttcatgattattacagagatgttgagagactttgtggggatgagtttctttgccgggagaatcttgtggaatctaatgatctgcttgcgcactacgtgttggagaagatggataaaaacagcacgcagttctgtcgtggtcgtaagaagaaacgctctgtttcttctccatcggcttgagttaaatgtgcgctaaaatcttgtggactgtggagagtcaaaccaaccgacacgacggtggtcattgacaccgtcaatcgcggaaggagtttgtgtaaaataatacgtttttctacctttaaatattttttcctgctttttaaactatgtgaaaattcaatcagatcaattaaaatttcaaaatatctcttcgaggtacaacaattcgtttaaaataccactatagtatttggatactgatgatttggtgttacaacataaatgataaaacccaatgaatcaagaacgtatagtttcaactctctaaaccctttgtggagagtcttgtggagtcagagtatctatcttctttttcttgtagagtggaactcttcctccaagctctcttagctgatccacaagtccgtatagaaactcaaacgtcaatatgttttgagcattaagttgctctctaacttgtggatgaattctaaaccattctcccaacatcttatgaacgtgagatcgaatcatcctccatggaaccggatgcttctcacacagctttaaatactcaacaactaaatctccctggtctaaccctccatcgacgaatccctcttcttcgttatcttttgcccattcagctgttctaaacccagcaaaggccgccgggttttcaagaagcgtctccgcagagagaacaccttcaacacccgtctctttgatgcagttatcgacatcttcgatgcatcttacattcccattcgctaagacagggattctcatagcgtttttcacttccttgattgcgctccaatcagctctaaatttcttcccgtctttctcatctcttgttcgcccgtgaacagctaggagcgagcaaccagcatcttctagcatcttggcgtacttgagtgtatcttccaggttcgggaagatccggattttacaggagacaggaacattgaggttctgagctaacttttcaacaagtgatttcaccaaaggaagattatccatcaagaatgcaccataatttcctcgcctcgctatacgctgaggacacctgaaaccaaaatcccccaaacattcttactcaatcaccaaattacaagcggtcactgtgctcattcggtacccaaatcactaaatccaaactatgatttaatatgaatattatagcccatgtgtcaaactactaaagctcattgaactctatcgttcccagaaacttggaactcaaatcattgcattctatcttagttatcagagttcacgaacttaaaacagtgaagtcataaaggttcgatcttaattgaagaaccctaacatacaagatgtgaaaagagggaaatgtacttaccctaaattgatatcaacatagtcgcagtaaggttcgactctctttgcagcttccaataacgtatcaggatcattagcacagaactgcacaaacaatggcctgtcctcctacaatttcaaaatctaatcaaaaccttaaattcaaaactgataaatctctgagaaacgccaaaatcaaatgaaatcttaccttacaggtggtgaactcctgatttctatacttctcagtctcggtgaagatcctagaatgcaacatcggagtataagcagcctgagctccgtatttctggcagagcaatctaaacggaagctcagagttatcaaccattggagcaacgatatacttgggtctacccagttttttccagtgtgcccaagctctctctactctagtatcaatgcttaagacccgacttggagagcccaagctcgccggcgctgtgtcgactgtttcctcaatctgcccatcacgctgctccgaacagaggatatcgtctagaacctgcgatggatcaggttttggatccggattttgagtcattgctcgcgtctgggagattaacgattttcgggtacgtagaaatctgagattcgagagatttagtttcatgagctgacgacggaagacgaaatcatcgccgccgccataaattaggggtcgaagtgagtcgcttcaaagttttgtaattttccttgacagtttttgggctttagtgggcttaatgtatttaagttaaaggatgggctttatatgcatttgtataaagttgtgtgcttgcttattaaagcctttgcttagaaataaagagaagatggtaacccaaatcgtacgactattattcttgcgttgactgctgacgtaaataagcaccaatcattagttaatgtcacgtcttactctattatacacgtgctttacccaaatctcctccttaatcatcactccagtccaaattcacgacataataaacgcctcaacctctcactaatatctcgccacgtgtaactcctaacgctatttcttttcgatttccaatatgtccgttgtaccagcagaagggtggtaaccatattaaattatttattaaaccgtaattgttaagtaattaatttatcttaacagacatttttttccctcttttatggtttcgttcgctcactgttgagaagaaggaagaagaagaagacgatgaagctctctgtgtttcgattgagctattggaaccgtcgaggaagtagtttcagatcatcgccgtcgttggatccatcattcgatggcaaatctccgtcgtctgtgttttggttcgtgattcatggtctctgctgcttgatcagcttgattctagggttccgattcagccatttagtactcttcttccttttctcgacttccgtcaccaatctatacacaacgccatttctctttgccggaaacggcggtgtaagccagcttctccggctaaaacctctggaaacagcgactaacagcacggtgaagaagaactctcgagtggtggttggaagacacgggatccggatccgtccatggcctcacccgaatccgattgaggtattgagagctcatcagttgcttgtgagagtacagaaagagcagaaatcgatgtacggtgtgaggagccctaggactgtgattgtggtgacgccgacttatgtacggacttttcaggcgcttcatttgaccggagttatgcactcgcttatgcttgttccgtacgatttggtttggatcgttgtggaagctggtggaatcactaacgagactgcttcgtttatcgcaaaatcaggattaaagacgattcacttaggattcgatcagaaaatgcctaatacatgggaagatcgtcacaaattggagaccaaaatgagacttcacgccttgaggttaaatctttgattcacattttgttttgctgttttgattgattgattcttatttgacttgaaatttattgttcttgtgttgatgtttgctcatcagagttgtgagagagaagaagttagatgggattgttatgtttgctgatgatagcaatatgcatagtatggagctttttgatgagattcaaactgtgaaatggtttggtgctctatctgttggtatacttgctcattctggtaatgcagatgaattatcatcgatcttgaagaatgaacaagggaagaacaaagagaaaccttcaatgccaatccaaggtcctagttgtaattcctctgagaaattagtgggttggcacattttcaacacacagccttatgccaagaagactgcagtgtatatcgatgagaaagcgcctgtgatgcctagtaagatggaatggtcagggtttgtgttgaattctagattgctctggaaggaatctttagatgataaaccagcatgggttaaagatctcagcttgttggatgatggttatgcggaaattgagagtcctttgtctttggtgaaggatccttccatggtggagccacttggaagctgtggccgtcgtgtcttgctttggtggcttcgagttgaagctcgagctgatagcaaattcccacctgggttagttttctttaatcattctctctgatggaaagcaaatttctcatcacattatcacttgctgagttgcagtcttctaacttgtattgtatgaacgcagctggatcataaagtcacctttagaaatcacagtgccatcaaagcggacaccctggccagactcttcctcagagctcccagcggcggcgatcaaagaggcaaaaagcaactctaagccaagagtgtcgaagagcaagagctataaggagaaacaagaacctaaagctttcgatggtgtcaaagtgtcagcaactagctgaagaagcttctatagatagatcgagtttcatttcatattctttttcaccgtaaatatcggaaaattgttttgtgtgcattagcttcattgtatacagtacaaaaatcatatgagatgttttaagttcttcaaatcgatacttagctctaaaacaaaacttggaagacaacatagtctcctgacttctcttaaccttaaaacagcaaaaatttcagacaacaaaaacaggtgcagtgaactccctaacttgagccatggttgatttctgttaaatcatgaccgagactttgactgtttcttctccagtttcattttgaggttggctataatcttatcctgagcctgtatctgatgttccttggcattgagcttctgcttcagttcttcaatttcttttgaatgaccttcgcagctgattgcgaactccatagctttgagtttttccttcagttcttccatttcttttaaatgatcatcctcacaatggtttgcatttgcctctttggtctcctcagattcatcttgaaccattttacgaacgtataaacaagctcctgatcctgaactcagcttaaacgcaaccattttttgtgccaaaccacctttctcctgaaagaaaaagacaacagatgcttattatatcgattttctttagatagtttcaggtcctgaaatgaccacagagatgattctaaataccttaactgcttctcctttaactttttcaaatgctttatttgcttcttctggactattaaaagtaacaactgcattgtaataacgtccttttcttttgggtggctgcccaaaaacaaatcacaaaaacatgatcctcgcgagagagaaaaaaaaaatgagtataaagattaggatgtttggatttatgatattaccataacttcaagtgtgaactgcccggtaataactacttttaactcttgagacgggacattgagagggattttatgaaggaggagctttgtcttatcagcctctctttgctttgcatttgcttctttggtctcctcagattcatcttctgtcttctgtctcttagaactcatattgctctcctctgttcgagctctcttggttgtagagatttcacccggagaatcatcatgaaccattttacgaacatataaactaactcctgatccagaactcagcttgaatacaaccattttttgtggcaaacccgtcttatcctgcaagaaaaagacaacagaaacttgttatatcaaattttctaacgatagtttcagatcctgataaaaaccagagagatgatcctaaataccttaactacgtctccttccacattttcaaatgcttcatttgcttcttctggactattaaaatcaacgactgcattgtagtaacctccttttctttttggtggctgcccaaaaacaaatcacaaacacatgaacctcgtgatagagaaaaaagagagtataaagattagaatgttcgatatctaatattaccttaacatcgagtgtgaaatccccgttaagaactccatgtaactcttgagatggaacatcgtgtgggattttatgaaggaaaagctttgtcttatcagcctctctttggtttacagttgcttctttggtctcctcagtttcatcttccgtcttctgtctcttagaactcacattgttctcctctgcacgagctctctcggaggtagagatttcacacggagaatcatcttgaaccattttacgaacgaataaactaactgctaatccagaactcagcttcaacacagcctttttttgtggcaaacccgatttatcctgaaagaaaaagacaatagaaacttgttatatctatttttttaagatagattcagatcctgaaataaccagagagatgatcctaaataccttagctacgtctccttcaacattttcaaatgcttcatttgcttcttccggactactaaaatcaacgactgcagtagaataacctcctgtttttggtggctgcccaaaaacaaatcacaaacacatgatcaccgtgagagagataaaagagagtataacagattataatgttcgtattataagttcgcatttataatactaccttaacaacaagtgtgaaattcccgctaagaactccatgtaactcttcagatggaacatcgtgagggattttatgaaggaagagctgtgccttaccagcctcctgtcttgcctcctgtcttctcttttcagccaccatcatctaatattgatttgcagataattttgtataggtttcagaagactataaatatatatacacattgtttttggaacttagtatgaattgtaaaaatttgccttacttcttcagttggttgaattaaagtggctgctcctttttctacagcagcaagtacaagtttcatggcagctgctgcgtcatgaacacaattgtgagcagcaccgtccattcgcacttcttgacctaaaacagactggagaaacaagaaatacacaaaatgatttatcaatcatatacatattcaggattctgaatttcacaacgagcagagaataataaaagcaaagcatgcttgccttgcatagattattcaaagaaggtctttgagtctttggtgcatcgacaaactcaaatacatatgaagtatctattactctcgcatgatctatcctcaacactgtgatcaaagtaagtcgtaagcacaatcgaaatttaataatatctcaaaacacataaagacgaattacagctttttgctaaccttgaagatcattatgcaaaccatgacctaccaaaatagttcccacagaaagaaacctacgcaattttttttgaatatctgcaacagaaagagtagctctctcaagatcctcagcagtaactccagtaatatccgtcttatagtcaataactggtttgtccggtttcacaaatttgtcaagaaccacctaattgaagaacatcagataaaaacaacatggttacaatgcccgatcacagatgaacatcagattgaatggtctagagctacagacctttaagtcacggtccacagcgccaactctaactaaagcctggctcccatcttcacaggtaaccatctcacaatcaatagaaagcattctagtagatttaatcactttcgacttcttctttccaagctcagttacataccaatcctgtttagcaatacagaaaaagtttttgataatctcatatgcaggagcaagagagggaaaagctaatatcaatttgacagaaacacaaacctcagcgtaggaagggaacgtatagtttccaggataatcgtcatgagtaatagtcaatcgaactagcctctgcactgccaacaacatagttatgaaccaatttgcttaaaacaaccaaaaccttttataattagaaatcctgaaaaatgttctccacctgctcaggagtctctttatccggagtctcttgcttgaatttctcaattagttcacgattagcaccacattgcataaccctagctattagctgaagcaagaataaaatggtaagaactaagaataataagttgtcattgtaagtgttaagttgtgatagttacctgcaaatcttctttctttttaaatgtcaaaagaaaagcaaccaaaacatcattggaacgtctcgcaggatcactcaaactcgatcctaattttttgtcgtaaacatttagaaattccttccatcctccgttctcgccttccaaacctcgtttctgtactagcttgactaggtctactagcaactaaaatcaaaatcccatgacaaattagaattcaccaaagtcagaatttgaagagaatgagagttttttagctgagaaatatctagtgtggtacgataacgaaagagacttacttttttctcagcagtggctagtttatgctccattaccaagagtttttttgacggacggtggttctgtgagttgaaagaggcggcgagttggagaaaggagagttggggaagacggacaatcgaaatttagggttttattcttttttatttcttgtttaataattttagttcgggaagcttatgttttaattactgttttgtcctcctatttaatcttactttgtttgataaaatttcagatttttaattttactaatgtttttggtttgaaggtttattgctaatataagcctcctcattggtccgtttaacacattgaagaagtctttgagaccactcctagtgtatttatctctgattcatctagaacaaaatctatgtctttactattttttctcaattctgaaatgtttattttgttggttcaatattaagtaaaatttgtaatgtatgatattttagagtgtattgaaaccccttttggctgagatctcatcatatgttcctaaaaatttatgtgttcaaggtatcgatgcattcgatgacctcctcattaattgttgtttctgttgcttacttgtacaagttgtaactatgtatctgtttctttttgtgatttacatatagaccaacaaaagaacataaccaaacaaaaacactcttaacaacatgatacatcaaatgccacacacgctcacagaatctctcatataagaagaagcaatgccaatccttgcactgcattatcagttttaccaaaaacacttttgccagcattggtagcctgatgatatcaacgaagtgtcctgtagaatctggcttctgctccacaaaccaagattgcttgaagtaaccaccacaacatatctgttttgtatacaaaccaattagaataaaactagtaatggagttgaaaaatctccaccttattaattggtcatcattcaccaagttctccttatcttttgatattaaattttgtgagcaaaaaaaagatgagtctttgtaaacgttatatcaacgaatggaaaacaaaccaaagtcatcgaaaaaaggaaacaaccaatcgaaatttccttattggttagattgaaattagtaaatggaaatcggatctaatttagatctcttattattagaaatagtgaaaaatcccaacgggtagattaatatcaaatcatcatttagtgaagcaaagatactctgtttaagaaaaaaggaaataacccaagagaaccttgtttgcttataaatatatatcacgctcttcttcttcttcttcttcttcttcttcttcttcttcttcttcttctaacatgaggaagaaatcccaatcaaagaatccatctacgagaaagaaaacccccaatcaaagaatccaactacgagagacaaagagatgagagacgatcaacttttgatcaaagacgaaaagaaacttctcagagtacgacacggtgggcttcgaattctcgtttccattgacgacgaccatagcccgacggcggagatggcgacagagagagacgactgagaggagagatcaaaggattctcgtttccattgacgacgatgctggaggaagaaaccaatcatcaaagacaaagaagcttctcagattacgaatgaagaagacggagaatttcagacgagtttccaacaacgacgcaaggtgggctcacgctggtgggcttttttatatgggccctttctttgctaccaaatccaaccaggtatttctttattcattctttttttaaaaaatctttttagtaaaactataattaaatagtttaaatctttcactaatacatttagagaaataaaacttactatataaaaccatgttaatttcattattatttattaaaaattagtttaagtgttaaatttttaaaacgtcggaaattaaccgtgcctaggcatcccgtccttaattggtccgtaagtcatgcggtgttcgaagttcggcaatgttttcacgtaatattgatttgacacttaaactcattttgaagaaataataatgattttcactaaaaaaataattaaaacttcaacttaaagaaaatagttaataatttttaactaaaatcatcttaatttcactattactattaaaaattagtttaatatgcatctcatcctttatttggtttgtaagtcttacagtatttaaagtttggaaatattttcacgtaatatagttttgacacttaaactcattttaaaaaataaaataaaaaatcacaaaaaaaaattaaaacttaaactttaactacataattaataattttgaactaagaccatgttaatttcattattacttttaaaaattagttcaagtgtttaaatttaaaaacgtcggaaactaaccgcgtctgggcatcccgtcctttatttggtttgtaagtcttacagtatttgaagtttggcaatattttcacgtaatatagatttgacacttaaactcattttaaaaaataaaataaaaatcacaaaaaaaaataaaacttaaactttaagtacataattaataattttgaactaagaccatgttaatttcattattacttttaaaaattagttcaagtgttaaaatttaaaaacgtcggaaactaaccgcgcctaggcatcccgtccttaattggtccgtaagtcttgcggtgttcgaagtttggcaatgttttcacgtaatatagatttgacacttaaactcatttaaaaaaataataatgattttcactaaaaactttaagaaaataattatttagttttaactaaaaccatgttaatttcattattacttttaaaattagttcaaatgttaaaatttaaaaacgttggaaactaatcgcgcctaggcttcccatccttaattgttctgtaagttttgcggtgttcggagttaggcaatgttttctcgtaatataagatttgacacttaaactcatttttttaaataataataattttcactaaaaggttttaaacttagaactttaagaaaataattaataatttttaacttaaattaatttcactattacttttaaaaaaatagtttaattgttaaatttaaaaacgttgaaaactaatcgcgcctcggtatcccgtctttaattggtccgtaaactttgtagtgtttgaaatttgacaatattttcacgtaatatagatttcacagttttaactcatttttaataacgtttgaaacaaagagtgtatgacataatggtttagaacctttgaatggataaaacagagactgtttggaccgtttaaacttgtcttcaaaatcatttttaccaaaatagtttcttaagaaacaaaacctttgcaaaccttaccaacacagctacattgtaactataagtaaaaaaaaatgacaattcattcccatcaaatgactaatgttgagattccaaacagagaaaacaaatatgacaccaaatcaatagtcaatacaataaatggtctccattgtaatgacttttctaatcaacaagtcttgcacacatgaaaacgaacgaggattacaaaatacagatagaaatttctcttaaaaagattttttttttgacaattaccgctttcatagttatagctgatcaagtagaactactagcattatcattgtgagaccatcttctgaatgtgcaagttaccaagtttcttccagcaagaaaccctaactttgacctaatcatcgctaatctacttcctccaccaccattacttgaaccaatctctgccacaattccacctgcttgagccacccttggctcctccacaacggtttcaacctcaccatccaccaccaccactgcttcggtttcatcaccatccatactcaccactagtgtcctcctttgttcacgcagccaatctccaatctctccagtcacaactttacatttcttcaccttcaatttaaccagattaggacaaccaacagcgagcgcctcaatccctcgatccgaaacaggacatcctttaatacagaatttcctcaatgctccacatttcctagcgatgcaagcaatctctgtatcgcctattgttccacttccgcaaagtgctaaccgttcgagtttctcacagtttgaagcaatggctgctaaactcatatgtgttgcattaacaccaatcagcacaagttcttgcaagtttaaacagtgtttggctacagaaagtaaaccttcatcacctatcctattagtcctccaaccatcaatatgaagcttcctcagcagcttacatctctcagctacataaatcagaccaaagtttgaacattctggagttttcactatatgcaatgtctcaacatttgagcatttagatatcgcagatagcccaatgtcactaacttggagcctctctaagtgaatttcacttaaagaactcttaccatttgcaatcatctgaagaactttatcccaatcacccaaacaacgaatgattttcagtgttttcagtgttcttgtagtagcaagcaacggttcaaatacctggccattaacgagctccttcaagcaaatagacctgagcgaagaagatgaagcatcatcaggtaggtgaatcaactcagctgcttcatgaattcctcgaagtcgcttcaccgacaattcctccagaagcttacaatgttcgagcatcgcgttcacgcctttagctccgaaattgcaagatccaacagatagcttcttaagatttttacaattcttagcgaagtcttccattcccagatccgtaatctcgcgacaaccacgaagctt

SEQ ID NO: 978 - DNA, 15290 bp, Arabidopsis thaliana
aacacgagtcagattcaaacaacgaacagagatcatagccaaagcttcatcgctcaagctaacagacttccgatcacatcggagagcaagcttcgtcaccgaatcgaatcgattgaacatagaggtaaggaaagaggagatctcatccttagcatctagagataaccgatgacgactctgaccgtcgacgagcaaccaccgtttacaaacaagagagcatcgcttccgatctccagctccaagaaactgaaacacatgagctaaacactcatccggcagatctccggtgaaatcccgatccacaacattccccacagccatcgattcacctccagcaacaatcaccggagaccataacctcaaatctaactctcgtccgttcgattccgccgtagacgacggcgcttggcccatcaccaaccgaatggtttcgatttcctcctttctcttcctctccaattttttttttttccctttattttattttttgttgtttttttggtttgaggaattataaagtacacacagtaacggctcatcccgtcaaataagggaacacgtgtcataatcgtagtcgacacgctcgacccaactcagactcgcacgcgctttattcactttcttttcaaccgtcagatcttaaaataagtgttgagctaatcgtgatcgttgattacttcgactttgttaacttttttgtttttttgctctttatttataacctctcgtcacgctcttcttctgcgaccatcattacttctcgtgttcaacggtcaaacttcacgttctcaagacactacttaacttttgttttcgtatgctaatgactactattaattgtttttttagtagtattagatttaaagtttgaaaaagattaatagcagttacgtttgagacagatttaaattaattccccaccagttgaaagaatctacgcattacgcatatgcttggtttttaatatgtttttgttggttcttaaatgtttgatggcataatatatctttcatttaatatatattgatgaacattaatgcaccttatctaccaatttgatgataatgtagggaaaaaatagcatcataatagataatgataatatctgacctttttcattggaccgtcttgtgtatcaaattaaaattattaacttgcttttacttaaaagcccataataacaatatttttttggatccgaatattaatgaaaagcccatatctaagttttatgggccaaaacgtataaatcgaataaataaataggaaaaaaattgagtattattacttttttttttcttttttttttacgacagtattattacaaaaacacttagaaaagaaagtgccacatttaaatggggtttgttcctttttctccaaccgaaaacacaatgataatgcttaaaccaaacagtagtacaactctttccatgtttgactccagatcttatgatcaattgctaatccatgtttcggttatttttttgatagatcctgacacggctttttaattataaatttaaattccatacaacatttatataaatcatgattaagtacttacgtcagattatgtaataattagtacgttcatatagtgccgggaggtttattagtaccatttttactctctctctttttcttcaattacacatttactttaaagtcgattatttgattggatgctaagttttagaaaataatgtcaaaaattctggttctcgagaggctacaaaattttaactctcctctctttttttttattaccgtattttctgtaaccatcatatctcccacccatagtgacttttttacatgggactatcaattttacttacaaaagttactggtttacaacggcgaccatggtttgaattcagataaagataaagaaggaaatgcagagaggtggggacaaattacaagaaggaaatgaaaaataagatgtgaaaggtggaaatgagaagtcgctattaaactttgtagtaatctctctcagattcaggcttcgtttcgcttgttaccaatggcttctttcacatctttccctctcgtgatttacttatatcttatctttatatgtctgtcttgactcttgatcatgcattcaatacaaataacatccaaaatattacttgtgtgtttctctttcttttccaataactaacatggagtactaataatattcagattttaacataaatagtactccctctgtttcataatataaattattttggaccaattttttgtttcacaatataaattgttttcaagtttctatgtaaattatatattattttattactttatgattatatatattaatatgcagtatcttttatgattggttgaactttttaatagtaaatattcttaatctgcgtgcttttatctaaaacaatttatattgtaaaacggagaaagtattaatttgatttgttctttctttcgttttcacttctttcatttgaataatatcctttgttgttttgttcaatctttcatttttgtattataacgaaactcaaaagaaggtattttgaccactaatgttgttgttaaagttttaaacatcctttttggataatttaatttttattgtaaaggcaagaaatacataaatatttaatctgctaatcgccttttttttcttgcctcgaatccgaattttaacatataaagaagcgagacaggttcgaattaaataatctctcttttaaagagatctttatagaatacataaaaaaaaatcaaactatttatagaaaaaataaaataaaaacgaatttttgctttcaatttatgtacattggaccacagaatctgcaaagctatgtatgtatcaagaaagacgtgactataataaataccacgaacaataaataattagattcttattacgaatcttttatgtattcccctaaaaaaaaccatgtcataattagtctcattaaaatacgattgtatgtaaaaaaaatcataccgtatgtagaaatatggacttcattctgtaaataaaagaaaaattaacgtgtcaagatctttgttaatcagtaattaaaatctaaaatgacttaactcaatccgcaacacataggactgggagcgtaatcatcacgatccgatcgggacatatgtttgtctccatcgtacggatagggtatatgagcgtgtttttcacgcgcatcattcgcgtgaactaagaatgctaatgaattcgttaattcgttaaaataaaataaaataaattatattagaaattaaaagaaaagaaagaaagaaaaaaaaaaaagacaaggcgtgagataataaaaccctttggctttctcatagagatttgtccggtctcttgttcctctttctcctttcttcactgtagaatccgtcgaccaaacaactagctccaatggcataatgagcattgtagtttgcaatttcttcttccgtgaagaagaagaagatggctttggagaaagaggaagaagcgtcacaaaacggtgcgttttgtgtccttgatgggctctattgcgaggaagaaaccgggtttgtggaggacgatcttgatgacgatggagatttagattttctcgagaaatctgatgagagtgttgtaaagtttcagtttttacctcttttggatatgttcttatgggatgacgatgagattctgagtttgatttcaaaggaaaacgaaacgaatccatgttttggggaacaaatcttagatggctttttggtttcttgtaggaaagaggctttagattgggttcttagggttaaatctcattatgggtttacttcattgacggctatacttgctgtgaactacttcgataggtttatgacaagtataaagcttcagactgataagccatggatgtctcagcttgttgctgtggcttctttgtctttagctgctaaagttgaagagattcaagttccattgctcttagacctccaagttagtttcttttctctctctccttcttataatgtttgctgaaatgctgagttctaatggagttgttttgttgtgtatttgtggtttaaggtggaagaagcaagatatctctttgaagctaagacgattcaaagaatggagcttttgattctttctactcttcaatggagaatgcaccctgtgactccaatctctttctttgatcacattatccggcgatttggctctaaatggcaccagcaattagacttctgtaggaagtgtgagcgtcttctgatctctgttattgctggtgaggtttcccattttaaaacctttacgatgtttttgtttggattcttgttgcttaaattctgagtcttggtcgcagatacgaggtttatgaggtacttcccttctgtcttagctactgcaataatgatccttgtcttcgaggaattgaagccatgtgatgaagttgaataccaatctcaaataacgactctactcaaagtcaatcaggtctgttgcttaaaaaggctttgtaaattagtccagttataatgttaaagatgagaatctgattcagcattgacttcacaggagaaagtaaatgaatgctatgaactgttgttggagcacaatccaagcaagaagaggatgatgaatttggttgatcaggacagtccaagtggtgtattagactttgatgacagctcaaatagctcctggaatgtctccactactgcttcagtgtcctcatcatcttcgtctccagagcctctgctcaagagaagaagagttcaggagcagcaaatgagattgccctcaataaaccgtatgtttctcgatgtgcttagtagtcctcgctagtacctttctttgatcaaatgtgtcaaaacataaattcaatctctcttttgcttattattatcggccatcggctacaatttgaaggcagaacattttgtgataactctaagttaattctgcctcttaaatcataatattcattgatcaatcagtattgtgttcaagtagaatgttgaatagagaattcaaaagtcaaaaagtaaggagtagtacatcgtccttgaaatctcaacaaacactagcaatatagggctttagactaagtaagaattgactgatatatgagcatcagtaacagtaaaaagtaaaaagtatctctctctttctttctatctatcactctctctctctcgtgatatgtcaattgtttgatatggaaatctcttggacgtcttttaattttgtggagataagattggaaaaagaagagtggttgatataaatgataaacctgaaacatctgatttcttctgttgggttagtaaaacatgtgaaagaaaacctcagttgtaccttttgagcagacctaggcagaaacaagaagagtggttggttttttccatagattaatttcttttgtaaaaaataatctctttaaattttggggtaattttcaattttgatttgaaaggaaaggattttgagaccagacaaagggtggttcaagtactcgtcttgtttttatccttgaagatgaaaaaaatctggtggacatatatgtatgtaagtatgtaacaccttcctcctatgacttgaatttactgtcccatgtcttgtcaaagacaaagacaataaatatgttattagcttttaagcaccatctgtgaataacccattggacatttatcagaatttcagacacacatatatatagattctgacatatatatgaattaatgtgttggttttattggaatatgagattttaagtagctttcttggggtttttaatattacttgagatattagtgagtaaaccaatcaagacctccctaataatctttgatgatttagtccttactcattcaaatggtaattgtttttgtatttttttttggtaaaatggttttactttagctatcgaaattgatgatattgctgaaaatagcgtcttcaacggtcggatatgtttttttagcagaacaaaaagaaaaagcctgtcatttttttttccatcataaaaaaagaaaataaaaaagcctgtcaattatagaaaaaaagctttataattttttgttttaaagtagtatacgtacgtcggtctttcccaccaacatcccacacggtaaagctcacgtttttgtactccacggtctttatacgttacttatatccttgttacatatttaaacaaattcagcacacacaaatagttgggaaaaataatgagacacagaataaaataagacatgaaataaattaaccaacgaaaaaaaagaagaagagaaacttccgatggttacttattggtggtgatgaacaaaaatacttcttttttttcatgcaaagaaaactaaaaaaggaataaggttctgcctttaatgagttatctgataagaaataaagatttggaaaaagcttcattcatctttattctgaacagtgttataagctcacatttttactttttgaggaaaaagaaaatcatataaacctttttatttcatgatatttgtaaccaagaaaaaaatgttatagattaaaaataggtgaagctaataagattacgggtctcattatgggaatacaaagaggattttttacagtggtaaagaaagtactagaaaatagaaaaccgattatttatttagagatgacttctttggcagattgaagggtggattcaacggcagcagcagctccgactagaacgtcgccgctagttttgggatgagattgatgaaccacttgtacatttctttgctctgtgcctttccccgccgaggaacgttgctccgttgtttccaccaccacttttgatgatgatccatcctcttttcttttttcagtctccatttccttacaagtaaaatcaaattacaaatattacaatttaattaatccgtttcaaatttatattacaattgaatgatttatcatattactaaacgaaaaatacaaagaagtaaaagaagatgaattcatcataccttcgtggattttaggttcatagctatattgtaatagaattttttaactggagtttaggaaaaagtaacagaaattaaatttataaaagaaattttctaaaagagcagaaaatcgtaatttttgggtatacgaacgtccggttcttgcgtttgtctttctgttcctctcaaaatatcaataggccagcctaagtgttaggacaaacttatgtttaattattcagcactgctactaatcaaataagatgtgaaactgtaggggcaaaacatattataccataaggaccacaaaacatcacaacaatgatattttcaacagagtactagtagagtatgtttataaggagggatagggaatttttttcaaacatagaacagattctctgagagagaatgttttcataagagagtattatatagctaactctgatttcagcaggtcaagagaggagatgaaccactgcatttgacatcagaagcatcagaaaggcgttgtcttggagagagtgttgtaatcgctgcaacatctacgtcgagattcactatgagcttcctcttctgcgactctgttacactgttccttctctcttctgatccttcagcaatgggactcaaagtctgtgtctctgctgctccaacgtcttctccatctgctgcgtataggattctttttatggaaccaacaagctgcaagacaaaataagagtgacgatgagaatttaaaacttttatggagtttgttgaattgagacagaggagagattttgcatacaggtaagtgctctgtgtctgggttttgacagagaatctctacatctctgagtttagagaaatagaaatctctctctttctctaagctgtcaatgtaaagtttcagttctgtgatctgtggatcaaagaagtgagttagtgagcttttagactttggtgtagtttaagaaatgagtgtgttgaaaagatataccttttcatcataagcaggcactggtttagattgtttagctgatggttttgaagagtggtggtgattcccagttgaagaatggtgagtaccggtgttgttggattgtggctcatgcttacgggttccatttgaagatgaaggtcgaggtggagctgaagaagacgaactcttgcctgattgttgtgtagctgcagctctcttcgttgcttctttacctcctttgctggcttcccttctctcaagtgcatggtaactaccgatgaaaaccaaatacaagaaagcagattcagaaacgagtaaatgaataatggatcatctataatgatgaacttcataaaaacagtatatgaagtagactgttggctatatctactcagaagagccagtacactaggaaccatgattcatagtcacaaaatccaattctttaaacggaaaaccgaaattgtcacacaatagtcatattactcaagaagccaagtataaagagattctggaacaaacttacttatgctggcctccattaacagaatcacagtactttttcatccactgcataaactccaagttatccaatggccttcccttaacgagtttgctcacttcgatgtgctacacaaccaaattaaccaaacaaagtcagttctattatatgcctcctcgaattaaaacccccaaaaatcgataaaaatgaaggaagaagaaagaggaccttagtgatcttgagtttattaaacacatcctgaagaaccttatagttctgaatcatctcatattcactcttcgcatcaaagttaaccttgtgcatcggaacagtcccaggatgcaccgaatccatcagctgacaatgaacagcgcctgaacaagcctataaatccatagatccgtattcagatccagaagaaacagataataaattcatcaaatccgtgttcaatttccagatcaacaaatcaaaacacagataagaaaccacccattccgtattcaaatacagaatttcaccgtacttgttactagaagacgataatcgtaagatccaattccaaatccgaaactaggttcaggaagagaagcgattttactcaatagattacctcttcgactttggagagattgagttggagagtagagttaatccaagccagaatctccgatctcccgacgaaatatgcagaatccatcatcccaatgttcgtagccatcttcgattttctcaggtttctctctctggttctttctcgatctgtctctctctaacggctcttttgaaattaggagaagagaacaaagatagaaaataaagagacgagagcggagttttcaattcaaaatatccgaatctttacccgctctcgatatttcggatccgggtattattaacagaattaggctaattactaaagcccaaaagcccatcttatttaaccacccctacccaataggccaatattattatgggaaacaaattgtgtcacacaatagaaaataaatttgtaacaagcccagagatataattgtcactaaaatcataaccaaaaataaattcaaaatcagaagccacaaaagaagatcaaacttgcctatcaatctaactctaagtacacacagtcaagttatttaactctttcttggtcttaattattatcattactgttgactagaatgaacagggaatctctcgagaacttgcaaagcctctttgatattgggccttctctgtggtattggagacgcacaagctaggcccattttcaaacatgccaacacagcttcttctttgccttctaactcagcccgtatagcagagtccgccatccgaattgcccgctcaccgtcatcaatcacaagcccattaacctgtccaagctcgtcgaccaccacgatctttcccgttagtagctcaagcagaataactccgaacgagtacacatcccatttcgaattcggcttaatactccgaagagattctggagcattgtagggtaacccgactgaacttggacttgggcttggactcggcccaaactcaagagacgttgtggatctcttgcttccgaatattggagccgatccaccggttctataactcatgtccccaatcaaaagcttctcaagaccgaaatccgcaactttaggctccatatctaagcccaaaaggatattgctaggcttgaggttaccatgcacgtacttcttgtcgtgtacgtatgttagcccgcgagctatgccttttgctatcttgagccgagcgtcccaaggtaaatgacaaggagaggagcccactttccctgcaattaaaagaaaacaaaacacaggaccgtttattaggtgaaatcgaacatgtacacgttagcaaatccctcactgttacttaacaatacaaaaagacaaatgtaaagcaaaggacttgcatctatcaataacaaaaatacaaaacctctatatatggggctcaacagagagatttcactgaaacagaactgtcactatcttgcgcctgagataagcttacgaagttacgataagataataaaaaaaaaaaacagtttttgagacttgccgttgactctcgtccgatcattaactgacatacttttttagttggaaccaactctctgactccgaaaccgacacttttcactcttctgcttatgttagccaactattacattaccctactaacgtaagcgtgttgattaaaaatcaaagggaacggaaaaaggacttacggtaacgggcgttagcgaggctgccgttagggacaaaatcgtaaatgacaagtttctcgtcggatccccaatagaaaccgcgaattcgtaccaggtttggatgtattaacttagccacggctcgaacctgagcttcgaaatctctaaaccggtctaaaccgcattcagctattcgtcgaaccgccacagctgttccgtcttgaagcaccgctttatacattatgctcgaaccggtggctcccaaaatataagctgatgctttgagaagcgtttcgatttcaagctctttctctgaatcgagattcactaacgttccctttttttcttgatcgtctaatcctgaccgtcgatttggtccgaccgggttctcttcgtcggattcggattccgatgtctcagattcctcttcttcttcttcgcagtcaccgtcaacgtaaacggatttgcgtaaacagtaccattttgagaccttggaatctgttgatgacgtggaccattttgacgtagccgttacggtcttccgttttctcgactggtaaatgtagaaaaacacaatcccgaggattgctaaaccggctaagtcaccgacaacaatgccaatgataagcaccggtttatgatcccattttgatttcggaccggttttggagctaattgggtgattggttaagccaatagtatttggtatagcagctaatgcaggaggagaatttggagtcggcgatggaggtggagaggttgcttcaccgtcacgacaagggtgttttgcatggtcggatccgcagagacccgggttaccggagaaagagttggattcttggttatcgagaacccgaaaacccgggatttgacctgtaagttggttgaatgagagatcaacggtggcgtcttccgggatttcgtcggcgaaacctgacggaatctcgccggagattctgttgtacgaagcgttgaaatagcgtagacgattccctctgaaatgtgacggcaacgagcctttgatcaaatttgacgagagatcaagatactccgtcgacttaaaacctcccggaatcccgccggataaatagtttttctgaagtgaaatctccgttaagttccggttccatcctaatgtgttcggtaattcgccgacgaaggaattatcggagagattcaacacttggaggttcgaaagcgcgccaaaactcgccggtagtgcaccggagatgtgattatcggacagatcaagaaatcgaagctccgtcgcgttgagaagcgaaaccgggaaagacccattgatggaattgttggaaagatcaagtctttgaagtgaattgagtgaacccaaatttgaaggtagtgtgccggtaaggttcgagcttggaagtgacagaacagtcacgtgccgggaagatgcatcgcacgtgacaccacgccaagagcaaggagtctcgtcgtcgaatctccagctccgaaaaacgtaaagaggatcgtcaacgattgagtaacggaaagagagaagaagaacaccgtctgtggtcagagcaagagaggttttgtcgcagaggaagaaaagaaaaacggtaatcaggaaaagataacggtggagatcggcggcgactgtcgtcatcatgcttcaagcctacgcatcgatagagaactaaaagattgattttttgaaaaggccatgtgattgtgaacgatatatgaaagtgtttatctttttatggaattcttgatttgagtaattctttataaatataacttttgtaaataaaaaattctatatcctatgtaaattgcacggaatgtgataacaaaagttaacactgttttcctattcgtaaattatgctgacgtcgctttgtcgtttttcacgtttatattcaacgtggaccctaatattggttcatcattgtttacattgatcttcaaagaaacgtaacaaaaccatataaatctggatagttttgtttacatttaaatctttgctagatcacagaaactatataatatactaattctgttactccttttgattatgacggaaattgtgacgtgagattacgcatatcgatcatgtgatgtgtgtgaagaattgtattattagccaattaactaatatctatggaaacatgatcagatgggagaatagtatctttgctataagacattcacaaaaagttcgaaatttttgcaggtctctcactgacttggatttacttatatatgaccgttttattattgttttctcattacacctaatgtttctctgatcatagtacatcttatagatataggcttattaaactaatctataagataaaaataaaactaatctagtgattcgttataatattgactttatgcgcaaaacacataaataaaaacaagtgtttcatataaaatattactagatatccttagcaaaaaataaattaacattactagatatacctactttttcagaaataatattcgtttcatgatctaatctctgttttaaatgcagttataattttgcatataccaaaaataaaatcagaagattctttttaatgaagtgcaagtagacatttaatgtcttagttatataagaagaattcgatttgattcatatttatggaatccttatatatgtagtttaacatgtactacgtagtaataatcccaatggatcacgactcacaactcacgactcacgactcacgagagttagactgataaaaaaaggaaatatcaaaaacactaaacagttatgtgttgcatcaaaaatatataaatgtagtactgtatctaccaagaggtcaacatcacacgtaaataaatgcatgtcaagattaatgtacaccgggtcaaattgattaaaattggtccccgttttaattaaatttcgcgagcgtcattgtggtccttgttatttgattgccaaaatcacaaaattgtttatgtataaaatactgtatatatgttttaccggttggtatttgtttgtttttgtttgttaccaccatatgtcacggtttctcaaacgattaagtaatcatgagatgaacatggtttatttatcgtttaagaatttttctgcaaaccagtgcaatcactggaccgaaaaaaaatccaattatttcttctgctgtgtgtgaaacaataaaacatatgagtgtcgtgtagtccaagtttcagcattaattacagtattaatcgttgtgtgtgaacaatacccactacagtgatattatagactcatagttgagtttgactgtaaattgtcagagcaaatttacttatagtcgacattcatgttacaaattggacaaggtaagtttcgagattcaggttcacaagctatttaccatttctgtatgttttatcttcctaaacgtaaccactatgtgattagtctgtaaactccaatacgaatatatacaaagctgtagtaatacattattaattagaggatggctactagtttggcggtggacaaagacgggagatgcatgaaaaatggcgttttctacttaccattatgcaaaactccaaagttattatcgtcttgcaaagttataaaccaatcctgagttcgacaatttttcaaacagtgataatataataatacaacactgcgcattgtcacttgatcggtcgggtgtttttggatatattatatgatatctgttatgactttatacattctttcttttcctccacaaatatatgatgattttattcgagaaaataacggtcaagaaaattgttatagttcctagagtatttgattatgccaataatatttagattgtttgattctttgaagtgaacatgtcgaagccatttctggtagtaagctactatctagtggcttttaacaacgacatatgattagaatgattaagtgaaatgggtcatatgattatttaattacttaatgagcttttcaaaagacaaaagcttaaaatggcattttctttgttaatgacgtgacagaaataaagagatatttattcttcttcttcttctttaactgatcatatttattctatgtttataaataactaatcgaacaatttaaaaggggtagaaactagaaaaagagtacactaaaaaaaataaaaatgataactatagaagaagtaactagaatatattcatcgtagttattacattctggcgagtaataaattttgtaacatttattatttagctattcaaagaggtgtaatggtcttgaagatatattttaaaatcccttaaagtaatgtgttttttcctttttatggaaccttttagaaagatacataaaggaattgggcacaaaattaaaagctcgaaaagcttcaagtatgtaaaaaaaaaagctagggaataaaatttagcaaatcacgtgtaagagaatttgagagttactaaaaataagataagatacttttatgatgataataatactaaaatcttaaagatattattctcattggattggttttgtgcgtcccttaatgggtaagcaaaaagtactgtaaaacccatttggcatcgcaaatcaataagcttttatgggtcagtcagtccattggttgggcataaagattatgtgttttctttttgcaaatttgtaatatatcatgtccacaaatagatctaga

SEQ ID NO: 979 - DNA, 72698 bp, Arabidopsis thaliana
aagcttaatataactggtgagaaatacattttaatatagcaaagcagcgaaatacataccattcgttaaccatttcgtgtgtttcgtcattagcattttgagttagagtttgcctttagatctaaccagtactactaaaatgctcaacgattacaaaatacaatcacgtatcacattatcacattttaagattcctcgttcacaattctgtttgcttagacttcaaagaacagagtagcttttatgtgatatctcaacgaacactctatattactatactcttcatcttcgtttgctaaaccgggaaggactaaaccggctaagatcaacacttgtggctacaccgtctacaataagctcagccaaagcagcaccagtggctggaccattaagaatcccccaacaactatgccctgtgcctacataacatcccttgattcctggaatctctccgatcacaggaactccatcttctgtgctgggcaagaaacaagcttgctctgctttcactagagcgttttcttcgtttagatagctcgagactgttttcgcaactctcttgagaacctggatcgattcaggattgcttgtgacctgatcagcatcatcaggtacctcttcttgtgatgacattccacatatgtacacttcacctgtccaaaaaaaacaaacaacaaaccaaagcaaccacttctcattttttccattacttgtatcagaaaacgagattaagtcaaagtaaaatcacatgaaagaaccgaaattttacctgtgggacgagggtatacttcagggtccaaagcttcaccaccatgagcaggacgataagttaagaacagggcatgaggtgttatagcatttggttccttcggttccaagacaatgctatgagctttagtacaataaaccctaaaaatcgaagacaacagctcaaatttactcgaccatggacccatcgccagaaccaccacgtcagtgtctataactctcccaccttcaagcactacagagttaactctacctgattccactctcacctcttctaatttcccgatcacaacctcaacaccgtacttctctctcgccgtcgataaaagcttccgagtaaaaagttgaggatgcacttgtgctgttgtttgagttgtaccaatcgttgatgtgcttttagctgggccgttgacccaatccggtaatcccaaaccgccggaaccgggttttgattccgtcacggtgacgctaagagtcgtgagtgctctgtatccgtacgattcgacaccgtttagctcctcagcgagcgatcgatggagtttaaagctcgcgcgtgctaaatgcgcaacaggacttccatcgcaccaatcgaaagcgagaaatccaccggctttaccggaagcagcgcacgcgacggctgatttctcgacgagagtgacggcgattcctttcttggcgaggaaataagcagtacagacgccgattactccaccgccgcatacaaagacccgcttcgaggtttcttcaccgatttgttttttagccgccattgatttcgatgagttggagcagatcgtgattgttcgtcgggttaacaccggagggaataataacgatgagatcaccgccatcaccgagatgagatagatgatgactcaccgagtccacacgttagttagaaattatttattgggcttagtttctttttgggctgatcttttgaagcccatttattgtataatctctacgctattgtgtgttactgtgtttcctatgatatttagtagctgataagtgataactgatattctctgtatgaatttcaatgaatagttttctgattctagatgttttaagaagttgaaaaggacttgttgaaataaattatgggggaaaaggacaaatgaccaactaacaatcagataggccattccaaaattgggctccaccactttgacgacaaaagcccatttatagggcggctctacttcggcctttcatcaaccacacatacactcctaatgattattattcaatatatttttagtaggtactgtgatgttgttaactttcagttagatagacccgccgaaactttttcttataatattacatataatttcgctctgtttataatcattttattcctctacttaaacagaagcttctttcattctttgtgttcattgaacttgtttactatacggaaagtttctgcaattctataaaaatatatataaaataatgaactgtttatagaattgtacttacttttttggttttagtgaagcaaatttctatttaatcacacatttactgcactctaaaaaggtgaaaacctaaaatgtaatcgttcacacattatcttcatgttcaaatccgatggaatatttatcgatccaagagtttcaattaataatttgcaacataatcttcttatgcctttcttatttagcaagtgtgatggtcgatccattgatcattgttcatgaaagttgatgatgtggtcgatattttctccacatgagaagtattgttttgaaaagaatatttatcatatactactattattgacagaaaaaacagtgtagagagtattgttaatattaattaagtcaaaaaaagccggcggccaatgtggggaaaaagcttcacacactttcatgtagtaatctgtccttttgtttctagctttatattgccctcgcttttgcccgttcatgactcttatgatgcttggtcgtaaaacgtgattccatgcattatcttatagagttatagtatatagatattatcaaaatgatcaagtttttaatatcccaattctacatttgaaattttttaacatttgatttacaaagttgacgataaatttcagatttgaagacgaaataaagcaaatctttaaataagtttttttggaaatatcatatgatatcagaattctaaaaaatccaacaaatcggtaagttctaacatataagatgaaatagtacttggtaggtacaaaaattaaacgttttgattccacacatacaaaaagaagaagaaaagagtaactttttatttgtcgtccaacaaagaatcgcttttcaatcaagctttagtgaaggtgttaggtgtgtgtggcttaagcatatacatcagaagaccaacaaaatttatcttaagcacgaaggtcaccgaacgtagtcgtttcaacgatgaccgtaccattaatgcagatttgtagtgcgtgtggatatatacatgcacacgtgtggaaggtgaaggtacaaaatgtgcatacggcttaaggataagcgagaacacggaaggatattttgtagcagcatctttctattctatgcaactaagtaaacgaaccacatgcacctgttttctttaatttattgcctttgtgattttttttgttgacaccattatgttttttttttgtttgtaaaccatataattaagtagtttccctaaaccgttaacaattaatacattctataatgtcgaataaaaagaaaaggtaatgcaagtggaagaatatctaaacacgttagtagaccaatagcaaaattacagttgctagcttacacgacaggaggaacaagacaagagtagttttgcctttgttaagaataattagcatgacacgtcactcaaacttacacgtggaaggataattcatggacacgtggacatactggaaaacagctgttaaatctttgtccggttatcgtaagtttttgaattttaaaactgtatttagccgaattaggtcatgttccacgtgcctttttttctgcaccactatctcttttccacaagaggggcaatgattttttggtccaaaaatatacagttgtaatcttggacggtgtgtcttaaataaaataatatatggacggtgttttctttaatgttttctatgttcatatgaacttctcggtggtcgtttcaatcacaaaatttatcataccagaaaacaaaatattttcaataattgaggctgtacgttgtgtattttaggttttttctttagattgttgcatgttatattttcagtttactatatgttgtgatgattattcgttacaaatgttttcaaaatgtcatactatagtagtcatttataatagatatgaaaaatgatcacagttgatttgtttttttggtggactacgaataaaatcgttttggtaattgtctaatcttcgagtgagtaagacaccgtcaatcaaccatcaatatcatcaatcaaaaccattattgatctattttttggtttaaggaaaagttggtaattgtaaaacgacttcaataaaatatttaaaacaaggagaccaaaaccgacactcggaccattgataatagaaacaacgagcaaggttatagtagtatagttgagtctcacaaacgaacacgtaaacccaatataataactacgcaaggttacatctagagcttattgttcccatcacaataacctcttggcattattaattatcaaattcactcaaagtattaaactcctgatgtctaatagattatcaacaaatcgacaaaaatgtagatatataactcaaaaggtataaattcaaatgtttggtggggttacgtaaaaacttgaattattaagaactaacaatactatagtttaattaaaaggagaattatgaaccgttagagggaaggttagggagcgtgcatgaacattacctgacgtttaccgacctgattcgtaccgtacataccagaacaaagagcttttaaaaacccgcgttttacgaccgacacgtggcagttcttaaatggatgacagttagtgttttattaattgtttttgtttgattaacaagttttatacagcctggctgtttctattcgtattttcgatataataattaaatatatttcaggaaacaaaggcagtgatgattttgcgttccaattcggcaacctatgttgtcgttttctgccacgtcaaaacctcctatcttttgttaaccgcacattttacatcacgtttcctaaaccgaacattaatatctaaccatttttatacattcacttaatatcgctcacacggttctttgtcaatcccattttaatccagcttcgtttcaaattattgaggtttagatctttttatgatcatagagcaactatatatagatttagtattgtcaatttgtcatgcactgttatatgcatgaattaggtgtttgtgtgttgtttagtaattaattataccttcttagtgacaatttgttttctttattagtaatgaaatttgtggtcaataattttgattagttttcaacccggaaaatcggttatatgtaaagtagatattatcataaagtttttatgtgaagtgctatacagcctggcttcgctattctaaagtcaagactaaacataaaaataaataaaaactgtccttacccaaacctaaccgttatcatctttttatttttttcttcagatatttctttttcatttttatttcccctataaaaaaatttaaattcacctcaaattgtgcgaatattatcatggctttgctagttgggtttcgtgattttgtctctttaacttcttactttcgccacgcgcttaaatggcgcgtgtactcacaaactcatactttgagactcgactgatctccacgctcaactatacgaaattgctgatcttgaacaaaattattacgaaaacgacaaaaaagacacatcgacgtagtcaggcttcgacgcgtgtccacttacagctgtaccgcaaactttgaaaaaccgcttgcgtggaagaagcgttgcccatgacttctccaccgtcttaaccggtttccggttatcctcctctcttaaatctctgtataaataattttgtcctctctttagtttctcgaacttgtttttggttcatctctcaaaaccaaaatcactaaagaggagaagattgctaaagtttgataaaacattccaaaatcaatggctgataggatcaaaggtccatggagtcctgaagaagacgagcagcttcgtaggcttgttgttaaatacggtccaagaaactggacagtgattagcaaatctattcccggtagatcggggaaatcgtgtcgtttacggtggtgcaaccagctttcgccgcaagttgagcatcggccgttttcggctgaggaagacgagacgatcgcacgtgctcacgctcagttcggtaataaatgggcgacgattgctcgtcttctcaacggtcgtacggacaacgccgtgaagaatcactggaactcgacgctcaagaggaaatgcggcggttacgaccatcggggttacgatggttcggaggatcatcggccggttaagagatcggtgagtgcgggatctccacctgttgttactgggctttacatgagcccaggaagcccaactggatctgatgtcagtgattcaagtactatcccgatattaccttccgttgagcttttcaagcctgtgcctagacctggtgctgttgtgctaccgcttcctatcgaaacgtcgtcttcttccgatgatccaccgacttcgttaagcttgtcacttcctggtgccgacgtaagcgaggagtcaaaccgtagccacgagtcaacgaatatcaacaacaccacttcgagccgccacaaccacaacaatacggtgtcgtttatgccgtttagtggtgggtttagaggtgcgattgaggaaatggggaagtcttttcccggtaacggaggcgagtttatggcggtggtgcaagagatgattaaggcggaagtgaggagttacatgacggagatgcaacggaacaatggtggcggattcgtcggaggattcattgataatggcatgattccgatgagtcaaattggagttgggagaatcgagtagacaaagtgagattattaggaaactgtttaaattggagaagaagaaaaatgctctgtttttttctcctttggattaggcttaagaattttgggttttaaggaaatgtatagaggaaatcgagtgaacaaagctcgagagctggggacgtagtgacgaagacgaagatcaaatttctcttaagctattcaggaaaataaaataaatttttatttataactacgcttaatgatgataatagatcaaattaatacacaaagtatcacaaagtgaaagataaatgatccagttaaagaacaagtttgtcgaggattggtaaagacttgcatttggcaactaaaggcacagatttgggcatggtaagaccctttccttccgacatgtcaacggcaacgtcattgtctctctcccaatcgaaacactggatcaatgagcctaaagctaagctcagtactagttgggccaggcccataccaggacatgctctcctaccgattccgaaaggcagaaacttaccacgatgggtctctgattcaaacctctctggtttgaaagtttctgggtcatcccatacatttgggtctctctgaatagcccacgcattgataaatagccaggtgcgacgtggaatgtcaaatccagcgacttcacagtcagtggatgaagcgtgtgggacaagtaagggcgccgccggaaacaaacgaagagtctcagagatcacattgttgagatagggacacttgccagtatctgattcctcaaacacacgcccttctttcgaaacctcgtttagttccgttttgagtttccttaaaacttccggatgatttagaaggttagccatagcccactccaacgtcactgcggttgtgtccgttccagcaagcaacatcacctgcaatgaatcctttgaatctttgatgaatcaatcttgatcactcctattaacgattcaaaattataggaattaaaaactcatgtacctgtacgagccctttgatgatatcatcagtgtaacattcaggttctgattcttgaagagacagcaaacgagtgatcatcgttttctcaagctctgcttttcctctgtttttccgatgctcgtcgactaatttctgcataaacttgtccaatttcgaagcgagtttctttgctctctttctgtatccatcaagatcaaagagcttcagagtcgggagaaaatctccgacataattaacaccagcgaaatcgaacacctccctaatcagcttccgaacttccttagtttcctcgtcttcctctcgttttccagcgaccatgctcattaggatgttatacgtaagcccataaagaaacggctggagtttcaatctgacactgcctcctgatgttaccagttccacgttgatcttccgaatcatagctctcacttcgtctctccgtatatccgaaaagtctctgagacgagcggtggacaagatatctacggcgcagaaacggcggagtctgcgccaatgctccccgtacggagctgtgctaaccagcgtgttgttgtaacccatgtattcagttaaagtagcgagaggcctgttggcgaaaacaacatcgttttgctgagataagaactcctccgcagctgaagctgacgttacaaccaccgctcgacgagagcctagccggagaataaacacgtcgatgccgaggtttcgagagaggtcacgaagggaacggtgaacaggttctttgagaaggtggaggtgtccgatcaccggaaaacctacaggatttggcggtaaattcttcttctgctttgatcggaaaacatacgccactgcaatgaatccggccatgagagcgagtagaaacaaatcaatcatctcacccattcgtgaacacataattctggagactagtcgcatgattctggagagtagtcaaaaaaataccagaggtctcactattataatatacgagggagcgaaaaaaagaaaagaaagtgtacatagttctggagagactagtcaaaaatatacgatgggttgggccgaaaaatatgaagttattggttattgataggcccattacgataatctagtgatttggttacccagtaaaggtttactttttgtcggagattgcaaatatcatgtgagaagagtttataatctcgagaaatctttttgggcgacgttgtttgctcggagctctttctccgatttgtctccattttcggtgatttaaagttaggatttggctgtggagatgtcttcacttacctccgtcgaattgaattttctggttttccgatatcttcaggaatcaggtacgataaatatagactttctatgttctcgcggatttttttgtacttttgtttttgaatttgtatgtgttccggtagctactggctgaggttttggatttgatttcgaattgtgaatgttgttgccttgttctacgaatttagaattgttttagttgttttcgtggattcggcttagggtttcagcgatgttaccgaaaattgtagttttaaggatcttcgtaatgtctccatagctcaggatcatttagatcttctagttcgtactgctactcgcgaatctaggttttgatttttccatgtcgaggtcagtctgggagcttgagttttctgtatctgaagactttcttcactagaagttattttagatgattgaagtagtttatgctctgtttttctatatcaatcctatctttgttttgcagggtttacacacgctgcattcactctaggttatgaggcagggattaataaatccaacattgatgggaatatggttccacctggtgctcttatcaaatttgttcagaaaggtcttcagtacatggagatggaagctaatttgagcaatgttagcatactttttcaactttttttttttttttcacatggtgtttggtgtggttagactgagttattatgtgctttttgttcgcagagtgaagtggacattgatgaggatttctcattctttcaacccttggatctgatttcaaaggatgtaaaggaactgcaggatatgctgagggaaaagaagaggaaagagagggatatggagaaggaaagagacagatctaaagaaaacgataaaggggttgaacgagaacatgaaggagatcgcaaccgagctaaggaaaaggataggcacgagaagcagaaggaacgagagagggaaagggaaaaattggaacgtgaaaaggagagggaaagagagaagatagaacgagaaaaggaacgggaaagggagaagatggaacgggaaatatttgagagggagaaggatagattgaaattagagaaagaaagagaaatagaacgggagagggaaagagagaagatagagagggaaaagagccatgaaaaacagcttggagatgctgatagggaaatggttattgaccaaactgacaaagaaattgctggggatggttctacaggtaactcttcatacttttctttgccaacttttcatgaaacttctatttcaaatatgaatctgtgtttttatttgaacaggcgcagaacctatggatattgttatgactcccacatctcagacaagtcacattcctaattctgatgtgaggattttggaagggcatacttctgaggtactttattaggtgactttatccgataattaaacatgttctataggtcttttccatcttcactggtatttattttataacaattttgtctacattactactttaggtttgtgcttgcgcatggagtccctcagcttcacttcttgcgtcagggtaaattgtttgttgagaaagatgaatgcacttgtggataatttgttctcttattccatttatacatcttttgcatataatcaggtctggtgatgcaacagcgcgaatctggagtattccggaaggatcattcaaagctgtgcatactggtcgtaatatcaacgctttaatcctgaagcatgcaaaaggcaagtcaaacgagaagagcaaggatgtgaccactcttgactggaatgtaagggctactgaatttttaaatgaaaatagatattcctggtcactgctaattactgctaatttcaaaagccataggatatttgaagcatttctggattccttttttgtgccttagattctgctaataagttattctgatttctgaatttcagggtgaagggactttacttgcaactggttcatgtgatggccaagcaagaatctggactttaaatggtatgtccacgttgattttttggtttcactccttgtatgtgtcatccccttgtatcactagcatctctattttcttgaaattaatcttatttttactatgaatcaatgaatatgcttagttatttatgcctaaattaatatctctatgtttccttctagcgtgagctacaaattgtgatgttcgagttgtgtgggcttttgatagtaacacgacacaagattgaaacaataaaagctatcagctagtaaaaaacattataactctgcattgggtatcatatccttggccaaaaacatttactccaccttctgttatgtattggagagtcagcttctaaattacaaattacgtctttctttttcacatttccaggtgaactgataagtactcttagcaaacacaagggacctattttttcccttaagtggaacaagaagggggactatcttctaaccggtagtgttgatagaactgctgttgtttgggacgtaaaggcagaggagtggaagcaacaatttgaatttcattcaggtgcaattttatttcttttttgattaaacatcaatttgaatcaatttctcatgcatatgacatggaatgaattttttttgaaaataggtccaacacttgatgttgattggcgcaacaatgtatcttttgcaacgagttccacggacagcatgatctacttatgtaagattggagaaactaggcctgccaaaacctttactgggcatcaggtttgtatctgtcatccaagtttctcccatatcgtatcagtatgtttagttttctcagtcgcaagtaacaaatgtctggtactaaccaaacccatggcttccataatggcagggtgaggtcaactgtgtgaaatgggatcctactggttcattattggcctcatgctcagatgatagtactgctaaggttctttgaattaacttgagcatattctacatttctttaagtttctctctgcctctttttataaatgtatattttttcttcagatatggaatataaaacaaagcacctttgttcatgacctccgagagcatactaaggtaaatccataaatcctcaaaagtcttaaggaaatttcaaatatatttttggattttgaatagcctctaaagatggatattaatcttctctttaggaaatttatacaatcagatggagccctacaggaccaggaactaacaatcctaacaaacagctaactcttgcaaggttacaacacgctttaaacattgaatactttaaaaacaaagcgtcattgtaacatatcattcatcatctctgtgttgttgttgttgtttgaatggaacagtgcatcatttgactcaacagtaaagctatgggatgcagaactcgggaagatgctctgtagtttcaatggacacaggtaaaagttaaacctcaatgtacttttgcggggtttagctgtaaaccgttggttataagtttcgttgttgtgatatgaagggaaccggtttactcactggcgtttagtccaaacggggagtacatagcgagtgggtctttggacaaatcgatacacatatggtcgattaaagaaggtaaaatcgtaaagacatacacaggaaatggagggatattcgaagtgtgttggaacaaagaaggtaacaaaatcgcagcttgcttcgctgataactcagtttgcgttcttgatttcagaatgtagttttcttaattgtagtcctaataacactctctcagtccaaggtgtttctttttgttgttgcacatatctataagttataacactaaattcgaaagatgaaactgtacttgagattatttttgttattttatctatcattgcaacttttgggttgactgacgagtaacaatgaattgaaagaaaacaaactgcataagattacaagggttactacatccatatctttgaatttagaccacaaagctagatttgaattgaaagtgatgtaatgcaattgagatatgaggacatcaactatgaaggtgtctttatgtagtagtagtaaaccgttgggtgaaacagtgaaagtggatgatggcgcgtggcgagagctgacggattcgtgtaacccccaggccaaacacgtttctacttctacttaacccattccctttatttatttttgtttctgttcaccacgtcgcattttttaatctgtaatcatcaccattaatatggtcgaccaaactagtaatttccttgagcaccatacttttgtgtgaggataatgagactcccaagaagaagactcgataatccccaagttacacgttctctcgacttattgacaaatctatccctgcgcttatttaccattcacatatactgccacttcttattctgacgtggcgtaatagtattggataaaacggtattatctacccctaagtcgattatagtatatatataaagcaacaaagcagttgcaaatttcaagatagtcgtcactttagtcgcagcaccaccaccaatttcgaatttagcatttctgaattccgactctgagaatcggcggttaccgggaaatatgtcggagactgatagagagcgtccgttattagcatcggaggagagagcttatgaagaaaccgagaaagttctcatagtcggaatcgacgaagaagaagacgctgattacgacgatgaccccggaaactctcctaaattctcatggaagaagctttggctattcactggacctggttttctgatgagtatcgctttcctcgatccaggtaatctcgagagcgatcttcaagctggagccatcgctggttactctttgatttggctattgatgtgggctacggcgattgggcttctgattcaacttctatctgcccgtctcggtgtggcgacgggtagacatctggcggagttgtgtcgagaagagtatccgacttgggcaaggatggtgctttggattatggcggagattgctttgatcggagctgatattcaggaagttattggtagtgctatagctatcaagatcttgtctaatggattggttcctctttgggctggtgttgttatcactgctcttgattggtaagtgtttttttttttctcaatttggttattgatttaggaaaaaccctaatttttggaatttagggttctttattattgtttgtttggtatctttagttttgatcctaacattgtgtgtgatgggttaattgcagtttcatctttctatttttggagaattatggaataaggaaactagaagctgtgtttgctattttgattgcaacaatggctcttgcatttgcttggatgtttggtcagacgaaacccagtggaactgagctccttgttggtgagactctaaatattcctttcttttgtctagtgtgtggagatgggagtacaaaaatggtaactgttcatgttttttaacaggagcattggtccctaagcttagctccaggactatcaaacaagctgttggtattgtgggatgtattatcatgcctcacaatgtgttcttgcattcagcacttgtgcaatccagagaagtcgatccgaaaaagagattccgggtcaaagaagctctcaagtactactccattgaatccactggtgctcttgcggtttctttcattatcaacgtctttgtgaccacggtgtttgccaagtcgttttacgggacagagatagcggacaccatcggtcttgcaaatgctggacagtacttacaggacaaatacgggggtgggtttttcccgatactgtatatatgggcgattggagtcttagctgctggtcagagtagtaccatcacaggtacgtacgccggacagtttataatgggagggttcttgaatctcaagatgaagaaatgggttagagccttgatcacaagaagctgtgcaatcataccaacaatgatcgtggcgcttgtctttgattcatcggattctatgcttgatgagctcaacgaatggctaaacgttcttcaatcggttcagatccctttcgctgtgatcccactcctttgcttggtctccaatgagcaaatcatgggcagtttcaaaattcaacctttagtccaaacaatctcatggatagtagctgctcttgtgatagccattaatgggtatctaatggtggatttcttctcaggagctgcaacgaatttgattttgcttgtgccagtgatcatattcgcaattgcttatgttgtgtttgtactttaccttatctcacgaggactcacgtacactccttggcaactagtggcttcttcacataaagaaccacagagggatgatgagtgagtaaaggaaaagcaaagagaccttttcattgaagaataagaataagagagattgctctttttagtgaaacaaacaatagaaagttgagtttcagtatggtaacaaaacaatgtcctgatgtatttgtattatagtgttttatggtttttagagtatagctttggaagaatccgaatcgtatcgtttgtgtaaaacttccggcgtttcttagaattttggcagaaataaaacgtaaacatgaagttccttcttcagatgtgcgttatttcattttcttttagatagattttttttttttgggtttaagtatataagttaaaaaaaaaatcttaatatttatacatttagatatcttgatgtttttcaaagtaataacgtgaactctggttttgaatttcttagagaaaaaaaaaatggtcaaaaatggggaagaaatggtcaaagattaatggaaacgcgctcgcatttaatttgatgtttaaaggtcacaaacaatgtttagtcgtttaggggaaattcatgcacaatttctttgatgccacgataagctttgattgcaaatttaagttaaaaaaaattctggaagctagttttatcatttgataatgaaaatttcctggcaaacgagagtcgagtcgagtcgaggtatttaaatacatcacgtaagtttcgttaactgccccaaattaaattaaaaacacaggagcagcttctcctaatccaaaatccaaaaaaacaaacatcaaaaagtcaaaaattaaaatatttaaatacataacctacctaacaaggtttgacgcaaaacccgccacgagtctaacgcatttattaagagaaagtatgcaccaaaaatatcgttattaattgactaagtagaccgataaaactttatttaagagattaatggagctcataataaatagcaacaaaaatctttgacgatgaatgatttggtcttaccgcgcttccacggttctaatcttcgtcgtcctctctgataaagagacagagagagagagagagctgaaactgccatttccgcaaggtaattcatcattcttctgtagtcttaagctttgttcccgttccatatatctctgtttttagaaagttgtttctgcagattccaagttgtgtagagttcgcttaatttcctcagcaatgaatctttttcgttttctttgttcgattcagagttttttttattggggttttattatgttgactcgagggttgactaagcatcagattctgtcctcagctttatgatattggttacaattatattcgttgaattttcagcttagctttgaatgtcctaaacttgttcttacttggtgttcttgcagttcttgtttcaggggttttgtatatttgcctcaacttttcattgattcacgaatttatttcattacatgatggtaagtttctaaatgtctatgccctcaaataaacgaggtttgattttgtttttcttactaatttataaactcatgttgttgttttggtaagtgaaggtacatatggaggtgtcttggttaagagttcttctagataacatctcctcctatctaagtttatcatctatggacgatttatcttcaaaccctgctcataagtactacaccagaggagaagatataggaaagcttatcaagcctgttcttgagaacctcattgactctgacgcggctcctagcgagttgcttaacaatggttttgaagaattagctcaatacgttgatgaacttagagaacagtttcagagttggcaacctctttcaactagaatcttttatgtaagtatgcaaaaaacagaatttacatcttcatttatagctgtttctgagctaactcttgtctgttttcaggttcttcgaattgaatcattagcatcaaagttacgagaatccagtttggaagtctttcagctcctcaaacactgcgaacaacatttgcctgctgacttgatctcaccttcttttgaggtaaactcaatgatctgtctctgtgtatagttttctttaggatcttattattgatcaggctccttgttgcatattgcaggagtgcattgaattggtgaagttagtggcaagagacgaaatatcgtatactattgatcaagctctaaaagatcaaaagaaaggtgttggacctacttcagaggttctggtgaaaattgccgagagtactggtttaagatccaaccaggagattcttgttgaaggtgtggtacttacaaacatgaaggaggatgctgagcttaccgataatgacaccgaagccgagtatctagacggattgatctctctaacaacacaaatgcatgagtaccttagcgacataaagcaggctcagttacgttgtccagtacgcgtaccttctgatttccgctgctctctatctcttgagcttatgactgatccagtcattgtagcatctggtcaaacattcgaacgggtttttatccagaaatggatcgatatgggactcatggtttgtccaaagacaaggcaggctttatctcataccactttgacacctaatttcattgtcagagcttttcttgcaagttggtgtgaaactaacaatgtctatcctcctgatccattggagttgattcactcaagtgagccattccctcttcttgttgaatcagtgagagcttcatcatcagagaatggccattcagaatctttagatgcagaggaactgcgtcaggtctttagtaggtctgcttcggcgccaggcattgtctctgaagtggtttgcaaaaccaaaagaaacaacaatgctgctgcagatagatcactgacacggagtaataccccttggaaatttccagaagagaggcattggcgtcaccccgggatcatcccagcgaccgtaagagaaacaggaagcagttcaagtatcgaaaccgaggtgaagaaactcattgatgatctcaagagttcttcattggatacacagagagaggccacagctagaatcaggatactagcaagaaacagtacagacaatcgcattgtcattgcgcggtgcgaagcaatcccttcgttagtcagtcttctttactcaacggatgagagaatccaagcagacgcagtgacttgcttactaaacttatccatcaacgacaacaacaagtccctcatcgcggaaagtggagccatcgtaccgcttattcacgttctcaaaacaggatacttagaagaagctaaagcaaactcagcagcaactctattcagcttgtcggtgatcgaagagtacaagacagagataggagaagcaggagctatagagccacttgttgacctcttaggaagtggaagtctcagtgggaagaaagatgcagccacggctttattcaacctctcaatacaccatgagaacaaaacgaaagtaatcgaagctggagcagtgagatacttagttgaactgatggatcctgcttttgggatggtggagaaagctgtggtggtgctagcgaatcttgcaacggttagagaaggaaagattgcgataggcgaagaaggaggaataccggtattggtggaagttgtggagttaggttcagcaagaggcaaagagaatgcaactgcagcactattgcagctttgtacgcatagcccgaaattctgcaacaatgtcataagagaaggagtgattccacctcttgtggcacttactaaatcaggaacagctagaggcaaagagaaggttctttttttgtttcctcttctttgtttggtaaatgtctcatgactcttatagtaatataactgttgtatgattttgtttcaggcacagaatcttctgaagtactttaaagcacacagacaaagcaatcagaggagaggctgatcttgctttaccttaaaggttgttctaagttctaacttatacatgatacacatctgcatatatgatacttatataaatatgaaactgttacctctaaaagattgtgtatttttttagtatttcatcaatagttggtttatttgtaaaggatattattctctgtgctattttcttcttcttttctcattgaagcaaatatttcaaaattgaattgttgtattcgacattgaaccgatggacggtcccgcccatttgatggtgataacaagttttatttttcaacaataaaaacatgttattagatttaaaatgtggttgttttgcgacaataggtcatcaaatgtacgtacccttatgttattaaacgttcaataaactatgaattgtctgtgtgacgtataacataatgttttaatataagattacgtaaacatatattgttatgctgaaaaattcttaatattattattgggtgattgctttagccctatgctcgctcatgagtgagtaaatggcctttgagtttgagttgcggatttgatattcaaactataatatataaaatgagaaaaaaaaaacattatattatacgaaatgatggtgagaaattgacgtcctagataaaaacatcattgctttaatcatgccaagcaccactccttataagaagaatctatcatggatataaccaaaacaaaatagtataaagtaagcacaactatatgatatatcactttcacatcattctcgttattttattatgatgtttcgctttcatgccactatttatacgtatgcatctctcatgtctagatgaatatgaaaaaaaacaaaaattcgaaatctaaacattacattttataatcaagctcaaattaaagattagcaagtacattagctccaaactagttctaggtttatagaatgtaatgaaaacgaaaaaaaaaactaaaaagtatataattgacaattaccactaacatacaaaaagaaatttacgtacgaaaatgattaaaacacacaaaaatgattaatacatttaaaatttatttcttgagaaaaaataaaaatcagaccaaggttcgtcttccatgatcgacgacaaaaccaacctgtgataaccactcaaacgttctcttcctcgccatcgccgatttctcttctttcttcgccgtcttcttctccatcatcctctgtttctcctccgtctcaccggaggacactttaatcttcacaggtgccatcttcgtctccgtcgacaccgaacatttacaatccgagaacataaagcttctcctcctattcctcgatctcgattcacctgatcctattttcttcgaattcgaactcgtgcttgtactactgcagctactattccgactcactgacaatttcgcgtttccggcggtggttcggagttctatctccggtgtacggacgagtcctagcctgagaaaatcccaaatcgaggatgatttagggtttctgattgaattcacacgagccgtcatgctcgatgatcttcgaatctgtggttgtggacttggttgactataatcgatgaaattgtttttgattttccggtccgatctaataattccggttcgtctgaattcaaccgactcggatcttgtaatcaaccgggtcggctcgttaagtccggcgtctaaactgacggagtgacgtaacggcagaattcggcctttgaagaataattcatcagctgtactcatctccggagctggttcacatgaatccgacccggctcgaaacgatgacccgattccaaattcaaatccggaatcgaattcttcatcttcttctttgacaatcgatcgtaattcgcccttctcgttcggcaaatcacacagagacaaagcttcttcttcttcttcttcttctacgtcatcgtcgtcttcttgatagcgatgagagatcaaaagggttttgtcatcgtcttccgtacaagtcatcgccattttcgaagcttcccaacgaagagacagagaggtacaaaattttaaattaaacacattaacgaaagagaggaagacgaatttgaatatttaaagaagacaagaagagaagtttcttttggaaaagtcaaatacgactataaccttttattattattgttatttctcacataacctatagtccttgatacatataattgcatgtatttatacatctttatatacttggagcgagacataagcaatcgtaataaaagaaaaagttatttttcttttttatttatgttgtagaaattttaaccaaaaatagaaaatcatgagaagtatgagtcctagtttactagacacggttttttttctccttaccttttctctatcagtatcgtgaccattgtatacagtaaagtgacagcatggtcaaaatttgttatttatttgtgttttgttctcttgcctaattttgaatcctgaaaataatgcttagactgattttttttttaaatggtcaacttgcatatgcacaagactagtctgtttcaaaactgtccatatgtcatttaaattttaaaaccttaattttagccacaatttattataacaaagcgtattaaaatgcttatattgctatgggttttttaaggaagaaaaagaacacacatgataaagctgaaaggctgtaagatatggcagccttttgcttttatttatttctaccttactttttccgataaattgaaaacataaatattaccaaactgaaaaaccaagaaaataataataagaataagaatagcttagaaggttgggtctgtggaggagtgggcctaggccactatttctggcacgcgatgggtacactttacccagcaccatcaccatcatcttcaacatgcatacattttatcatgattcttagtaaatttttatcattgcttttggtgttttgttgttaattacgagcgttttaattttgtttttacatatgcgtgggaggatagatcaagtatcatttccatgttttagtaacagagaagagacagaaagttatgcagaaaagatccttctaattgaaatgtagctagaaattaggagtttgatctattttttttgtcaaacgcgtattaatggtctacaattgtttcccttaagttgtagaaacattagactttgactacatatataattacaaactataaataaaatgaaaatgactctttgcatttatataaatgataagttatatattgatgtatcaaattccagaaggataaaagtttcatgagaaaagaactttacaccgcgagtcaagacaatattgtcacatacaaaataaaaggtagaatggatttgaaatcatatgatacgtctagatcgaaattgtataattataaaagattttgacttaaaaagcaaaaatagagagggtggtaccaaaaatagttgaaacttgcggtgcaaatcaaaacaagaaaatgtttttgtcaactttttatttattaagatgatggccactattgttcattgcttgtgactcatgcgtcgcttatgccattgttttgttttgtatgattaaagggccgcaagaaacgacgtatcatattgtcgtttatactttttctttatacacatcttctaatctcataatcgcattattttttcacttattggtggtacttaataagtgatacttttcaatcacttcctgttaatctgcattgggacgttatcacgtaaatgatacctttaacacactttttgttttgttaattttggtttggcgtctaattttgtataataaattcaaaatatcgaactgcacatattacacatactaaatgttaacgaatgcacacacatgtgtatataactacataatgcgtatttaattttcgcatgtggatatcgttaatcgtgcgcctaatatttggcttcgaagtctaaagatgtttagaatcatgcaacgtgaaaaaacattggccatggaaggcatgatacaaattagacttgtggagtgtgtgtaatcactatcatctctgacaatcgttaacttagacattaaataaatccaccatttagtttaagaaaaatacatttattgaagtctgaaaacatatattatacaattcgattttcttgaagtggtgagaaatttacaggaaaaatagttccacaagtgcttgggaaaatattggaaactgataataaggccaaatgagcccattatattatacggtccttgtaaagcccataaattgaccgaaatctatcatgcttttctattagttttttttttgtgtgacagaaaagagttttctcaccagcaaatctaatcattgataatctctggatgcctatggtaaagtttcataattcagaaactctactttggttatttacggtatatacacttttatagcttagttgatagaaacatcttaatactatctcaagtatatggtgtggtaattaatcgttgactttttgtattaactttttattttttcaaacattttctcttcattaactatttcaagtcacatgataaaacacctagagagacccagctactgttgtagccggagaatatatttctttttaaaattaaaaacagcaagacatcccaaaaacaaactaggcaagtcttaacagactgcatgtcgtttttgctaaacagaggtttcttcgtatctaaaaacggcattacaataaatctgtaaacaccttttcttttccataaaacccctttcatttctcataatttacgactatgtccagctaatcgccacgggacttcccaccacgtgtttcccatccgaccattcaatactcccaaagctgttagatccagacggcttcgacgagtctacagtaaacgtcaccgtatacgattttttctcgttagcttccttgaaattcaaaaccgccggttcaaccgaaatcttgactcctgtcgtctccgaagttactttaaccgagtaagtcccagctcctcccacgctcgtcaccgtgcgcgtgtacttatacgcaccgactccatcaacgttaacggcgaacgacgggtagttcaaatcagcgaccgagtacgatttactcggatcgcaagtgtaattacgtctcgagacacttcgaatttgcggcgatgtgtaattcaatgcgcagaggaagcctaagtaatcctccgtcgttagatcgtagatgagtcctggattagtggcagttgttggtgacacgtgtcctgcaccgtgatcgaacggcgtcgaaggcttccctgtcgcgatgtcgagtaacggtttaccgtctttgtaggttttgtaagcggtggtcataagcgccgatctaatcgccgccgggctccattcaggatgcaccgacttgagaagcgccgctaaaccactaacgtgagggcaagacatcgacgtcccagagatgatattgaactccacgcggcgagaatcggaagcgagtccggttggtccagcagcaccggtccacgcggcgaggatgtttactccaggagcgatcagatccggtttaagaatattcggtgtaatcgaattcggtccacgtgagctaaacgctgcgacaaccggagatggtttaacaccgacgactgttcctaagattgaaatcgaagcggtgggattaggatcagtagtcacgtaatgccggattatatcaccggctttttcaccaacggtggtcgccggtaacaaatgagcatccgcaacaagctcttcaccattcgccgcagtgttagccagaatcattccaactccacctgctgctttaaccacatcacctttctgaactctagcattaattcctctatcacacatcacaatcttcccctttactttctccgggatcaaagttccggtcatacagagattaccattagtagcattactagcattcccagcgtaaataaacggcaacaatttatccggtaaagcttctcctttaaacaaagaaactccggtgaaattcttgccgttaccgagaatcgcaagcgccggaaaatcacgatctaaagtaccagcaccaacagttgtgatccatggagctacgtttgataaactagaactactcggaccagcattaccagctgagcaagatactaaaatccctctttccatggcggcgaatgctccgatcgcaacaccgtctctataataatccgacattccaccgccgagtgacatcgacaggacattgacgttatcggcgatggctttatcgattgcagctaaaatatctgagctgaaacaaccaccgagccaacagactttgtaaacagcgacacgagcgcgtggagccataccacgagctgttcctgaagcgtagcctaataagctagctccttcaacgacggatccagcggcggtcgatgaggtgtgagttccgtgaccgtcgtcgtctctaggagatcttgattctttagattcatcgattggtcccatcgttgattcgtaaccacgagcgaagaatcttgctccgattagtttacggttacagagagaagcggtgaaattggttccggcctcgcatccgcctttccaggaggaaggaataggaccgaatccttcgtcggagtagcttttactctcgggccaaactccggtatcgagaactccgacgacgacgtcgctgtaagagccggcttcagggaacagatctgcggtgtgttcgtcgagaccgaggaagagaggagtacgagtggtgtgtagctcgtaacggtgctccggtaaaacggagataacaccaggttgagtcatgagcgagtcggcttcttcttgagttagccgtgttgagaatccatgaatcgcgttctcgtaagtgtagagcaattcggctgagtcggagatagatctgagagatgaatcgtaccagttagagtggaggtcgaaagacgacggcatctgagatttagccatgtgaacgatgtaagttccttggtcggaggaggaagaggacacgtggcagaatcctagacaaaggaggaggaagaaagcagtggaggagagaaacgaagaagacatgattgagatggtgtgttgtgtctctctctggatccaaggagaagacgagagagtgtttaaatacagtagaagagagaagaagaagaagatgaggatgcgtacgaaggaatcattagagagactctgttgtgtccactcttcttctttttgacagtgatgactattcttttgtttttttccttctctttttattaattagtcgttaatttagtacttagacttgtgttctgttcacatgagtgtactctacacagtatacggtagaattttcgtatattgttgtctcgagattctgcttactatatcgtctcgagatacttattttcatcggtgtttttctatctaattgttactgtgattggtataagaatataaagatggtacagtgatagaatcatcatgccatgtgattcagaagaaaaccatcatggtgttggtttgccgttcgaaaaccattatgattaattgaatatagccttttttaattgtgtattagctagtagaagactagtagtatttgtttgtttgtcctctctctcgtccaagtttacatattacgttggtttccatacactttgttctatacgttacgaaataatcgaccttgtaacaaggagttggaaatgactaattaagtggcccatgactcacgaatgcattacgtaaatgcgtactttgtaggtatgatttaataaccaagtattatgaatttcgatatgaatcagtctaataaaaactgtccactctaaagtcaaaacaaaatatagtttacttttggtttaatgtttaagctaataccaacagaagtggttacaacctaatttagccaatctaaagtgaactgttcaaaacaaaaatagttattaaaggctctccaaaactgttctacacgttaattaatatagggatggttagttcaatgcgtaggttttattagggtccaaataaaatgttatattgagctaatacgtaatatgatttcgccttttcggtttagtttaagcaaaaaatagcttggtcttgcttggctcggggttaactgttcccattgaaaatcatcatatcaataggaaaaaccatggaaatagcgaaccactaaaaatataaaaattatgattcacgcgtgtaacaaattttcatgatattaacttatctgagtactacatctcctctacactaatttattttggtattaatgactataaagaagatagcaatgtaaccgatgatacaagtgcgaacacgcataagacttgatttggatctaagcacagcttttgggattatggcccacgtgtcataacgtgccatttcccagatctctaatatcgtttttattacttatgaaatcgaacctcatctctttctctgcaaaagacaaagctaaagcaaacttgacactcctccaaaccatcctcatccgtccgatttccaaagattaatgacattttatacttcaaaacaacatagccattagaaggcttgatgtttaagtacaaactaatcatgaaaatctttgtaaccttttttttttaatcgacattaattttgatttaactggaaactatattgcaaaaatatgacaacatctacgttttcagagtaaacatatgaaattagcaagttttctatttttctccatttaatgaacttgagatgtattattcattgattcaattatgacagttaggacagctgagtcgcaacaagtagatattaattcgcgacatgtgacctttactataaccttgtaattaattattacttagtactactattaatcaaatcctctataaacatcatataatccatctttttttcccaacgacacatcataccaattcctgcctaatacatcttacactaatactttaatctgtttcctcaccttgtagatatatattcaaagtcgagttcttttcaatattcaaggatctctgtaagaaaatattattaaaccgactaatcgattaacgtccggttctctcgagtacggtacggtgcgtgttgagtccggttaaatttatagaaaacgatacgataccctacaaggcgatgtatccattactggtggagtcaacaattttgtctcacctcgaactacgtagtgtttatgcaagaatctaggtactcgtgactctcttctgtttgtatatgctgcttatctgcatgtccgcattatacatccaaatgtcttaatgtacacactttctcttttgtttttttataacatccatgtacacactttattcagagtagtagcagtctttatgtgattacttttacatcaaaatgtatgtcacggtcttccattaaatgcttcatcttacttactcagcaagttgattacatcagataataatggtacattgttctcgtgattttgcaggttttatcagctacaatttcttacattatcatcttccgtaattttataatattattattattagaaaaacctcaaaacatctaaaagaactgagagaatgtgtataacgaactacttttcggataactctatgggtctcgtggaatacatcaaactaacaaatgctttgacggttgggatccatacaaaaacgtgtgtgtggcaattagagactttgattcgtattgtacgacatgaattaacgtgtctttatatcagacctaactacagtcccatccatataattaaaattaaccattacaatgattcgttttctttcattaactttatttttaggaatagagaaaattaaattaaaaatacagaaacagcagaagctggcaggttggtccattttattggactcttactgataatgccacgatgagtatttgactcttgtttttttctttctctttaaattaaaaatagaaataatactatatatcagggtttttaattggaccacgctttttcttgttttggaaattgaactgagtggtgcctaccaaatatttatttgaggaacatttttgccttcggcctttaactgttaaagttagtgggccgttaatggaatacctaaacccttaaaacgggccttgagttattagcattcactggcccatgtgttccactcagttcagtgatatatgtatggataactcaatttctagtgatgaatgagtggataattcatgaggcttttaaagccattttaagcaaaaattacatactgtagtatgtgtgttggtattctattagtgtgacaactatttaacaagatcttcccatttgcagtattgaccacctgctaatgcacggtagtaccggtctctgcaatagacaggtcttccatccgcagcctcagccgcggctgctgccagatcatcgtcagtcacaacatctacgggtagtcgaagcaattgttcttttctgcaaatttttatagtgaaagagatgagtttttttttttgtttcttaaataccaaaaatacttatccatctccttaccttatattgaacttgttgctggttcttgaaatggaaacttctggttggttttctgtagatcctagagtggttttaaagaaatcctcgactggtgttgcgaaaacgaatagcacgaatgctgaaacgagtaaagctcctgttccgattaatgtttgtttgagcatcttgatcactggcttcacctaaaaatcatataaatttcctgatttttgtttgtttgtttgctttctgcagtattgaataaggaacattgtttgtgtattgttgttaccttgtaagaacccaacaacctgtcgcgagccaacacctgaaaacacaaatgcaagggcacagcaattaaccagttgcttagttcttcgattctgctagtcaatcaggagtcaaagatgcattttgaccacatatgttcatgtatagtgtcaataatagaacatgctaagaattcaggaaccggtgataacttggcagtgcttcgatccattgatctactagcttttacaatgttttagaatagattttgctttgcatactgaggtatattcccaacaagctcagttatgggaaactatcaaaatcagaactttcaattccaagctaccacaaatgactagaactatgaaaacatgtgataacttggtaggtgataagattgattttctatatttttcctgtagattagctaaacaaaagaagttataagttgctaacctcaggtggtttgacccacatttgtccatcataccatccactctcttcgtaaggtataactgcagaaagtagtctatctccaacatagctccacccctataatatataccaaaagtcaagaacaaatcaatggagctcagaacaagtgagacctctttggagagaaagctgggaaagttcaataccagataaattctcaagacaatcaaagaaacgagaaataaagttccagtccctgcagctagaataaatctcaaaggctcctgcaacatatttttgcaaagaacatatatattattagctgtactaaataaatcttgttgcaaaggccctgtttcaaaaaatctcactctggaaggattaaagctagcagctgcaacaggaactccaagaacagtgaaagtgaccaaccaaagaccacctagacgaataaagaattcgcttggacccaattctccccatgaatacaacattccttcctttagagacgaatactcattcacctataaacccaaaccaaaaatctcatcattactctagaatcaggaaagaaaaacaaaagagatttacttacgggtctttggtctgaaggaacttcaatctcggaactaggatcccagctttgacccgagaaactcatgcttccacctccattgttacctttgtcttccactgctttcaccgaaacacttagaaaaagctcctgcttcttaccaacaacatcgctgattccgccatattttatgatcgacgaagaatcatagtaactcccgagcttactactactgttactacaaacccggtgggatatcttgggaatcagagggtaattaacgattaacctgagcattgctcgatctgattcctgttcctgagagtaccgttgattgaagattaaaggtaagtggagcagagcacctgatacacggcaagcaaaacagagccagaaataataataatcagtttagttttggtttcttctgccacttgtggcgtcactctctcgccacgtggcacatgctcccttgcacgcattctctcgtgtttccacaagcctctctcagtaataaactaaaatttcattgggccactcaggccccgttttacttaattggcttttattaaatggcccatttcagtcatatatcaatcacaaaacgaggagcccataatgcaaaaataacgaggcagacgcgcttaattttctcaaatatccaaaaatggctaatttcaaaaggggttaacctacagatttgaggcgcgtggtgataactcgcttatagtgcaagtggttatttgttttccaatgaatagttaattatttaatactaatgtatgaagaaaatttcattgggccactatggccccgttttacttaattggcttttattaaatggcccatttcagtcatatatcgatcacaagacgaggagcccataatgcaaaaataatcaggcagacgcgcttaatttcctcaaatatccaaaaatggctaatttcaaaaggggttaacctacagatttgtggcgcgtggtgataactcgcttatagtgcaagtggttatttattttccaatgaatagttaattatttaccatacaaattgtcttctaatgtgggcttactaattaccttacggccttttcgttttcaggcctaggaagttaggcccattttacatatttcttgtcgttttcatttttaatgtttttctgctcattcgtattactatcgcaattttttttaacactaaagtaactaacaaattcatcttcgtcaactagactaattttagtttttaacaaaccactttaattttgattgatttttttttctctttatgaatttgcaacataatcaacatttttatttcttaactaactttaattttcttcactctttatttcttaaaagatatcgaataagtttagatacaaatttatttaagtatcttattcgatatattgtacaatgtctttgaaaaataaaaaaaagaattcattatggcaacgaaaatataaaacaaagatttcattaacgaaaatacaaaccaaagtttttatttaattaaggttttaattaacgtattattaaacatggaaatttattttccaaaattactggtactttaatgtaaaagattctaattttattttaataatgaaaaaatattttcttataaaatcatttaaatattcaaaaaatagttaaataatattagtacgttttttgtttattttggtaaaaacaattgcgatagtagtaatacgaatgagcagaaaaacattaaaaataattaaataaaactagtacgtttttttgttttattgtaattctgtttttttttttttggtttgatacaacatacatgaaaaatatatttaaaatataagacgtttcagacattcgaattcaggacaaattgtttaataagttggacagaagaaacatcaccttgatttaaaaaaaatactttgaagaaaagatgaacattaccatcatcatcatcagtaagtttatagacagagagatctctgtgtttcattgacttctcattctgctggtttctgctgccctaacttgggcgaagtaagcgtgcgcctgtcaacaaatcaacaaaccatattaatttacctaatatgtgatttatatacaaatacaaaggcttctaatttgttttctgaagcatgcgtaccatggcttcttttgcagttaatctgtcttgatgatcataccgaagtagcttgtcgaggaaatcaatcgcctacaccgttttaaacaaaacccttaagaacccaactaaaccattttctatacaaggagttaaggactcaaggaaaggagtaaacctcgggtgaaactaagtgctgattgtctgcgttgatgaatttggaccaaggtttcctgctatgcctgtaggttgtgttccattgaaccagagaatgatacaacactaattctcagcttcagctcattacatggcaatgccaagctcggagattacaatataatgtttaagtttcacataccgcccaacaagtgcttccagttgtggatcaagttctaactggtacttgttcagataagcattcaattcgtcagtcccaagcacctggtgaataagaaggagagttcatgacgacaatggaacggagatctcccatattctaatactgaattacaagtaatataccttggcgattttcactagctgatcctggttgtcatggccgtagaagaaaggttccttacggaatatctaatatgggtaatgaggaaaaattaggtcaaaattagatcaccacaagttcatttctcagaaaagaaaggaaagccgttcaaatgttatatcatgaacttaccatccctgcaaacatacagccaagactccacatatccaatgaatagtcatagtcttgcaagtccacaagaagttcaggtcccttgaaatatctgatacacattaggagagataaacattagagtgaagctaggcaacagcgaaaaaaataaaataaagggtatgaagtaaaaccataccttgaggcaacacggacattatactcttttccagggtggtaaaactcagcaagaccccaatctataagacgaagcttacgcagctcatggtcaatcataacattatgaggcttgacgtctctgtgcattattccttgtgaatggcagaagtctagtgcctgcaacaagtagtcttaccaaatgtgagtatgaagtcaaatggaatacttatataatccaaccaataccagaatttataccttcaacagctcatagatgtagtaacgaatgtcgtaatcagtcaacgtaggatacaaaactttaaagtctgtgctgttaacatattcaaatatcaagcttggagttttcgaatgttgatctctaacaacatcaagcagcttgacaatatttggcccaccgcataggttctgaagtattttaatctctcttcttatctacgaaaaaaagatcatagagagattcaagaaacaaccccaatcatccaaaacaatgtaaaacaattcaccttctttttcttaacaggtttgaggattttgataatgcacttctccttgctgttcacatttataccctcgaaaacttcactatattttccacgccctaccttccttactacctcataatcatcttgctccctgagagagcaaataacaagatcaaaatgttaaactaaaaaatcattgctttacaatagaagaactaaaaggcaaaataagcacaactaaaaaatcaaattcatcaatagagataaaagtaaagttttttacattagcagcatcaatttgattagattagcttcatcaagaagcaaatccagagcaagctgaattcaaattcaatacaaacactacaaaaatcgattaaattactttagcaactaccaattcagctaattctagggtttaacaatcttacccccattgaacaatgagtgactcgtaatcccaataatccttgggtcgaatcacattgacttcggtgtacacacgagctttcgacatcgcccgcgtctggttagaatcagagatctctacgagaaaatctggatcgatcgtagtacaaccggaaacttccgagacagctctcgctgtgggagtgacgatagatgagcgtaggataggagagtgcgccgttggcgcacgtaaggctaagacggcgcacagtaacaagagacgtcgaagaggagaatcgaagaagaggaagaacaagaagaaaagcgtatctatcattcactacgctcttccgcaccagattaactttttgttttccttttttcgtttgcgttatttttgcgccaactaaatttgccataaaggcctgacatagtataatgggctttatttatggcccaatatatttggacccaaatagtccacccgcttatatacatgttagggttcttatttttgggaagcttttgaaatttcggatttgcattaagcgaggattcgatcagtgataatggagctaagtctcgagaaagtctgcaataatgggcaagtaaaaggtggaaactttctatctgtgtccccacgattcatcaaggaggctgcgacaaagccatttaaagattgttcagactcctatcactatcaatgggttctccgacaaatgtaacagctaattggttgatacacgcgaagattacgctatggttgttttaggagttgaggcatttgatggatgaagaggctcaatgtatagtgtggaagactgcaaaaagctattgatcttgaaggggttgaattggttaacaatactgatttttgattccaatgttgagaactcgagggaagattctgtcgtctttactcatttagctgaccaagccatgaaaaacaactagaggtaaaaactcagattcatgtatcatcctctgtttttattgtttgcaattatttgaaaattttgaatttttcgttgaggacgtcttatattattcaagagacacaatttattgcaagattgagtagagtctcaatcaaaatgttgaggcatatagtgacttcaattatcagaaaaaaagatgataagactctctgtagggacaaatatcccatcattcatgttctgtcacaaaaccaagattctgcagcttacttatatactccttccttctcttcttcttaccactaaaccaatttatagctaatatttgtaagggatatatacatttgtggagaggaatcaatactctcttttttataatttggaattattagtttggtacaaagatgtgtgtctgatccacttggactcttctcaatttttaaaccaatccattaccacacacactccctccttagactgactccctatcttgtactctccattagaatgacataactaccctgttctgtcttgttcattgcttttggtggtaagggtagtttatggttttctttgtttggagaatttgagttctctttttctgtttggtcacaattatcaaaagagaggaagaagctcattttcttgatcttattctctctcttttagtagtacattacggcacgtcttcttcatgagaaggacttgaaatagtgttccatggtgaatttcttgagtgaaaagaaactgcgagctaagtgttcgtaatatgtcagcaaagaagaaagatcttttgtcctcagctatgaaaagaaccagtgaatggttttttattctcttcataagattattttgtttctcaatccattttttgtttccagtcctgaagtagaaatcgtttataatactctttattacatcgtttcaggatttcttctcaagaagtatctagtgatgtcaccgttcatgtaggagaagcttcgttttcactgcacaaggtagattatagatctgtatttagcgatcaatctctctgatgtaaagccaatgacatgatcacattcgtgccgattcggttgttttctctctgaatcttgcagtttccactcatgtcaaaatgtgggtttatcaagaaacttgtgtcggaatcaagcaaagattcagattccactgttatcaagataccagatattccaggaggctctgaagcatttgagctagcggctaagttctgctacggcattaactttgatatgagcacagagaacattgccatgttgcgatgtgcagcggagtatctagagatgacagaggaacactctgtggaaaatctcgttgtaagagccgaagcttacttgaatgaagtagctctcaagagcttatcgagttcgatcacagtcttgcacaaatcagagaagttgttgcccattgctgaaagagtcaaacttgtaagccgttgcatcgatgcaattgcttatatgacttgtcaagagagccatttttgcagtccttcttcaagtaatagcggtaacaatgaggttgtggttcagcagcagagcaagcagcctgttgttgattggtgggctgaagacttaacggttcttaggattgattcgtttcaacgtgtcctgatcgcgatgatggctagagggtttaagcagtatggacttggtccagtgcttatgctctatgctcagaaatctcttcgagggttggtgagtttcttacaaacacacattaccattttggttgagtctcttcttttgttgaagttccataaactagggacaaagaatgatgggtatccgttaaaagtttgtttcgtttctttgcaaatgcaggaaattttcgggaaaggaatgaagaagattgagccaaaacaagaacacgagaaaagagtgattcttgaaacaatcgtaagccttcttcctcgagagaaaaatgcaatgtcggttagctttctctctatgcttctacgcgcagcaatattcctcgaaacaacggttgcttgtagacttgacttggaaaacagaatgggattacaattaggacaagccgtgctcgatgatctcttgattccttcttattcattcactggagatcactccatgtttgatactgacactgttcaacgcattctcatgaattatctcgagtttgaagtcgaaggagttcgcttaagcaataatggtgttgatcttgctggtgatatggaacgtgttggtaaacttttggagaattatatggctgaaattgcttctgatagaaatgtgagcttgcagaaattcatcggtttagctgaacttatccccgaacagtctagggttactgaagatggtatgtatcgagccgtcgacatctaccttaaggtaatattaagttagtaaacatttacattcatttgctctataccgaatccgtttagatgagactacaaaaactggtaaatatttgacatcttgtggttaaggagatgatcaagttcccattatcttagagattttgaaaaactttaagagagctctagtgaacaactatggttttttcttgcaggcgcatcccaatatgagtgatgtagagaggaagaaagtgtgcagcttaatggactgccaaaaactatcacgagaagcctgcgctcatgcagctcagaatgatcgtcttcctgttcagaccattgttcaagtcctttactacgagcaacaacgtctacgaggagaagtcactaacgattcagattctccagccccaccaccaccacaaccagcagctgttcttcctcccaaacttagctcctacaccgacgaactctccaagcttaaacgcgaaaatcaggacttgaagctcgaacttctcaaaatgaaaatgaagctaaaagagtttgagaaagagagtgagaagaaaacatcatcatcaaccatcagcacgaatccaagttcaccaatctcaactgcttccacgggtaagcctccattgccaagaaagtcattcataaactctgtttccaagaaactcggtaagctaaacccttttagcatcacaccatacaacggtagaggcagaaccaaaccaccaaaagatcggagacactctatttcttgaataccatatctatatacacatatataaagttgaatttttgttggaacttttaagttctgattcaaggggttttcttcctgcttatcaacatttgatattttggtgtgtttatgatgtataaactttatctgtggaacttatcacttatgagtatagatcatagattcagagaatttgggattctaaagctgatgatgatcaaaccagatcgtggggtcatgtattaaaaaataatagtaacttttcaattttagttctttggaaattagggaaagaaatatatataaaaatcagaactagaacaggggaagtaggtgattctcatgaagcctgaagggaacatgacagcagagattgcatgttcttgtcccataactaattcatcattggccccttttataacttctcctctattattattttttattcataataattcaattttgctctccaaaaaacaaaactcaatttcattatcttctcctttttatgtgtattttatagctaaagatcgaaccttatatagatacttcacctgataaattttgtgctcgaaattaattaatatttatcttcagaaacaataaaacattaatattgattttatttacaaaaaccctaaaaagaactagtaaacaagaaaattactgataagcattaaataaaaaggaaaaaaaatcacctgatatgaggcatgataaaacaatctcatcagaaaataaaaattaaactactaaattgaaaaaaagagatgcaaatctatttcagaatacagttaaaaattaaaaattatttattatcaaataacattcaaggtcaatgcttgaagccatggctgctgcttctgatgtttcatcattctttcttgcctcacttgttcttcaagattgttgttattgttattacttgatcctgtcgaagacgaagaaaaactccggcgaccggaatttaaactcccgtccatcatctccggcaaagagttctttttcttcttcttgttcatcctcatcatttcatcaccaccgtaacacgagggaccaagggttaactcgatctcactctcatccataatctctatattattattaccaccggagaaattcgccggccggtcaatctcgttgtcaactcttctgatgaatgttcctagacctgaatttacatgattgttcttggtagtaaatttgttgatctccatgttcttcatcaatatcttctgaacttgatataatctatgaagttcatatacctgaaaatgcataataatcatatattaatttttttaacatgtgtacatatgtatgacttaagatgtaatatatggataaggattctctttaattattacctgttgcttgaaagtttcttcatgtttaagcatagccattttcatgcactgcttatcgtacggattaagaagcttctccatgtttgatatgttccaagagattaggattttatttcatcaagatctcaaggagatttgatatgacgaaacttggaacttcggttttgtaataacctgtgagatttgaaagttgttagggacagaaaaaaaattaaaaaaaaattgtctgctagtagtactcgatttagattctgcaatttttagccactaatgctaacaaatctgagcacacatgcacaaaaatatcttcatctatctatacatacaaaatttcataacatatagatatcgtactttgaaaaccaatttggtggttcatgttctttcccttatacgcatgtcaatcttgtcttttcatcaataaagattcttttacattcttatggacttttgtggttttcacagtaagaattgatgtcaagtttggtgggaataataatagagctgttctatctaaaatgaaaacaaaccaatctcaaaataatcgaattgaattaaatccaaaaaaaaaaaaaaaactgaaattaaaaagctgatgaagaaataaaatcaaactaagaagagataataagtacgtagtgctaggttatcattactgacctgaaaccaattagggtttaggagctgatgattatacgatggaagaagatgatgaagaaaattaaaagagatattttttgtttttgttttaagaagagaataatgagcttgagaagcagatgattatgatgagcttagagaagagatatggattggtgcgtcacattcttcatagttatatatactgcagaaaaattatttaaaaagaaagttcacaaatttaatgattataaaaacaaggtttaagtaatcatttgtttaacaattaattaatctctctctcacatatcacaagaaccagagtgattgttgcaaactaactcaaagcccaaataaaacaagagtgtgtttagccaatagccttcaaaggttcttctaagaaatatgccatatgccacctcttcagagttcagacagctccagcaaagcttttacttacacaatccatataaataatatgatctatattaattttacatgtaagtatatatgtctacaaaaatcgtgtacatggatacatgcttgacagatgagacaatactagattcaatttcggatccctcacatattcataaaattaaattcatccatagaataataatattcatggcttgggggatttatgattcatggtttttatattggtagttgaaattttatatattatatcatcatcatgaataccgatgttgttttggagtttttcgtagaactttaattttttggttaaatctccggaatatgtatatacattgtcaaataaatgtgaatttagtggttgttggagactttatatatatcttataaactttataataatcaataaaaaatgattcgataataattatgattaagatataataaagtgtttcggggaacatcttatatcttgctgagcttgaatcacatgcaacccagactaacaaatcaacaaacccagttgtcttaataaatgtattatacaaagaagaagtatgattaattagtagatattctaaaataattagaagagactttttagagaataaatttggtatttagagagcgaacgaatcagaatctgagaaataggtggcatgtcgtgggtcctgcaagtatggggggagaaagagatcttagccgttagatttgttaaggatgtcctttcgaactgttcaaaagtcttaaaaactgacccaacaggatctgatctccaccgtatctataaaacacacacataaaagtgaccaaataattcttctataagtaattatcacaattatttttagtattgtttatatgaaaaagttttgctgattaaatgttcctggaccgactttttttcaacaataaaattttattatctcgttgagtttgcatgttatgtcaaatttaaattaatacaaggcatggctttagagttggccgttttgtgttgatttgatcttctatattaagtcaatttcttatgtaatgtgtaacgggaacaatgtcaaatcctttacaactcactaatccataattatatgttacgataaggaatgatttaggaaataaaaccatatatatataaatataaagtagcataaatgtcagaagtcgttatgtttatttatacaaagtttaaacttggcctaaagtacttcagaaatatataattaactatttagctatagaaactagaaagtatacaaagaatgttaacatttttcataacaatatatatatatatatataacaagttcgaatcgcaatctcttagatctcttaacaaaaatatgtgggaattattagctaacatgttgagttgaaattagatttaaacctagccactaattctctatctctcatttcattttgtcaacctaactactaacaccatgtatcaattttatcgttatttacttataaccatctgttatgttagctagaaaacatgtgacaactagctactaattttatttctataattaaccaaataaactaaagaaacaaacgtgcttagaaatgtggatgtgagagagagagaggcacgcgttgccggagagaggagcggcaatggcatggagccgtgggtccgatcgacgcccgcgtttgtggagtgctcattccttcctcggaaattgttgttacaacagttatttatgtatttttggaatggccacataatattatatcaacccctggttccgagttttgataaaatgtggatcagacccaacaaaatgaaagattgagagttgtgaagagtgttttcgtaggttcttggagcaaacgagacactgacttctgcagtaatgtcttgtccctcctcctacgctatgatcacgcgctttatactctttcttttgttttttacttagtctctttcgattaattaaattaatgattccatattttgagagtttaagctccatatatactataatgttgcatgtagtctatacgcatggatatgtgtgtgttcacacatgcgtgtctttgtgtgcttttaaactttttatttgttgaaataatataaacacagaaatgcatgcgaaaatgtatacacactaatctatatgcatatctatatatacatttttgaagtcattttaacaaataaatcctgaatttggatttatttacaactcaatgccattaacattaaatcttttctccaaaataattaattttactttaaattcttgatttaaattgtcaaccacattatcaatcaaatttaatccaaacaaacttcaaatcaatcctttaaaattagcataaacatatttgttaacaatattttaaaacaaagttttttgttaaaacaaatattactcttactaaacgttttttgtttaaataaataaatcatgtattagaacttatttacaatgtcatgacacaacattaattatttaggaattaaagatttaaatcttctaaatccttgcttttagagttattatatcattacctaaaaggctcaaaatataaaaaatttaaatattattatttatatatttaaactttataaaaaattattaatatttaaacttataaaaaggtttaatatatcataattttttaacatcattatataatatatagagtttaaaaaaatctcaattcttccgtcatattttgtgactcgaaattttaaaaataaacatatattaaccaattggcgaaaaatgtgtgagttcaacgtcccacatcgactaaaatatttagacaatgattcataaacatatcataaataagattaacatcaggaaaaaaaaaagattaacattaataaaataatggtatttttacgggacgggtttggcgggacgggtttgacaggatgttacttaataactattgtagatagatacaataatagagtatggtttagagttaaccatacatttgtttcagtaatgtaaaccggtataagatacactattactagatttttaagacatgtgaaatatatataagattcaccatttttgcagccattttaacaaataaatcttggagttggacttatttacaacccaatgccattagcattaaatctttttttcaaaataattaattttactttaaattcttaatttaaattgtcaatcacattatcaatcaaatttaatccaaacaaacttcacatcaatcccttaaaattagcataaaattattttgttaacaatattttaaaacaaagttttttgtttaaataaatattgttcttactaaacgttttttgtttaaataaacaaatcatgtatttgaacttatttacaatgtcatgctactgatattaattatttaggcatgaaaatatttaattaaagatttaaatcttctaaattcttgcttttagagttattatatcattacctaaaaggcaaaaaatataaattttttaattattattatttatatatttaaaattcataaaacattattaatatttaaatttataaaaagtttaatatatcaaaaaaaaataacatcattatataatatatagagtttaaaacatctcaaaaaaaaattcgtcatattttgtgattcgaaattttaagaatgaacatatattaactaattggcgaaaaatgtgtgggtttaacgtcccgcaacgaataaaatattttgacaatgattcataaacatattataaataagatcaacattaataaaataaataaattttttttgtggatggatttggcgggacgggtttggcaggacgttacttagtaacaattgtaaactataaaataatttacaaattatatatatattaatttaaaaaaatgaattgtctacgcggtgtaccgcgggttaaaatctagtagtatatacattcgtaacaattattagcattcagtttgatttttgctaataatatatatagtatggaatttcatactgaaactcattctaaaatttgaaatatgtagaaattaaaacagttaagtagacacctgtttccagttttgctaatatatattgcaaattcagaatatattttcaccggctaaccatatataacaagaaaacttgataattagtcttctaaatatgtatgaatcaaaaaatttagtaatatattatgtatatatgcatattttgaagaaacaatatacgactagtactcataaaacatagagaatgttcttgaagattggcatttgccaaaataaaattcaagtgcaatgaagaaaaaaaaagctaaagtaatgttgtcattagcatttttatttttatttttttccggagcatttttattaatttattaagggcatattttgcacatcagatcaaaggagtactttattacagaaattgaaaattcgtttgaagacatgttgagaaaatcaaggatcacggccttctgaaattctgaaccttgggtttcccatttcataatcacgagcttgattattactagtattggaaagtaaaataagatgattaaacaagtgattttctcaattacgtgtcactaacactaagggtaattatgatgaccaatgggtgacatctcgattttatcaaacgtcccttaacttttttcgacgtcgagattttataaaccagtaaaggcattctctttcacttttttcattccctcatttttatagaatcagtttaagtttttcaattgctaagggaatcgatcgcctatcaggagattcttcacatcccttataagctcatctgaggcaagaaaacaaaataaaatgattcaaaaactacatcaaaaaaaagtaatggacatgaaatgattcaaaaaaagtttttgttgctatttttgctctgcacgaatgtcacgtttgagaatcttatcccttcataaattccccaagtgtcaaatgtcatgcttcttgttgctcataaagacccttttagattccctgagatggatcccccaaaaatatatttcttattaggttgagattctctaacttgtcctttcaaatgtctatgggcctgaaagcccataaaagtcaaaatttccaaagttggcccaaaacagaaagatacttctgcgtagacattctacaaagtcaacgcttaaatatgtcatattcttttactaattcaaatcccaagttactagagaagcaactcgtcggccatcaccaagaacgtggctccaagttatatatgattcggccgaattttgaaaacttcttcaaaaacatatagaattgttctatcattttattgataacttccatttcaccattcctataaataccattcaatagttttcttcattctcacacaacttagacaatatctcaccattcctgtaaacacaaaaacttgtaatttccaacgaaatggcgcggttcagtctggttgtagtcgtgactcttagtcttgccatctctatgttccctgacacaaccactgctcaactcaaaaccaatttctacggaaactcatgtccgaatgttgaacaaatcgtgaaaaaagtcgtccaagaaaaaatcaaacagaccttcgtcaccatcccagctactctccgcctcttcttccacgattgcttcgtcaatgtaatgctcaaacttttgttgatttttgtattagaaaccttttatgcaatgatttcttaaaaattttggttggtatgtataaatagggatgtgatgcgtcggtcatgattcaatcaacgcctaccaacaaagccgagaaggatcatccagacaatatttctttggccggagatggatttgacgttgtgatcaaagccaagaaagctcttgacgctatcccaagttgcaaaaacaaagtctcttgtgctgatattcttgctttagccacccgtgatgttgttgtcgccgtaagttatatatttcattttcttccaatcagtataaaagtgtttttggggaaaagaaataaaaaccatatgttaaatattaaaacatgtgttatctattatacaacaatgattaagtggtgtacgtgtacgcaattttcaaaaaaaagttcggatgtgtgtaggccaaaggtccgtcgtacgcagtggaactcggaaggtttgatggtttggtgtcgactgcggctagcgttaacggaaacttgcccggaccaaataacaaagttacagaacttaacaagctttttgccaaaaacaaacttacccaagaggacatgatcgctctttcaggtaatgcatgataacatacgtttatatatatgaagatagattggtttagttacaaataaatttttgctcaatattggtattttttgtccatcccttaaaagtagaccacttatatatcaacaaagtggatctaatctaagctattaaatttgtccaataatgcagcggctcacacacttggattcgcccattgtggcaaagtgttcaacagaatctacaacttcaacctcacacacgccgttgacccaactctaaacaaagcctacgctaaagaacttcagttggcttgtcccaagacagttgacccaagaatcgccatcaacatggacccaaccactccaagacaattcgacaacatttacttcaagaatctgcaacaaggcaaaggactcttcacttccgaccaagttctcttcaccgatggtcgctcaaagcccaccgttaacgattgggccaagaattctgttgctttcaacaaggctttcgtaaccgctatgaccaaactcggccgcgttggcgttaagactagacgcaacggtaacattcgtcgtgactgtggtgcctttaactgatcatcctttttgggttttgttttcgagatttgttctttgacatgttatgagtttttgttttgttgtcttctgtttgtttctgcttcttgtatttttgaaaaacacattaacgaatctataccgttgttttatttctcgtgactgtaatattaataatcttatttctattaaacttgtttaataaatccaatctgagcatcaaaatcaagacaaaccaagacatatatacacaaaacctaaagatgttcaaaacttaaaactctgtaaaggaagaatctgatctatctagagttagtagcttatctgaatctgcaggcgatcttctcaagctttgtaggccaatcttcccctagtatcgatgggtttaacgccatagctacttgaaaatctaccagagaagatgctgatgaagcgttactagaccttgaagctgctagttcaagacacggtttgatcaatctcttcaagaaaacatctagccctgcgtttaacgagttagcaaacccaaccgaaacctctaatccttcctccaagtcatcttcgagtttcttctttaaagaaaccgaatcaggaagctcaccagaggagtaacaacacgtgtctatacgatgttgtttctttataacatctctaagattaacaccaaaaggagcttcaataggttgacttctccaacatggaatcaattggtcaacttcttcaacattttccattgaccattgttgcctaccactagaagaaacaacctcagtgactagactcttccctttgctaatattaccatctttattaagcctccgttgagtccttcctttacgaggtgatctaggaagttctttgcacaaagattgaaaagctccatttagttgcttcttcttcttgttatctgactctacaccattctttacgaatggaggtagtgtctttgagagacatatattcttaagaatccctctaagcaaagcgttgtgtagacttatattctccctcttcaccgtcacaatgattagcttatcgaaatcagatttgctgattttcaagctcaagaattttgataagagattaaggtaactctctgttttggcccgaccaatcctcttctcaatctgagattttaactctgaaatgtctgttctaacgacatgatgctgactcgttggcatttgggtcccctttaaaaaaaaaacacagttcacacaaaaacaatgaatctggattcgtataagtcaaatcatgatagaaaaaggtcaacccaagttgcgatttaccaaaaaatgtcgaattgagattcgaattacgaaacccagattgtcaaattatcggaattaagtaatttttcaacttcattcgataatccaagattcatgtaatcccccgaacgaaacacacataaatgaacaatgaacagtaaaactaccaaaataaaataaaatcccagtttcgattcccgacagaaacaacaacaacaaagatttagtgaaacttgaactctttccacagattaccagattcgaaaaaatcacagagaactgaaaaagttaactaaccttgtgaagaagaccagatagtcgaatgaagcttgaattggaacagtactgaactcgattttaatcgcgacttgaattagcaaaatgaaggattttgaggaaatttagacgaatagatcacattttctaaattttttttttttttttttaagaagcttctgcattgagggagtcaacgtttagtcaacttggcacgtgcaaaattatatacagctggagagtttagctaacggaccaatcatgttacttgatttgctaaataaaaagagtttgcaagtcagcacaattcagacacaacgggtcggggtcgggttaactaagacatgataagcacagcaaccccattaatttagtttggtggtgcccaagccgaagcaaacataacgctatgtcccttccacgtcagcacaaaacgttccacgtcattatcgtcgtcaacatctttcttcattccccaaccggtggcgtgttcctccagcattgttttaacctctgtcatcgccgtctcaccgaacccaactccggtaaacttagcttccctcatccgctcaagtcaccggctcttcggctctaatctctccactctctccgcaccttccttggctactacgttatctatcttccaacttatatctgcctcataccactgtctttgctcgctaccacgtgtcaaaaacatctcggcggtatcgtaaggaatccacatgtagttataaagagaccgtaacctgaacatttgaaaacacattttactcatcaggtcaaacattagtgtttagggtttaaattttgaaatagaaccgaaaaaagataaacctggagataaagttagtcgacgtgaaatccgagtcttcgtcgataagggttacgatcgttgggtttagatctcgaagttctttcaagaaaactgatcggagattcgaagttaatatttcgtcggggatatagtgaagcatcatgtggcagttaacgacgagagcttcgttgaagacgaatgggtcgattcttagttgttcgataagggaggagaggccgtcggagtaagaagaagatatgattctaaactccattgcaacgttacgtgtggttgcgaagtttactagctttgaacctagctcttcgtaggagattccgagcaacggcggcggatgaaattcagcgtcggaagcaatgacggtgagtttgagaagcggaggcggttttttgtggagtttgtttgccatggagtctataagagtagggatttgcatgcagtgagtcaaacttaagtcaacgatgtgaacggatgagtaaccttctacggcgtcgaggattgcggcgttggcggctatgaatccgaaacggtgccatggcgtcaagtcgacgaactcagcgagctctatgacggagaaccggtgtagcgttttctgggatatggaagctgtagcagccagtgatagaaacgcaaacgcagggcttttggaggcggtgcgtgatattaacgcgcggaggaaagaggcagcgagtctttgagttgagttgagtcgccgtcgggtgaagcgaggttgttgagcacccaaatgatctgttgagccaacgtggcgtcgtttgattcgatggcgtttgcgcaatggaggagaagctgctccatgcagttagcatcaccgctaagagatttggacgaagagaaactgggccaaatgggtcgggtcgggtttagaatttgggttgtgttcatatttggatccccttgaaagaacagaggaggaagaagatgaagacaaacaagcaatgggaataataatcaatgcgaaagagagtttttgtgaataatagcaaaagaaacaaagaaagagaaagagacgagacatattgatagtaccttatcaatatgaaacgcaccgttctgatcctcaaaacgagacaaaaccgtaggtgtacagctttttctggtcatgtgtgctttcgttttcgtttctctgggtcttaattcatataggcgtttatatgtctgaaatagctaaatttaggttatagtagtcttctgcatttatggtggtatctctatgtatatggacaaaacattttattattcgtaacagtttgtacatttttcttacgtggttttttcctccaagttctcgtataatatagatatttgttagttcgtaccagtttagataattactggaggaaaaaaacacaaaaaattgcttataaacagtctaaactcagtgtgtaagtttcactatttttttttaaaaaaggtttcactatttttcatatctttaaactaatgattttctaatttgttgttgacgtagttaccacgccccgtggctatatatattttgcttgtataagacaaaaatttgaggagatattcgaccaaagaatatatgattaggtgggcacatcaaatccaatgttgggggaggattcctttgccttgagatattaacagggactagaagacatataacctagggatttggcgtcgttgatttaaacaccacgacaaatacaacattttcgaccataagagttgatatgccattatatatgataagctaaattagttggatactttgattagagaagatatttattgttaatcactcttatctcttacccttgtcattatatatgataagctaaggtagagacgatcttgagtgggccaatcacacttataataagaactttatatgccaagacgggtgtgaaaggacaattcgtttcgtgcactgtgcattttgacaagtactattcaagtagatataggaagcaatggtcttgggctacaatgtcaaggagtcaattagaaagaaattctaataatacgtttatataagaaaattaattgttaaagtgagttccaactaacaaattttatttttttgaaagattaaatttacaatagttttaaaatgctaatattgttggtgagcactttgtagatcaataaagaaagacactgaaattgttagtacaaaaattagtatttcgctcgatcgtgtattactgtatttttctactaccactattgggtattggctgttgggcttaatagaaatattaacgggctcaaaaaacacattgaatatagcatacaatgattaaaatccattatgggcccatagagcattgggctacaatgatagccagtcaaaaagaattgacgtaaaacatatgaacaataaacgaagttagtacttgattcttgatgacatgggcccatttttatatccctttgttacataaataaaattgaatgtgaattattttatataaaaaaaatcgttgtacttgaaattactcaaaatatatacaacttacagttacgtgtatatgcagctaagttatatgtatggggaaagattagtcaaagttgtcaaattcatagtaggcccaaagatgccaagtctggatataagttccggcgatgcgggaaacagtcacgtgatgatcacgtgttcgaacactgtctggtccttatctcgatcgctctcaaatctccgttggtcccaagtccccagattctttacgcctcccatcctttgatttaccaaattacccccgacattaccgaacattctcgatcctctttaataatatgtgaaacagcgttctgatcatgcaagtgaataccaattttttctgtaatctagtaaaagaaaagaaaagtgtgtgacaataatttataactattttttgtttgaataattacgtaaccttattttaattaatgtattttcggtgtatgtatttgccaatatgaaaacaataattgttacataccgacaaaaaactcacaaacaaaaaatcattgaacacacactctgaagtcaatggaattataatccttaaaaacgtatatttattactttaaaacagatccgacatgtgtggaaggaatcaataaacaaggtactactagtagattaagtactcatttattttctctagattttaaaaatacatgtagtggatgacgtattaatgtaaccaaatacaaagtgcgtggattaggagatgaaaaagagtttaggggatacgaccaataaaatcgttgaaggggcatatgtctcttggactctcccacgacgaaggatcgtttatttgtaaacccccttttattagtttttgcctgttcattagtggcaaaaacaacgctagtgacatggcttttgtctttagaaaccatcttacgtcatatgttatcaaatctctcaacgactaaattccttaaaatatatataaacacgaaaaacgtttaacccaatcatttcatatctctcttactttgatgtaaaatattacttttccattccgatgaaatgtaagatcgattcgagtttcgttctttgataacaattagaaaagaaaaaaaagtttactcattatgagaaagttgatatatcattgatgcaaatggataaagctaattaatattaagtcagcaagtgggctcagagacataaggtgaaggacaaaagacttaatgggccctacgagggtccaattacaactacggcttttttcatccagcacgagtcatcatcctatccgtttctttaaacatcattgacttcaatttgtatcaacttttttatatgtatgatatataaaatttcttaatcttccgacaagtcgttgatgatatcatcttggatataggtcaggtaaaactagaaagaagaataactttcagtttttttctttttgtatcaaagtaaatttttgataaatatatttgttagcatcatccacaagtatcacccaattttaaatctgtataatgcatattatctataatacagtaattttactaacatgaatttgataaattatttgattgaaaaattaaaatgttgacaactgtgggtgctttggacaaaatcctttttgcaagggatattgtcttctttcaaaaacaatacagtaataattaggtggaactaattcccttagtaattagtattagtggaacggacggagcagattgaaagatggaagatgacgtgggaccatcgatcacgttcccaagatcggtggagataaatcctcatatcagggaagaatagagatgataccatatcataaaatgccaaaataaaataacatttacaagaaaaattaggatgaaaaaatcctatagattccttaaaagttcagagcttgcagaattaaaaaaaaatgttttgttcaatgttaattgacctctaaattttgttatatctgaattccgtaattttaaaaatgattaaatgtacacgtaaaattaataaaattagaaaagaagataacaagtcatagaaaaggaagaaagctgacgtggaccactgccttttgcttgccattggatggttggcagaagaataattgtaggtcccttgtaataatatcgttttatgatatactataaaacattatcataaaacgccaaatataatctcacgaagagccgagctattacttataacttgtgtttttttgccttttatcttacaattatatatcagtacatgcataatgaattaggttttccattgtgtcaaaaaaaaattttttaaaaaattaggttttccataaacaaaaatctaatactgtatataaaaacacgcaaaaaagttggcggatgcaactgtgtgagaaacaaaaagaacgagtataaagatgcaacttatttaccgaacaaagagtaaaagaatcacaaacaatacgtagtgaactcaagcagaacaacgatgtgatcatatcaatgcagaaactctagggtacgtgatttgaataatagactaattatagtgaacagttaccatacaacatctaaagataaatcgattgatgttttcacattgtgactatttgatatcaaatggcctcgtcatattaaattggagcaagagtcgtaatcgatccaaaataatgggattgattattaaacaaaatagccgttgaatattaataaaaagaagatatagatggagataaaggagagtgtgttttagggtatgccatgggtgaaaaatggctctttgcgtcgtccaaaagccgcctctataccaaaggggctctctctctgtgtcatgtgtgcctcctctcctctccaaccatttggtccaaccacatgcttagatattctatatccactttattgtttttattattattattattatgcacatatccaaaatatattgtttatgtacggtccaactatttcaacagtttcgatctttttccctacttctagtttattctatgtggtaggagtcgtccaatatactggttggaattttttagaaaattgttagtatagtatttatcgatgacaaatcttctttcatttttttattgaagtttcttaaggtcgagcatccaacacgggatttgcatatccatcaacacatgtcagccagttacatatactggacgtgaagaatcgatcggtgtttcttggatgcgtaactattttgagtttattcaatacaaatccaaacaacctaaaggaattagttcacattgttactggattatgcagaaaaactagacataatatttttcactcaataaagttttacaattggttaatggtgggggggggggggactcaaaaccgagagaacaaaacgacgtagttgttaattcgccggtccaatatttatccaggaaaaaggaagaaaatgtgtaaaattacatttaaaaccctagactaactctgagaaaaccgccgccgttttgcattaaacaaaaaggttaagcaacttggtcgtttctcctcctccgttaccgtacacatcacccttgtcacaaaacgccgtcgtagtcgtcgtcgtcccggagtcctctgagttcatcgacggtgttactgatcgccgccgtgtagaagaaggtgttgcttgcttaatgggaaaattagggatgagagatagatcaagctccgaagatggttggtcttccgatgataatctcttacgtttcgtcggagaagaagaatccatagtagatctagatctagagcttgagaatcgtgaatgatgatagatgttacgatcggtggaatcattttgctggagattcaacatttcggtgcagatctcagatgcttcttcagatgtaggcgaaggaaagccagcgaaaccgccgccgtgagtgagaagctccgggatcggtcttaaagaaccgccgcgaagcactgtttcaacagccgcttgacagatattccagtttccagtccataacattccgattgctccgttaactggattgacagttcttccacaagcttcgtagagcaacgactgaaacaaagctgcaccacaaaaaccggaacaaagatgagaaaaacgaacgatgaaactgaaaatccggtttaaagatctggtttagtagtaagtaccaggacgttgagaatccggaacagcggagataaaggacatgagaccagcacggccgaagaatttagcgacgaagacggtggcgtggccttgagcatcggcggtttcaatccattgaatacatggccggaggatacaattctcgctgcaacctttccggagaacacggcaaccattgcagctcatcttttcagattcaagttttaagttatttcctccggtgaatttggagtttgtattgttttaatttaaggttttaatctcctgaatcttgctgatgtctgggagaagaagaagaagaaagtgatatctttgcacagacaaaaaaaagagaagagagattaaaatgttttatgaagatagacaagaccacatatatatatatatatatatacacacacattattagtatatattaaaatccaaattggaatatttttgagttttttttaaaaaaatataggaataataaaataatgaagagacatagagaaaaaggaagcgtattggtgcgtgaggctcgccgccgtagaagaatcatacaccaattaaaacaattatattaattgattactgcaatttttattccacaataaattagaaacggatttttacacatttttttaataatagtctttttattggttggtaacgtttgtgaagtgaccttagagagagagagtgtgtgtgtggtaaaatattccaagatgatgggtgcgagcggctccgtgtttccgcgaaaagttgtgtcttctcctctctcagccgttcattttatttttcagtcgatgacaactgtgtgtagtgaaattagagctttttatttgtccaaaagatacttatttacgggtcattttctctaacggattcctcctaatcctttaatcattcaactttatttaatagatcagggtaattaaggggtagtaatcgattgattttgcaaaaggtcatcaataattgcttccatttttggtgaaaaaaatacatctagtatgactatggaatgctaatcataacaaccatcttctttttattatgaaattcaaaaggtcacatgcaatgcaataccagagagatatgtgttttgccccctctagttccctagcttgattttagttcatgcattatacacgatcgtgtgtatgtattatgaatttaaacaagaacattacaagatcttaaaaaaaggacaaaagtatgaataattaaggggactaacctctatctaagtcgacgacccctgatagaaagaaagaaggtattgaccctataacatccttaagagacctacctatttatttatttattatataagtcttcttctctttgtcactctccacacagctaaagcgagtctttgcatgggagctatgatgtcatgggtgacgcgatcaacgttttctttttcccacatacttgatcttataaccgttgtcgctcggggaatcttcaaagtctctaattctatccaccatgtctattaggcccattacccaacctgtaatgagtagtcctcttttcttaatatggccccatagtttctttattcatagtgggccgaatcatatgatctttgtaaattgtagggctatagccggactaaaccgcatttagttacagttgtcttgttaatgtaagaacatatggatgtccatgtgggggaactcgaatttgtttggtaacgaagataatcggatttgcccatctaattatcattttcacataaatgggctttaggataactaaatatatacgatggaccagactttcagattaacccattagtttttttttggaatgttatatgagttcaattccttacttcctagctagtgaatatgaatgatgcctgcataggttaacgataattagcatggggaaaatcttattatcttcgttatcacatactgacatacataggtaaatttattagagggttttagcatggtgaatgtatgtatgtggtagtttgttaaaacttacatttggtcatgtgtcaaagataaaattacctatcatatataatacatatattttgtggatctttatgacgtgtgcatataattgtttgttgtataaatgtcaatagaaccatttgctgtctaaatactcggaagaaattaggttgctgttcatgaataatttttttgtataagatatagaaccgtttattacctgatagaatgtatattagatacacatataccgaatagatatccatgctagatttgatctcaattcgaattcaaagaatcatttaaagtagattattttaaatcaacgttatttgaatggaagtagatggtaaaagttatacatacataatacaatatttacctcctaaattctccacttgttcgttattctaagttagataaactaatgaaccgtactcagatacatgcatttaagtggattttattctacagaaaatgcttatattgatgtgtggttgtatacgtgttttggaagttatttaatttcgatgttacatattaggctgcttgacccctaaaataaggaagaagtaagataaaaaattttaaaaattgagaagtaagtgaggtcataaagtccaatacatcagcatgcctttaccaaatgacattacatacgtagcgtgatgtgcaattttggcattttaactttttatattacaaaaaaaggaaataccctagaagtttataactaatcatggccatttgattaatttatgattatctctatttagacgtttcttaatcaattttcaactcttttatgtggacaacatacaagaattaaattaaactcatgaatattccaaagtaatgttccaagcagtctcacgacacacatatatttaatatgacatttcattgttttcggtaatatctattttaaactatattagaaaacaatatgtgtcgatatttttgaatcaatttcaattgtgtagcgtcccatcaaacaaaatataaagatatccatttttttgtttccatattcgatcatatatcttgttctatatgatcattttttattgacgtcagaaaagatgaagaagaagaagataatctcttattatatttctaatttagcatcttcgtataatgttatctttctttagttcattttaaataccgatatatcagttgaagtacgggaacatttaagataaaatcattaaataagctatatactatcaaatttattttaaatggtctgactaaaatatatttttcgttagattgtgaaaactaaaagtaaaaaacatacactaaacattgtttatataccattaattaaaagtaatattaaacagtggaaattatacctttgagttttcaatatcaagaattgattggtagtaatgaactgagaagagagactagagaagaaactagagatacgaatccaatccaaagaatatgaaaaagattgagagaatattgtgaaaaaagcaagccgtctgatcacgttccttatattatgattagcgcagaaagatgattattccactgctaagctaagctaagctaaagattgcgaagcaccttcgcatttctcttaattatgttgtagtatttaaaagccagaaaggttaccgtttttattctaaatgggtccgcgtcgagaacaaatcgacggccttagtttcaggagaaaatttgcaggaccaccactctcctcatgccacgttgcagattcttcttccgctttgttcatcggacctatctctttttagtttttatctttttattaacaaaatcccataacaatttagctttttattttgaagaaatatgattataatatatatccatatggatcttaaaattcatttcttgtaccgtgatggtaatatgaatttagttaaattgataacttttgctagctatttattaaaagagtatagaaatgtactttttggttaactctgatttagtaatttcatactctagtttagtttattggtggtctctgcagtgcaggcgctgttttttacatttacaataagtgcacaaaagtagctatactcatattcgtctctgcaggtgctgtttgaagtcaagaatttgaaattgttttgatcatgaaacacatgagttgcgtaaaagaccaaaaatcattgtgatgtgatatatgcaaatagagtatgattgtgaataaagataagaaatattttgaaagagaaagggatcgatatcgtggtgataatgtgtaatcattatgacatcaattacaaatctatataatacacaagtaatatttatcattgtattgagctctacctttataaattcagcaaatgatataggcatatagctgactctctctatatataaacaagatttaaagcaaattaaaagggattgtagctcatcctaaacccaccacgtttctccgccgccatttcagctttttctgtgtgcttcccatccactttttcttacatcttttttttgtggtcgtgttatttttagtacttaaattcccaatcgcctttctgtgtgtgtgttcttcatctgtaagagattttaaccggattaataaaacgcggcataactggttgatgccttgatgggcagttgaaaaaaatagatacaaaattgaactaacaatgttatgtagattattcacgatagtgagagtatacgatttgaagaaatgtataaattagtaattatttattagaagctccaaaacgatttatttaaagtttgggatgtaacgcagtcgcagtgccaagaactataaaatacgatagaagttagaatcgtgggttagtaggttttgtatccgtccatatttaatatttaagccgtgatattcccggaaaatatagctatacacgaatcctagctaaccggatcatcaacataaaatataaccagatatgcgaattaaataacccaaggaaattaagaagaatcgacagagctccaaagaaagagcactaaccacaacatctagtttttctttaatataaaatacatagagagatagtgatgtctaaataaaatgataatcatataatttaacaaggggagaacaaagctaaatactaactataaatagactaatgacaagacccactttgtgaaagagaacgattgctatatttgcaagaaggaaaaaagctgttaggttttgatttctttgttatccgtaaagttttatattaatatacttaagtttgcttagctgataatcatggggaaaggatttaacgtagttgtggtgagagagtatgatccaaagagagacttaacgagtgtggaagagcttgaggaaagctgtgaagtcggatctttattagtggatctcatgggtgaccctcttgcccggatccgacaatctccttctttccacatgctggtacgtatatgtgactatttatacgtttatgtcaaaaatgggtttgattcgagtttttggccaatgcatgtgacaggtggcagagatcggtaatgagatagtcgggatgatcagaggaacgatcaaaatggtgacacgtggtgtaaatgcattacgtcaagccgacgacgtttcgccggaaataaacaccaccaaacttgccttcgtctccggccttagagtctctccgttttacaggttcgttttctaaatagtatttttccaatatcatatcaactataccaaaaataaataaagaattaagtacaagcacttctatttttgaaaaatgtatgatggttacaacataaagtatactattttgatgatatacataactcctaacggaaaaggaagtttttaactaatcaaatttaaaaatattttaggaggatgggaattggactgaaactggtgcaaagacttgaagagtggtttctacgaaacgacgccgtttactcctacgtgcaaactgaaaacgacaacatagcttcggtcaaactcttcaccgagaaaagtggttactccaaattccgtacaccaactttcttggtcaacccggtcttcaaccaccgagtcactgtctctcgacgagtcaaaatcatcaaactcgctccctccgacgctgagtcactctaccgcaaccgattctcaaccaccgagtttttcccttcggacatcaactcaatcctcaccaacaaactctccctcggcacttatctggctgtgccacgtggaggagacaacgtttccgggtcgttacccgaccagaccgggtcatgggccgttataagtatttggaacagtaaagatgtttacagacttcaagtcaaaggagcgtcgcgtcttaaacgcatgttagctaagtcaacgcgcgttttcgacggagcgtttccgtttttgaaaatcccgtcgtttcccaatcttttcaagtcgttcgcgatgcattttatgtacggtatcggtggcgaagggccacgagcggcggagatggtggaggcgctttgctcacacgcacataacttagctagaaaaagcggttgtgccgtcgtggctgctgaggtggcgagctgtgagccgctcagagttgggattccacattggaaggtgctctcgccggaggatttgtggtgtttgaaacgtctccgatatgacgatgacggcgtagactggaccaagtcaccacctggattgtctattttcgttgaccctagagaaatataataatttgtatagaatatattaagaggactctaacaattgcaaccaaacacacaaacaaaaattacagaattaaataccaaatctcagtgttatacttacttactcttcatacaatgtctagatttacctgtaatttcacacttagaagttgttaataatttggattacaagcacaagctagtaatacaagtgtatgtgttaatgtgtaccaagtgtaacaggaattaaatatttatgttttaacggattgttgtataccagtagatttgttatagctatgataattcttagaacttgaattgaattattagtgttgacaaaaaaataaaaagaattgaattattagtgaattcagtgtttaagtcaagtatataaagcgatttgtaagttatgcttttttaacatttaaaaccagttatacaagcgaaatagtagttgattataattgaataaatctccaaccccttttagcaaaggaagtcaaaaccaaagtcttcgttttttcgttatatagttcatacatttcttttaaaagaaaagcttttctttttggtcaacgaggaaaaggctgatgaatccaaaaatatataggtaatcaaagtaaagaaattacaaaaatggaacaaacgtaaccttttgaaagtatataataaattggatgacgtagaataaagaagctcatggaaaatttatcaacttttctttatcatatttatggtcaattctgccggcagaatagaatttgggaatgtgattcagtcagggatagctatatagctaagctaacgttggagagctgctggaccgtggcccatgggctaagttggttggctatacatataaacaaaatgggccaaaacggttatattactttttagttaaatttaaaaagaaaactaaaagggtaacattagtagaattcttgacaaaacaaaaagaggcaacattagtcattagaatttggatttctcaaaattgtaacggttcacataaccaataactttgggttattaatcaccaaaacaaaaaaacccaaatttgttagcttaaagaaaagccctgatttttaaaaagcccaaattgtctaaagtcaagacgatgaccttctccggcgagtcgacggcgtcgatttatcaccgacggtagtaactgagccaggactttcagatgtatctgagctactaacatctccaacgccatctttatctttacctgtccaaagcttcgagaaaatccgagacattacaactccttttgctttcgtcttctcagaactactcgtcttgtctctcgtcgtagttgtcgtctcctccgtggctgtgactgactcacactcttcttctgttgtcgttcttgagctcccgtgcgagccgctcggtggaagagaaggtttcgtggtggcacgaacttgctcgaagaagaggatttgtacaacgactcgtaatggtaacctctcgttttgcacggcgtgagcacaagcctccggcgataatttccggcaatccattaatttgcttgatgatttcttctcactctttgttattcctggatgttgctgtataatcaaaagatcaaaactttagtttcgaatgacataaatccgatgcatttgagagcggacattaccttcaagaacatgtcaatggcacgatacacaccatcgtgtgattgtcttgggaaagttgaaaccttttctgcaattgtaatgaactttgtagtagacaaattggtttcgattctggagatttcagctaagtatccatcgattaacttggcgacatttgcttttgaactgtcgttgatgtcgtctgaacagtcaagctcgtctcttttctctgtttgtgtaacaaactcatcgattaaggtttcaacaatgtcaatgtcatagactgtttcacctccctctggagctctgatcaagagatcacccacatttgcttcctctagcttctctccgattcttctacttaactctttcctctcttcttctccacattcgaaagaaacagaggatttcaacagcttgatcaagaatccacaagaaacactctgtttctcactaggcaacatcgaaaccaatgtctccaacaaagatctttgttccatcacatcttcttcatcatcattatcatcgttttgaatcatgaaaccagggattctctttgctgcatatacctcaagagcttctccgataacctcaggcaaaacaccgccttttcgtctaatagtcgaaaccactcttttaaataaatcaatgctgagctcagcgagatcctcgacccaccaatctctcggtacgctattgttgttcatctcggggggaagaagctttcttcggttataagtataagaccaatcaactcttgcaggatccatagcagctttcaaagcgattgactccaaacaccgtacatcgagtttcacatcttcagaccacggataaaatgatctcgtcgtctggagaactataatggagtctttccagcttctcaaaacactagagttcaagaaaacctccatcttgtaaacaagattcccgttttcaatcgattcatacatctcgagatactcagcagcgcaacgcacagctacaacattgtatgcgttgagagtcacagccattccgtaacagaatttcgcgcatatctcaaacgctggtggccctcccgggatatcgggaatgcggatttcatcatcatctgattgctcatcggtcgtggttgtggctatcaacttctgaagacgagcgcttttggaaagaagaggaaactgttttaaacccaaaaacatcactagatcagtagctatgaccaaaatggttggttacaatgagttcatgactcttaccttatgaagatgaaatttcacgtctccaacaattacaactacatcagtcgctaactccgttgctacatatctataaacagccagagaaagtaagattccgaagcaaaccatatgaaccaaaatcttgaaagacatttttaccttacgcaatcttcatcagactgaaacgaatcaggtttggatccaagtttcataaacttcatttctcacaaataaacaaagccagaaatagatttctgaagattgttctgctctctttttccctcaacttggaatctctgaaatagttttgtaacgacaagatcattaaggatttaaaaatctgagatccttattggatgcaaaagggatcaagagtaaagtataaacaagaagagtgatgttgaagcataaggtgtgaaactttttatatatgttagacttttagtcttagacttaaactataagagaagaaacctatttcgcttcttcagtagctaaccttaagagagattaaaggaaaacatgaaagagctagagatgctccacttgctttgtaaatccgacacgttgcataatgtttctttattatcaaatcctctgtttctctaatattctctgtttctttaatgttgtgtttctttaacgaatcttttcaggttcggaaagcatcaaaggaagaagaaacaaaaacccagaaccctagaaaaaagtgcgaatatccgattaagaataaagcagttcttggtttgtgttgaggaacaaaagcattaaagagaagaaaaaataaaacaaaaacactatggagatcaaaaaagattctgttatgttaatgaaataaaacaattatccaaaaactagagattaatctaattataacaaatcagatcgaacaaatttttggtctttagagaccaaaacatgtgttaaaatctacaaaactaagaactttatatgtgcagagtcacacaaattactcacaaactcttaaaaaggtgatttttaggggtttatatcgacttatggacctaaaatcagcaaaattcagagtaaaatgagtttggaatgaacgaaaaaccatacctttggtggtgggaaaagaaaccttctttaggatcaattcgatgaaatgaaacaaagacaagaggcaaaaaagtgtgggctatattgctgctgctgctgctgctttgtgtgtagtagacagagagaggaacagagaactctatctaatccaagagtaatccgacaaaacacaaaacagcaatccaacaaaaaaaactctataacgttaaaagaaagaaagaaagaaaaaaacagagaaaatcaaaagaagatgagctgttgtttcttcgtcgtccttctcctttagtgcaaatctgaaaacccttcagaatgttctgtcccctttatctctctctccttacaataccccactctctgaatcagcaccaccgcctccaccactcaacttataaaacaatctttattaaactatataagagattaaagaaaaagaaaagttgtattttggtaaataacccaggatttgtctcaatcgaagaatacgtgtgatgtgtgtttgttgcttttttcttggaagcaatggttaaagtagtagtagcaagtagcaaaagattgtatgcgtatacataaattcagtcacgctaatatctgacaagttaaactgtggtttccactttctgacctctctctctctctctctcttttcttttgcaaaaataaaaatgaatacaatataatatagcactagaaaaataatagtactagttttttgagtgaatgagtcaaaattttgagtcatcttaatgcaaattgtgtgagagtcaagtcagtcttttcggtatgttccatccacaaggatttgtgccattcgtttggtttgaccatggaaactcttttttgcttcttgcttggaagcgttttacggatatgagttggtatttatatcacggaaatatgctagtttatctttttttccttctttgataagtcttgttattagcaatgttttccttgctacaaatttatcgccatggaataatacaggtacctaccaaaaaagaaagaaactatttgaattggtagagtattttggataaatgatagaccgatcaaacaagtgaacccgtcctttgccctagtggaacgaaaggggaccgcacgcaacattcttcttttttttcattattattattttaatatttatttattttcttttttagataataaatttatttatgtattggaaaactatatctactttataaaaaataccaagcaattctgtaagaaactcaaaactactcctcctatcaaatttgtttttactttcttctgcctttaattctttctacagaccccaacactgaaatccaaaaggatccaatgtcatttttaaacaatatgttttactatatcttatttatactagtatttttaacataactttgggccacgtcaccctcgggctcatccgcatgaatgtgcaattcatacattttataagacatttaaatatgaaaccatttaaaattcgccatcaccctaatttgcaagactacgtaatcagattaaagctgtgtaatgtgtgattaaagaaaaaggtcaaatatttaaccaaaaaatgaaagaaaataggatttaatacgagctaggtcttaaaatttgttaatttttgttttcgcaagtcactatgcacgataaattgttaatttagactttagagtatcggcttgctatctctgggagaagttatctaaatgtaaaactttagtattgaaatgaagaaataaaattgaaaaaaggtaaacataataattagattaaatcaaaaggagagcacatcaaaatgagggtcacatgattatggagaaagataaggtatccttaattaagagtttggtcggttaggagaaagctgatactatatgattacttccaacggttttggtcaatggactactaaacattgaacattactacatttcacatgttctttatggatattgttcaacgtcctatctcgaatttatatcaagtcaagagtttcctctcaatacgttatatagggttgtttactttctcaaaagattttattctaagtttattccaagtgaagtgatcccaaaaaataaaacgtacgaatgatcatccaaagtttttttgcgcgaaaaactatttttagcatagtttagctaataggcatgatcagctgcttagttatcaaactagcacctgcaaattagtatttgattcttcatggttattaatatgggttagtttcttattgttggtcttgtatacttggtgaattatattagtaaaacaagattaaactgagaagacgggcacatggaagaagcagattctcatagacaaacaaaatcaaatgcatgcatatatgctgattcacctccttgtgtgggtaacatgttcgaatcattacagtcaaacttgttgtagtttaaactttaaatccctctacaacaagtttaccttattttattttctccttgtcatttaaaatatactctatcacttaaacatcgaaacatgcatttctgctttgcactattgggccgttaaagaaaaagccgaataaataaatacatgggcttataaagctggctggtttataactcatattattaatgggcctacatttgaatattaagattgtagcggacccgattcgggaagctcgttaccactgcccccgatcaaaccactagaacaaacaagggtcttcaacataactattaactaggataacgattttagactttggataaaataaacaacatttagatgaaaaatccttactctaaacataaatttccagttgcacatcattatgaacaaggcagagtgttttcagtttttagtcgatcaaactaagccttgtgttacgaaacgtcacatatatacttgcgacaatatgttattaactgaaaaaatatgacagatattttattgattgtttatttttgtgtgatagtttatgtgaacgaacagatcactaggagctgtgtggagtaacagaattcaagtggctttcctttgcttgcggaagtaaatgaagtatagattacgaaaattaaatttctaacaaataataataattcacgattacagaatggtccactatataataacgtgtacgatccaatcatccatctctgcattattattttctttgtaaaaaaaaaaaatatttgtgtatcccaattgtttcctctatctataaacaaatccaacaacaaattaacatttctttttaaaaataataataataatgccaagtccactccaatcattttcattacagacccagtcaagctcaaaccgaagcaactggaaagaaacgaccgttaatcttcaccgtccactaaccctttcttcgcttgatagttgactttttcctcaaactcagtcaacgttaagaagtcgtcactgagacttgatcagccggtaagtttaggtcaaatccacggtggccaccgatcgcactttcttcggaccatctctcattatcaacatcgctgacgtcactaccagcgacgagttctacgctgttgctgctacttccgttaccgttaccgttgttgccaccgtcatagtgacaccgtttgtgtccacctaaggcttgaccagacgcaaacgacttgaaacagattgagcaagtgtgaatctttccgctttgactaacaccgttaccagtgttcacggtaacgttaataacaacggaaccgctgttactgtgactgttattagacagttcttggttaccggaagtgatactagtgttcgtcggtttccggtgactcgtcttgtgtccacctaaggcttggtatgacgaaaaggacttcccacagaccgtacacttgtaatctcggtgatcggacggtgacgcacgtgacggtagaggaggaagaggaggagattgtacggcggagccacgagcgagcatgaggagacaaagagcgagatactcttcttcagaaggaaggttcttgttcgtttcttgattctgatgaccgtgatcaaaacgttgacgttttgttcgttttcttttagcccattgctcgagattctcaggctccatttcttcacgataccggagaagaggccgagcggtggtggtagctgttggagaattgagagtctcgagagccataagatttaattctgtgagatgtgatttcgagctatttaagaagaagaagatgaagaaagagtgaagtgtgtggtgtattgtaagcacgtcttgtgtttgtgttgtgtttgtgtttttgagagttagttttgatttatatatatatttcttgtaagaaatctttagaattgggattgagagtgggaacgtgggctatgagtgatcaagtggtgctgctcttgctttcttcaatccattaaattcctttattttatattgacatatagatgtaatatgttgtcactaattttggattattagagtaactatttaccaagtcaatgcagtgtttttagttagtaactgccagaactatgttcagaaacatcttcaattttttacgttgaattgaaaaagattacaacactatgcgtcactaatcactatatgtagtaggttgaaaccaaaaaataaaaaatcacagttacgagtttatttactaagctaagtatgccacataactgaatttttgttattgatcattggctgctaagtgctaactaagtatacttattattttttactttgtactcactcctaattaaccgtttatagatttcgtgcttgttcaatggttttattttctccacttgcattttcttaaatttcccaatcaactatatgaattacccattaatttcaaatagtcagaagacgaagtttccaccaattgtcgagaattcttcaaaagtttttagttaaacaaaaaccgaaattttgtatgacttccaagttgattctatatcacacttttcctggtagtcacccaaactttatataacaattgcaacaaattaaaaaataacgtcaattaggaatgtaaaaactaaaattaggcagacaattgttcttgaaatggaatgccatatcttcggagctgtactaaaataaacaaattagaaagaagaagaagctt

SEQ ID NO: 980 - DNA, 51860 bp, Arabidopsis thaliana
ttgccactctggagtataaatctttttccccgatttgtgatatgtggtggcattgggatatagcttatctggcgttctctcattggctaaacaaggctggattcttctggtggaccacgtggcgtaaaaagaatggtgaaacttttcggtggatagttaaagtcgttacgagacttaaagctcaggctaacatgacggtgacacttcgttgcaccaccgtcaacaccgtcacatacactatcctatactacttgtttaccttcgaattcgattggttcgccttttattttagaaataataaaagctcacttgataaaagaatgtacataggattgtgtgtgtaagacttgcccactagtcagtagtccaccaaccaaaacacaaaaatgttgagttaaaaaacaaaaaacagaagaaactgaatgagagtaaagtaatgtgttaaataacaattgggggtcgttgacggagataaaaaaagaatgaaagaaagtggagtaagtcataagtcttcgagtttgttgttgtattatgaagtgggtcgtcgttactcataacagttttgtctacttagtcaattcaactgccaaaaaacgcttcaacgattatcttaaaagctgtcgttatgcaacttatgattgggaacttttctacgcggttttaatgtagagtcacttaatagaaacagtcctttgaaaatttctcaaaaataaaaaaaatacgaagaatactaatcagagatcaattggtgacagaccaaaagcccatcaacaaaaacaaacgacccaaggtttatttaacgcttatataaaacttggatataaaacattcaaaacaatcagagtggcgcagcggaagcgtggtgggcccataacccacaggtcccaggatcgaaacctggctctgatataagtttttgattatttttttccatttgggctaaaataaggcccatttcggtttcggtaaaacaaagcccattaatagtgacaagtgggccaaaggacggattaaaagtaaacaataattaagttaaaccctaaatgataaaagagttaaaccattgatttaaactagtaaattaatatcatcattcttctttgcttccgttgtttctcagtctccagatcttcaatggctgacaaatctctaactcagaacaaaacggcaatgctgataacctacaaaagaaaaatcaaagtcttaaaatttgcaattcagttctctattgaatcttaaggtaaatctgagttatgaaacttactcgggtcagtggtgataagcatggcggttccaccgaaagagcaagtacctccgtttcgtttagtcttttgccaataactgttgaaagcataagaggcatgagccatgactgtgtctggatagtaacatataccatgaggtttaatctcatcgcaattggctcctccttgtccacacgcaaagtccagagactgttgcaatgtctctgccgctacgctaggtttcgccacgcaccatagcccttccacgttcttcttctttaccggttgcggtgacggcgctggatgataaggaaggcacggtggaagagagatcccttgatttgattccatcggagattgtgaaggttcagggaaatagggtatagtaggtggagatggagatccaattgaggagtgaattggtgaagtttctggtgacggagatggtaatgttgggaaagaggttgtgaatttgctgctgaggttgactaaagatcttagatttcttcttgtcatcgtcgttgtagattcttgttctggctcagggtttaagaaattgactttgttgaagcttaaagatccgagcttttcaacggaatgaagcagatcacgatggttatgaggggaagtaaggaagttttgaggtgggtttatggtgaaagttgagtttatggttttgaggaagatgagaacaggtttgaacatttctgagctttttgggttgtttaagcattggtaagagaagccagaggagactttgatgttgttctcgagaccccatcttgtgagagaatggtatatgtttttcaaagaagataaaaccagatcagagctgtgttgtgtggtttggcaagaatcagggaaaaatataacaatggtggtgattttggtggaagggtaacgagagaggatatgggttttaagccaagtttcagcttttatgatacttgaggaaatctcagtgatggttttgttgccacttactgaaacagcgagatcaagatcagtggtttgaggaagttgaaggagattgttgttgaggtttagagcttcaatgggtgttgattcttgaccagctcctgcatacagagattatacttatgagttgcaagaaaagaagaacaataattacattttttgttacctgcaaaactgagaaaggcaatgaagaggaaaatgtaaagaagatgcctcattttgcctttggcacaggtttttcttttctttacttgtgtgatacttggtttctttctcagcacatgagaagtagtttataaaagataggttttttgtagagtacagaggaagaatcaaaataaggtcattttttacttttaaggaaaaaaagaaaaaggaagattaatgttacactgtgactgtgtgtgttgttcttgcttcttactataaagtggcgtagcaacaatgacatggataataatgccgttgaaatgttgaattgttctgttttaagaaatggtattattgcgacacgtgtctctagtggtaacaatgtacaacaaagttggttgctttgtttgactgttgagtgttcacatgataaacttcaaatggaggggttagaatatggttcaggcttcagatcgattgttctagttttatttcgaaatttggattagattggttcgattattaacaaatatccttttggaaatgaaaaactctaagagaaaaccaataatatggtcgcagtctttggaatccatagaagagggaaattcacgctaggcacaaaacattgtggaccctcgacaacgttagaaaacatcttctgctagatgtttgatggcctttaatagctaagtgatttatagagaacgacatataatgggctttagtttgggccttttaaaagccatagtatgggcttatttgctttgtccaagttcagtattgggtttataaggaaactttttatcgtgaaaaatagagtaatttatattcacaagcagatttccatttcgagttattttatttaaaaaggctgtgattactgataagactgatattattgagtgaaggaagtggtgtgggattctaaaattgctttgaacgttttgaataatcctgtcataatgattatgacaacactagctttatcatgattaccacctcaatcaatgtttaattaaccagataataaacgaaaaaattaacgaataagaagatggcagtgtattaaaatccaagcattgacccatccgacccatgatcttctcggatttgtcggtatcattacatgctgctaaatagtcttctctaacgttgattttgtctagccacatcaagaaagaaaaaactatattcaaaagtttaaatgttagggaaaccatcacataacatgcatttttaccaaaaaaatagttttgaaaaatgaaatattagttgaagttgcagagattcgaattaaaaccgcgagcctcttgttaaaaaataaatccctcaacttcaaaactgtagtcataccataattctggcttgtgatctcaatagaaatagtatcaaagagtgacaataatgagtaatgacagaaaatgagtacaaaagtgttgaagaaaaaaaaaaaagtgttgaagaatattatttatcttgagctttaagtatatttataacacaagcgttgcagatttatgtttacgtggaatagaagaaaacttttttccctcaagatttttaattttttgcgtagaggaatatttgtttcttcttcttatatattgacaataatgtacatgctatttctaaccaagagaaatacagctagaagttaaaaataaacaaaatataccaacttgaaaaataagaatgaaaattattatttaggttttagattgaacctcttgattttgtatagtcactaatgtttctgcattattttgttagtaaaaggataagatattaaataatatgaggaaaagaaatggacatccccggcaaatgaaaatggaaaaaggtataataaagatgaaaaaaagacaatgataaagctattttggtttaaaacaaattaaaagaaaaaagcaaaacgctagagagcgtgtggttgaccccttcgttctacacttgtcgattaccatcaccattaccattaccattaatctcttaccattaataaacataaacacgcacaatgagagtcggtggatgaatagatcaatttatttttcttttgcataatttaaaaaaaaaaaactaaaacaatagaaagaataaaagacaaaaaaagaaagaaagaaagataaaagatagagatgtaacgttaagcccgttgtgtcactttattccaaagttgcatgtatgggttgggtcttcttctttttttcttccttttgtattcactactaaatatatttttaatagattcgctataaacttgatttatacttattacctatttcatgtaaaatatttcttcttgtctaccaaaattcgttgttagaatagtaaactaaatctttcaagttttaaatatcaagcagtatcaagcagagcagtacaatggagacactttcttatattaataatatacttgcttgtgacatagctaaaaacaaccgacacttttacattttgttttcaactcgagttattgtttgttagtattaaaaaacaaactttaaatagtcttttgaagtttggaattgttggcccatattatgttgtaggtaatatggaatcagccggtacactggaccacagaggattgtctttccgtctacagtctacagaatcagccggactagttttgtaacttttgtttaaaagagctatttattatttgtaatcttagtttttaagttttaactaaaagaatgaagaaaatgtagacaaaatcgaaaagtcgatggtggaggtatgtacgtgtctttttcctttgtccgtcttgaaaccaacgaaacaaaatcggaaattgtctacgttaaaggacaatcacattcttagttaattaatactccataccaagggacatttacgtctttaagcaccaaaaccatagtattggattggcgaaaatttccaaatttccaaagcaacaagaccatgagagtccatccataatcatttttattataaacttaatagtcaatttccatgaagctggacttgaatagttaggctgtctattcttcgtttttatgtcttttacgtgaacaactcgtaattctttatctgtttttctgaacatatgtttgttgtcgcacacgtataatacaattatacaaatacatttgtttttagtctaaaaccatctacattgggatattttataagagttttttacaattaaaaaaataaaaataataaaaatgaaagaaagaaagtgaataattaaattataatataatattaatattttttttgtttgaaaaactttgtgggtttctgtcctaaattatttttttaatcattttattaagtactggtaattactaattaacggatagtttaaaataagcagattaaacgatcccggaatgctgacgtcagcatcataaatctcagatctcgatacgaaacgaatttctcactgcagcagctattactttccctttttcaccttttttttcctttctttttctttcttttttccatttcttaattttttcttcccattgaagattactctacgatctgacgaacaaggcaaccaaaaaaagggcaaagaacagagagagagcaaaaagcagaagaagatgaatttagacgagaattgtaaaatagtttatcacgattcgccatgaaagctcttcaatccagattcttcttcttcttcttcttctacatcttcttctcagtttccgttagtagtgaagctcatcggagaatccttcatcagccgcttttcccggaatcttctactccaccaccaccagatttccaatcgacaccgtctcctcctctacccgacactcccgatcagccatttttcccggagaatccttctacgcctcaacaaactctatttcctcctccgccacctcctgtttccgccgacgtcaatggcggattaccgattccaactgctactactcaatcagccaagcctgggaaaaaagttgctatcgtcatttctgttggaattgtcacgctcgggatgctttctgctctagctttcttcttgtaccgtcataaagccaagcacgccagcgatactcagaagcttgttactggaggtggcgatggcggcggttctcgaagattccaggaagattcaggaccaccgacgacgacgtcttctacatttctctatatgggaactgttgaaccgacccgtgtttcggcgagtgagtctaacggcggaactaatggacccgttaattcgtctccgtaccggaaattgaattcggctaagagatcggaacggtataggcccagtccggagctccaaccgcttcctccgttagctaaacccccgcaaccctctgataactctccgtcggctttatctccttcttcatcatcttccggtgaagaatgccgtgacacagcgttttacacgccgcacggatctgcgatcagcagcgatgacggttactacaccgcattccctcgctccgccaatggatcacttcctcactcgaagagaacatctccgaggtctaagtttggatcagctccgacgacggcagcatctaggtcgccggagatgaaacacgtcatcatcccgtcgattaagcagaaactgccgccaccggtacaacctccgcctctaagaggcttggaaagtgatgaacaagagcttccttattcccagaacaagcctaagttctcgcagccacctccaccgcccaatagggcggcgtttcaagccataactcaggaaaaatcaccagtgccaccaccacgacggtctccacctccactccagactccaccaccacctcctcctccgccgcctcttgctccgcctccacctcctcagaaacggccgagagatttccagatgctacgaaaagtcaccaattcggaagcaacaaccaattctacaacgtcaccttcaagaaaacaagcattcaagactccaagtcctaaaacgaaggctgttgaagaggtcaatagcgtatcagcaggttctcttgagaaatcaggtgatggggacacggacccaagcaagccaaagttaaagccactccactgggacaaagtacgagcgagctcagatcgagccactgtttgggaccagctcaaatcaagctcattccagtgggtagcattttttactacatatttgtgccgcatgcatttttgaatttgacgtttttagtgacttttttgatctgatcatgctatatagattgaacgaggataggatggagcatctgtttggttgcaattctggaagttcagctccaaaggaacctgtgagaaggtcagtgatacctttagctgagaatgagaacagagtgcttgatccaaagaaatcgcagaacattgcaattctcttaagagctctcaatgtaacacgtgaagaggtttccgaagctctcacggatggtaagtcattgtctccaattttatttatttttgaagggaaggttccatttgcatcttaaagcagcattttcatagattgtgcacatttaggttcctctgtttggcacatgactcgtttttaaaaatattgatgccttgatgggctaatggagatcttgcggatagatagagatgcgctcatcagagttaacattggtgaaaatctaaataatactaaaatggcttaggccacaagttataatcattgcaaagaaaattgacatatgaaatgattatctctgctttatattgcttctaacatgacagttcaacttatgaaacataccacatgtaaaggagaaaaaggtccatcctataatattttacaagactatcaaatatgttgtagctgacattcaataagattctctgagcaccattgatttcattacgttctcgttctaagatgcatgagcatttgtggtccctattattttaatttaatagtacttgtggcacctgtaacaggtaatccagagagcttaggtgctgagcttctagagactttggtgaagatggctccaaccaaggaggaagagatcaaactgcgagagtactctggtgatgtctctaaactaggaacagctgaaagattcctcaaaaccattctcgatatcccttttgccttcaaaagagttgaagcaatgttgtatagagccaactttgatgcagaagtcaagtatctaagaaactctttccagacattagaggttagttacttaacaagacacttaatgattaaatttctcaaacgaattgtcctaattctgatcccttggttgctttgtaggaagcaagcttggaactaaaagcaagcagactattcctaaagctcctcgaggctgttctaatgacgggaaaccgaatgaacgttggcacgaatcgcggagatgccatagccttcaaactcgatacgcttttaaaacttgtagacatcaaaggagttgatggcaaaaccacattgcttcattttgtcgtccaagaaatcacaagatccgagggaacaacgacaacaaaagatgaaaccatcctccatggaaacaatgacggtttcagaaagcaaggattacaagtagttgctggactcagtagagatctggttaatgtgaaaaaatcagccggaatggatttcgatgtactgagcagttacgtgacaaagctcgaaatgggtcttgataaactccgatcatttctcaagacagagacaactcaagggaggttctttgattcgatgaaaacgtttctcaaagaagcagaggaagagatccgaaagattaaaggaggagaaagaaaagctttgtcaatggtgaaagaagtaacagagtatttccacggaaacgctgcgagagaagaagcacatcctttaagaatcttcatggtggtgagagattttctcggagttctcgataacgtttgtaaagaagtgaagacgatgcaagaaatgtcgacatcgatgggttcagcttcagctagatcgttcaggatttcagcaacagcttcgttaccggttcttcataggtataaagcaagacaagacgacacaagctcggatagtgaacacagcagcaactcttctacgtgatgaaaaaacaaaaagctgtacagtttcttacaccaagacacgaagaattaaattggtgtttctcaagccggaggagatatcagacattgagttggtttagtcggagaacacggccgtttatagagtaacaaacactattaaagtctataaatgatcaaattttcgtaacaaataaggaaccttttttttcttagttttttatttgtcagcaatttaaatatagatagatatatatatgaaaatttcgtaatttcttgattttggttaagttttgtgtttctttgttgttgaaggaatcagaacccaatacgaaagtgattagaaaaagggattttgaaaggagaagaaaatatatactacacatgatacgatcattgttgaggatttggttttgtgacaatgaatgtttccaacattactaatttaatgaaatagaaacatgtgatgtgagtgaggccgattttgtgtacacttgtaccacgtcctctcagctcttactgcttttgtcttgttctacgtcactttttcccaccacgatcttttcgtttccttttttccatatttggatttattaaaaataacaaagcaagttgggtcctataaaatttggtagattcttcttcttctgttcatttcacaacaagatgactcactgagcttattaccaattttgccacttaatcactaaaccgatccgtagaccggatttgatattccagagactctcttggccgaccaaaatatgtgtcatttattcaaactcattatgttacacttgttttaaagataggatcacaagaaacgcttaaaactcgcccttcttgagattgacaaaatgttttttaacagtttgtcaccggtaaaaagaaaggagagcctccgattttcttactccccaatacattcttcaccagaagtttccatctcgactcatctttcttgctctgtttctccatcttctccttaaggtttctgcatagagggactcgacattgatcagaacctgcgcaaacacgtgaatgcagttcaaggagttgccacattctcttgcaatgcacgcaacctcctggaactcttagcttacagcctgcgaaatgccggatcagtgattctaatcccttgcaagcttcatagttacacgttgcatggttcggtttgaaatctttatcgtgtggccctattgttttacatccatctctgcatatatgaacaagtgcttccattgcttcgtatagctgcgaatatatcctctgatcattgcgttttctcatcctctctttccgcgtctgcgtttatgttcaagatttagaatttaggagaaaatacagggaaaaaaggaagtttattaaatcactacttacatttgcttcgatgattactgagtctctaacttctttctcaagaaagggatggcttttcttcatagctgtccatgcttctgtcgcagagagttcgttaaagtgtttcatgatcatacggtgagatatgaggctaagccgagggaaatcacacagcagcgcaagctggaacacatcaaccacattctcagtggtaagcaaaccatgttctagatgccattcacagacccgtttcagctgaggaaccacgtacgcgtgtgacagaagtagcaaatgcatgataaactcgttcatttcttctttctcatagctacacaaaggaaatcagatttcgtcagtgaaaagatcataagacgaatgttaaaagaggcagagcaaataaatatagagagcaagaagaaatggaatttatatataccaagaagagtagaggaaacggataaaaactcgcacagcatcatgagggacacctcggattgatattgtatgccacttgccatgtctcttggcttgcttcaacatgcctttgatcacagtggaagcagttccctattaattcaagaaagacaatgtccatatcaaccaagtctagacctttctaatcaactgctaaagtctgtattcgcttagctaaagatcctaactacacattgataattatggtcaaaggagttataaggagagcttacaaggatgttggcatgagcatagatgatactgccattatctgtatagatgactacatcagctttgtatccgtcattgaaaagacgatcccacatatctcttgtggctgtcgaaacgctgctatgcccaagttttttcttgagtccatcagattttgatggaagaggaggaggaattggcacagaagatgaatctgcagatttgaaagattgatgaagatcaacacaacctgtcaccattctcttgtttagcttatcttctcttccctgcatcaatcaaatgaaaatatatattgtcgattctttagccacagataaacttcattgtcatttctacacgaaatatgtgactcagacaacaattttcacagcattatgtaaccagatctcatttacgattacaaatcgaataggataagaacaaatctctacatatatattcacacgaaaatatcaatcagaaataacaagaattcttgaaacagatcgatagaaaatgtaagaacaagaatcaatcaatgctctaatttgttccgacatatataccttgaaaagattcagaccacagaatcaggttgcttcgaagaggcaagtcaaacaaaattaacgagaaaatcttctccttggtagaaagagcatgagaagaaactctctctatagagaagcttgagagatcagagatctcttaccattatataaacacacacactcacaaaaacaatagaagacgacaaaaaaaatcccaccgaaaggataatttattgttttaatttccttattatctcacttttttcttacttttgtgttcaataatttgaagatattttcttggttcatatcatcaacagagacacccacctgcgaaaattacccgagaggcgcgtggagtctacggttacgaaacggacggctgagaatccacgcgccttaacggccttttttcctcgttcttgaaaaagctttcgtcaagttggttttattatcggctttatcaattgaaacacgactctgcatgttttttttttataaatgatttaatttaagagccgtacaaaaacagatcagtgtgtcctttgttttttttgttcttgttcggcgttacacagctcataattagctgttcgttttttcaaacttttatccgtattattatcctttcttcttcaaagataaatttagattagtcttaattttaaccacatgatcagatactctcttcaaaaatgttaactaatcgtgaattatgttgaggtccgcaaaattgcgtcataaatattttactggtctctcttcatatttcttagcttcgcttgaattgattgttacccttttttccctttttttctgtgtttactataatgccacgtttcttctatcgaataatctaaaacagaagaagaagaagtcaaaatgctttttatatgatcattttcttgtatttttttttagtttttgatcggagtaaagttataagaacttcaaaaaaaaaaaaaaaaaaaaaatgcatgatgatgccaatctttttctaacttttaaagagtattggaacataatacatatatcatgtaaactgatatttttaattgtaattttatatcatatacggatttaattgtaatttgagcatcacccagttgtgcaattgtagttatcacagaagtgcacattgcaatgttgttgaacaacagaaataccttgacatcatctcactgacccatgcagccatgcctaaacttggaccagaactcatgtaaccaccgggtaatgtcaaacctgaactctgaactctcaggttagttaaactcatctcttgttgtttccttaattctaaatcatcactaaacctgtattaaagtgtcccaaattttttagatagagatgtatagatgcacatttaacccacctgaggaagaacttattaactattactggaataacaagatcaccagagaatgatgatccaaataaaggcaacgaatttgaagttctactacattttcttccattttctccattattttgcaaatacataaacacataaaacgaatttatttccatttttcccagaaatatataagaacaagctaaaacacagggatacatgaatcctctcagaaatcagagcatcgaccacgttgttcccaatcgccgtaccgagtcggttcaggacctctaggccctccaatctcaccagtatcttcgttcacaaactctccacctccaccaccttctccttcctcttcttcttccttctgcatctgcagattctgttgaagattctgatctggcttcacgtcccggttcagatcctgattcggagatggagcttgcggcggaggaggtgtaccggagcttagaaaccgtgacactggctcgaggaatctagaggagacggatcggcttggagcgatcaaacgtacgatgttgttcgtcgccattgttagatcagatgtgtcggccaaatcaagaaagagatccgaccttcacggtttgtgatagtatagggttcgatagtcatttaggttgggccataattggataataagcccagtagtatctaggcccaatcatttacatgtttataaataaattaagagaattagagagtaaatttggcccagtataattatgtttaacaagcccatcaggagctaggcctaacatgtttataaaacaaataggagagaattagagggtaaagttgacgtgggctgatttcgaacccgtaacctttttatatattagacctcattaccaaaaagcgattcgattatctcataaagcgtcatgtgtttttttgtgccacatcaacggctgtgagtggttagtcactaaagaaaagtcacaggctgttatatagtattggcttcgctatttattttcgtctaccacgagaaaaacaagtcgtaattcttctatcttgatatcttcaccgcctgccgatctctctcaatctccgatcaaccatgagcaaaggtccaggactcttcaccgatatcggcaagaaagccaaaggtataattatcatcgtatcgctcttcttctatattccttctctcatcgttaagattccggttgaaatcgcgcaattagtgcgtgcgtttatgcctgttcattgattcgaagttctggtgtttcgaatttgtttatcctgtagattgaaatgatttttagattttgattatattttgggtgatcctatcgagtttaagctgtttctgttttgatttttccttctttgtagatctgttgacgagagactacaattccgatcagaagttcagtatctccacttacagtgcctccggcgtggtatgtttattatatcgatgcaaactctgtactattttcagactcttgttcgatttcggttttaatgcgtggttaaatttgtggagtatcgttttgatattcgttttcaaccattgtgttttccgtttttatttagctgcgattagacctttaagagtatatgttcttggtctgatcgatctccatgttgaaatcgatttcttaagttctgtgttggtaattgtcaagggaactgagagagagaacgagtatcaggatgatatttacttctgtttaagaactagatgtttgataatgagtgaaaatgaggtcaacgtttgtatagatttcactttggttacaaaaatatgccataagaactccactatatgattcattttacaatttcttctttaggtgcgctgcttatagtaaaattattaagttattgtttgtgacagtttcaattagctaattgcacttttgtatttagaaacctaatgattgtctgcatatgatctagcagtctaactccatggttaattatacgaatggagagccttaattttttttatttttggtctgtgttctgttgtttaggcccttacgtctactgctctgaagaaaggaggagttcatgctgctgatgttgccacccaatacaagtacaagaatgctttgtttgatgttaaaatcgacactgattctagtgtaagcgttgttgtagagatctattatacactttatcatctaaaaccagattaatctgttaagcgtgtttgtattttttccttacaggttttgacaacagtcacacttaccgagatcctcccatcaacaaaagccattgcctccttcaaagtccctgattataattccgccaaggtttatattcctttttaatgaaatcacagatgtttacttctcagtggtttgaatgaaaattaatccttcagcttttgaatttcattaacagctcgaggtgcaatacttccacgaccacgcaacagttaccgctgctgcagctttgaaacaaaacccactaattgacataacagctactcttggttcgccagtcatctcatttggtgctgaagctggatatgacacaacctccaaaactttcaccaagtacaatgccgggatcagtgtgacaaaaccagatgcttgcctctccataatattgtaagaatacaaatttcaaaataaagcaatcactagctctagatgtggcttgtgtgggtctcatctgagttttttttgttccaggggagacaaaggagactcactcaaagcatcataccttcatcactttgatgaatttaagagaaccgcagcagttggtgaggtttacaggaagttctcgacaaatgaaaacacgataacggttggtggattgtatgcgattgatcattcgactgcagtgaaagctaagctcaacaaccatggcacacttggtgctcttctgcagcacgaggtcctgcccagatcactagtgactgtttccagtgagattgacactaaggctttagaaaagcatccaaggtttggtctctctcttgctctcaaaccttgagaacacacactcacatcagacctgcttgagtcttcctacttttctcgtatgctctcattgttgatttcctctacggcaggacgtgagagttagcgtttttttcctccttttttccttacgtttaattggaatcaataaatagttccgcagtgaaattgacggataattctttttttggatatgctcggttttggttttttttttatctttcttttataattaagcactcttcttgaatatacactcagtgatttttttcttttcttttagtacaatccagttaaaaaaacaaaaaaacatataaacaagttgatatgatgtaaatctcttagacattagcaaatcttagataaacaagttaatggttccttcttccgccgtgagactgatagtgggtttcataatttaggaacaatgataggaggatacaaataaaaaccgtttctacaacgagccagtttggtttagttgatcagctgcttgtcatcgaggtacattcgcaaaggagattctcccaatattgttgagcctaacttcaaatgttaccattttttctacgattggtgtagagatcatgtagagctttacaattcacaacttgcaattaccagtctatatgtccgacaccaagaagaattaacgtatacaacgattgattgaaatgaatgatgaattatcaataaggatttaaatctcagtccaatttcaatagctagaaatataagcataaatgaggtacattgataagaaaaccacaaaattcaacttcgaattctgaatcatatcatcatcaatgaaatcaaaatagaaaactagaaaagaagaagaaaaaaccatacgttaagatcaatctacgttctccatgacatcttcggctgaaaacttggttcccttctccttatcggcggcggcgcgtccattagccttacgctccaaaagcgacttcctatccttatcgagacggagcttagtgatcatcacattcgaagcattgactccgacgttgaccgtggatccgttgactttctcccttgtgattctctcgatgtgaatcacccacttgcggcgatacacctgcatcaccttcccttctcttcccttgaacgtcccacgaacaacttgcacttcgtcgtctttacgaatcggcatggatctgacgttgtgtttgttacggagatccttggataacggcgagctcatgagaacgcgcctcacgcttgaaggagctgtgaagtgagccttcctgttcttccggcgagaagagctcacacgcggattgaacttcatcgccgctgaatttgtgaagaaattagggtttttttgtgctgaagaggtggagcgttgtgtgcatgagtttatatatgagatattaaaagttacttaaacgctgccgtttctcacagtgagaattagggttttgaaggtttctgggtcagatgggctttgataagttttatatgggctttcaaaccattaaaatggaccaatctaaccttgagaaatataatgggcttattagattgttgtcaacttctaagttaagtgttgtactcaattctaaaaccaaacgcattaaagagtttgtattctttttaattttgttctctccaaaacaatgtgttgggttcttgagaagactgactgttattgattattttttttgtataattaaaaaataaggctgcttgaaatagtaatggttacaatcttgaatatttggttatttggttacaatcttgaataaggctttttgtatatttggttacaatcttgaatataaaatatatctttcaatgaaaaaaaaaataaaaaaaatagtaatggttactgactaagttggagataaggaaatcatcaaatcataaaagatccatttaggttagaaataaatacacacttattgaatatcatttgataaggcttatctcaaactaataaaacaagaatcgagattcgagaatctcactaaacaaatagattaggtgaatccgacaaaagccaatgatgccgtcacgctcataaaactcggattccacaagcccaaaatagacaacatgttttattttattatttgtttaccgacttaaaatattaatttaagatcgttaaaaaacaaactctacaagtttttgatttcagagtccaccgttgagcctgttcaattaaatcgttgaatctcgcggtgcgttttactttgattctttcgaattttttttatatggatgttgccgcgatggcgagatgtgtgggaaggtgctacgtttcgccggcgttcggtgagtctgaatcgcaccggttatcggagcggcggtttctgaaattgtctagctccacgaattcggatcccgccggtagtaaaagtttgaagcttcgcgggaaaattcatcggagaatgagctacttccgtccgatcatggcaaaagatgaatccatttcatcgcggtccggtaataatcacgtaattccgttctggttcatctctaatcctagtttgggttcctatgattcgtttttaacatttgggttcctgagaccagaaatttccatagttttagcataaagtttggaccttagtagacagatcaatgatgtatatctgaatagatctaatctcagataatctaaccaggtgaaacgaagcaaatcaatggaaagcaaaagaacattgtctggcatgattgtcccgttactaaatccgacaggcaagaattaattaagcaaaagggatgtgtgatttggattactggcttaagtggttcaggtttggtcctttgtttctgaattgatctctaactacatcttgttatgtttctactggattctttcaaatattctcgtattttttcaggtaaaagtagtctggcatgtgctcttagtcgagctttgcacaatcgtggaaagctttcgtatatacttgatggtgacaatgttcgacatggtttaaacagcgatcttagtttcgaagcagatgatcgagctgaaaacattcgaagagttggtgaagtggctaaactgtttgcagattctggtattatctgtattgcaagtttaatatctccttaccggatagaacgagctgcctgccgtgcattattaccacaaggagatttcattgaggtttctccaagttcatgaatttgaatcccagtctcaacatcaatctgactttctcttggttctcttgataggtatttatggatgtgccactccatgtttgtgaagctagagatccaaagggcttatacaaacgtgcacgcgctggtaaaatcaaaggtaactttgctttttctctgcatctgttttcaacttaacccatgttctactgattttcattaattatataaccttcttgatctatccatttgattatatgtaaatatattgttccccaaaacatttcttctccaggttttacaggagtagatgatccatatgaagcgcctttggattgcgaggttcatataatatccaatttttgttatataagttggaatctagctcatctccgaacttgaatctaatgttgtgtttccgactactctttgcagattgtaatacaaaacagtagagacaaggggctttcttcttcatcttcatcttcatcttcaccttcatcttcgtcttcttctctgtgtgaaatggcagatattgttgtgtcgtacttggaccaaaatggatacctgaagaaacactccacaaaatcacgtaattgtatgtaaatgtaatattaatatcattgttgtaacgtttcttaaacctattttacctatggacgattaaattgtgaaaacataaatgtaattcacaatctgcaaagagttggtaagaaaaacttgtttgattgattgagagaatgagattattatatggccgccaagttggcgccaactctccggctttttaagtaatcgagcatttgggcctaaaaatatacggcccagtgttaacaaaacaggcctttttaatatccgggtcggactctattaaggccggatctggttctacggcggcgactcctcctcctgactataacaaaaacaaaacgcggtggggagggcggtagtatcagacagatcgaaaatcgcaacggttaagattccagctactgaaatctatcaacgtcgaagaagtgaacgatggggaagaaacaacacagcaaagatcggatgttcataacgaagacggagtgggcaacagaatggggaggcgctaaatccaaagagaatcgaactcctttcaagagtcttccttactattgctgcgcgtatgtttcttccacgattccactactttcaaattgggtttcaatctctcctaatttcaatctgtttgttctgattcaggcttacgtttttgccattcgaagatcctgtgtgtacaatcgacgggagtgttttcgagataacgtgagtagtttgtttcatagtgatttaagcttttacttaaggcattaagggagcttaattattgacttttgggaatttgcagaacaatagtgccttacattaggaaatttggaaaacatcctgttactggagctccattgaaaggagaagatctaattcctctcatctttcacaagaactctgaaggttctcttctttcttctctctttacctatgttatctgatgccttgtgatttctctcatctttgatatgtggctaccattgtaggagagtatcattgtcctgttctaaacaaagtcttcactgaatttacacatattgttgctgtcaagactactggaaatgtattctgctacgaggtttgtttttttttttttttgctttgcttatttttggtttcgatgattcttattgttgctgtgtaaatttaggcaatcaaagagttgaatatcaaaaccaagaattggaaggagcttttaactgaagaaccatttacaagagccgaccttataacaattcaggtaactaacctctttctctctgcttgaagctttttttgcaatgggttagtgtcttaaagcattttttggtaacgttttgcagaatcctaatgcagttgatggtaaagtgacggtggagtttgatcatgttaaaaacggtcttaagatcgatgatgaaggtttgatttcagttttatattcgaccaagcaatttatcataatacgtgttttgtttaggttggttacgactccaatatcttgtgttttcttgcagagttgaaaaagatgaactcagaccctgcttataatataaacgtgtctggagatatcaagcacatgcttgcagatcttggaactgataaagctaaagagattgctttacatggtggaggtggaaacaaggcacgtaatgaaagagccgctgctattgctgcgattctggagtcaagatcgaaaatcaaagaggtttctaaagcagaacaaccgaaacagacctacagtgttgttgatgctgcatctgcttcggtttttggaagaagtgctgatgcagctaaagctggttctagtgataaaacagctgcaagaatagctatgcatatggctggagatagaacacctgttaattctaaaatggttagcttcttcttcggaataaactcggttaaaaggtttgtgtattgttgttaaagcgtttggtgttttgttgcaggtgaagagccgttattcgtcgggtgctgcttctcgttctttcacttcctctgcctttactcctgtaaccaaaaacgattttgaactaattaaagtcgagaaaaacccgaaaaagaaagggtatgttcagtttcagacaacacatggcgatttgaacattgagctccattgcgatatagctcctagagcatgtgagaatttcatcactctctgtgaacgtggttactacaatggagtggcctttcacagaagtatcaggtatgcatacatatatgtcttggaaatctgttttgttttaagagtttttatggggcaattaaacatgatcttttgacctttcttctacaaaggaacttcatgattcaagggggcgatccaactggcacaggaaaaggaggtgaatccatttgggggaagccattcaaagacgagccaaactcgaagctgcttcactcaggaagaggcgtagttagtatggctaatagtggacctcacacaaatggttctcagtttttcgtcttatacaaatcagcgacccatttaaactacaagcacacagtgtttggtggagttgttggtggtttggcaacactagcagcaatggagaatgtacctgtagatgaaagcgaccgtcctcttgtaagttccaaaaactcaactcactgtgttctttagtagtttctgtctcctgagagtattttgtaatttctgcaggaagagattaagataatcgaggcaagtgtgtttgtgaatccatacacggagcttgatgaagaggaagagaaagagaaagctgagaaagagaagaatgaagacaaagacattgttagtatcatcccttccaccaaatatgatctctctttgctctcttactttggattggtctgataagattatatatgaactatgtaatgtatcaggagaagatcgggtcgtggtacagcaacccgggatcaggaacaacagaagctggagcgggtggcggtggtgtcggaaaatacttgaaagctatgagtagtacagccactaaagacactaaaggttccctagactcagatatttcaaccattggagtgtctaagaaaagaaaaactactgcgtcagcctccacagggtttaaagatttctctagctggtaattgaaaacattctctacctactttgtaaaaccgttgactagttttgatagagaccaagtcacaaaagcatttgtatgacaacactgagcctttgatgtccaaaatctggagctgtgtaataaagttgactagttttgatggagcccaaaagtcacaaaagcatttgtataacagcccaagtcacaaacgcatttgtataacattgaacctttgatgtccaagagctgaggctgtatcttcagtaaaaagatttattaagtataatccttacagtggtgtgtatgaatgcctaatctacaaaacaaatcaacaagacaacaacaatgatcagcactgacggatcggtaagaacatatttggttatttgtatgtctttaaggcagccgccatttactgtgccagtagatggacactctggaccacgatgggaacccgaagttgaactccaaaggctggtcagcaggtccacctataactaacggtaaccacacgtatctggaatcccgcaaatcagccgggttccacctatctgccatgaatataaacgcaccgggaacaccaggtaaaggaatcacataagtgctctgcgcaaagaatgttgttaaccggaaaactttgttaccaccgatacacgggttccccaatttctcccatggacccattatagattcagccgcatgagccaaggcttcatttggtgcccaaccagtgcaccaggaagtgaccatgtaataaatattctgatgcttgaagatagctggagcttccctgtgttgtcccaccattactctcttcataaccggtgtcacatcgaggtaatcttccgtcaagggtccaatatgaagcacactattgacttcagacgaatatatcaggtaagcaacaccatcgtcgtctttgaagacagtcatgtcccgactatcgaacccgtgtggacgtttactgtatagatactcgaaaggacctgtcgggctattgctaatggccacaccaactgaagctttagtgtagtttgcatcgtcgatatgcatccacatcacatacttttctgtcttttcattgtagatcactttgggtcgttcaagaacattggatttatgcaaatcatgggtcttgtttgtttcctcagctccgagtacaatgccttcatttttccatgtccataagtcctttgaagagtaacaaccaacaccaataatatcaacctgaagacaagacaagatcggaaattaaaacccaaaatacagacaaaggaccatacatctgaggacaaaggaaacaaagtggaacttactctagctggtcctttcttgtgagcatggtaagttggtccatctttatactctccataccaatagtaagtgttagatttcacgtcaagcagaatccctccgccatgtgcttgaattggattcccttgtgtgtccatccaaattttcccggggaagtaatacgatgtctcgtttcccatatccttggtgggaccaaaagcggcggttttgataccgggaaagaaaagatgtcgaattggtgacttgtcgtcaagaaactcctcaacgagagggatcggttttcttgatctccgtttactagtacgaggagaacgcttcctaggtggcggcattctcaggacctcttcttcaactcttataagttcacgaacaataggatgagcaagatgatgtactacttgtaactgatctgaagaaacttgttgatggatgttgttatcttttctgctatacagagagataagatgagccaccaggaaaaacccgacgacggtccaaacaatagtaagcaatgaatatctgcaacctcctgcatcattgcaatgcaaagatgttgatttcttattgtatttgttgttcttcttcattatcctctttatgtcttctaaaacactgtaaatatacaaaacccaacttctgtagatccaaaacataactctagtgcaacaaaatttgaagtcttagattcaacaactctaaatcagtagattagtaaaattaagctaccagagatcaaatatatatcagatccgaagctaacatccaaatgaataaaaccttaaccctaagaatacgaagcagaaccaaaacttagctctatgaaatccgagaatcggaaactttacctgcaaatcctcggaggccagcagaagacgaatatcccgacatcacatgtatataatctcagaaattatacaaaaaattctcaactctcttcgctttctccggagcaaacaccaaatccgaaacactttgttctgtctgatgcgaagcttggtctggaaactgaatcgagaaattcagagctagattctttcttttttttgggggagattcagaagtgagtaaagagaagtctagttgaaatggatctatcaaagttctattgacgattcagacgtgtgaacgaagacgagactaatgaagacgattctagtcttcttcttcctctgatttttttttcttttttttttctgctttctctcggagttttccccgttgtatttatattatttaaaaataagtagtgactgaatgatgatgattattaattagtgaaataatgttgtttacgagttttaaacgatctgatgcatatcatcaaatatttttcttttgcttttcctatattctcaacagattccaattgatttaacagtgattaacatttaataatgggtgttagtttgttatctactcaaagttatgtacatgcacatgaaatatgacttcttgagtggttgatcaattctttttccacctttcttctctctcattaactgtttttttaggttcatcaattaaaacttaacttcaatggaaataaattataaaactatatagtgaattattattgaatgtagacaaatactacagttgagtcacttattacaaatgtttgatacaatgtcatatttacatttcttaatcactctccatctttcaatgatatattttttataaatgtgtaaataactattaaaaaacagtatagtatatatatacacttactaaccactatatattcacttgtcgtatttctgcagaagaagttggatgaatagaaaaccaagcaaaactctttcctttctcctggaaagctttagcgaggaagagcaaaactagaaccaccatgataagagacagagcaaggatcgatgcccaaaggcgatacatcgaagccctaaagggatcacattggttagagacgatgctcgataacgtgtctttcacggcaaggcattctgttaggttttgaaaagaaggcaaaatgtctagcatgccttgtgctgagttgctgtaagcatagacctttaggtaagctgcttccgggatgaattttccggtgattctgcaagtttccggtggatctttgtcgtggcatgtgaatctcgaaaggatctaacaatataataagggttttctgatcacttaatggttttaacttgggttgagtgctaataaataacaagtactataatttaaaagacttacatttgggaattcgccgattggaatggcgccattggagcagctttgtggtgtgtagctgttaatctgttgtccgacaaacggatcgcatatgattccagattcaggcgcccacgagacagtattgctccgatcagtcaacgcattagaacgcattgactctgctacttttgagtttaactgagaacaagaagcagaggatgttagagtttaccagagttcttgaacttctatttgaatgaaagaattttatgaattaatcaaaatacctgggtaataaagttatgaatcatcaggcttatctcgattagggttttatcagaatgaagaggatccatacaagggaaaagattagtcagtgtgctatttcgtgggttttgtacgaaaccattgaaagctgaacaaaggtcttctgcgaagctgcgtgagtggaaaattgaggagtttagggtttggaaacatgtagatgaatttcattttaggacttgctttacttacgtgtgtataaagaaatcgaatccagttagaacccaacaaagagttgttatgatccaacacaagaatatcaccctttgtaagaagaaggacgaagaatttttaatctttcaagtttaaaaaacaaattgaacaagaacaatgtttgaagtgattgtgcattgcttacatgatgaatccagggtgccagtgaagcaatagaggtactgagacaaagacaccggcaaaaaaagaccattacaattaggctaagatgataacattttgaaagttttagtgaatgttaaataatctcacaaaaggctagaagcagaaggaacaagttggtcgatgtaatcataagatgagatacatacctgagacaaaaaacagagcagaacaatcaaagacgatttcaaaggaaaaacaaaaagatgagttgttgttagatcgtacgagattttgatggcgagatcaatggaacgacccttatgatgaaggaagctttggataaggcgagaacctttgccgagtcgatgagtggtgacgttgagaagatgagtcgtgttctgatcgtatggaagcaacaagtactgtatcttcgttaacgacactatcactgtacgaatgttttgattaacatcttctcctgctttgtctatcgtttctttcatctcctctgttctgttcttcgacctctggttcgctgctatcactatccctgtcgttaccctgtatttgatagacgcatataaaaaatctacgtggattatgtttaagagagagtgtttaaaacttcataagcttacacagagagaaacatgaaaaggaggagaagtaagaacagaggaagataataacggtcgagatatcgtcggcgagtggaagaaacacgtcttcttttgtcggagaatgctacgtaaagtcccaaacatataccgacaataatcaacactccggcgacggcgtaaccgtggattcccgtaaatgcagtagcctgagattccgttaacacttagttaccacattaacgttataatatcacaaaatgaaagaagaagagagactaactgcccaataatgtttgtttcgaacattgaaacctccgtcgtaatatctaaagctgttgagaggatcgcgtctcttaaacctctcatgatctccaccgtctgataaacttgaaaccgccaaaatcggagagatcacagccgttaaaagaagctgagacagagctccggttattcttgattttgtcatgttgaacaagttgatgatcgaaaatcatgttccttgtttattgacttcttttgtgggattctttggataaaaaatggagatttgtgaagagtataatttatttaaataattgtctttcttcttcgagtgtttggcttacttactaaggtaaggatagcttgtggctacattgttcttaaaaagttttcttttttgttctctcagttttttctttttttctttttgttaaatagaagaaaggagagtgattagagtaacgtatcttgagccgttttctctggatttttatttgactcagctcttcttttcactgggttatattttttttccagaaaaggttaaaagaagtgggaaaagatcaaagtatgttaaccgatttaagactatcatcaatcatgccgtgtgtcaaaacccgctaaaagcggaagagggtttcttttgtttagtcttgttcactcatacatagagtcccacatcgctaacaaaagaagcgtgaaagagaagaggagtagtataaaaaacgcggccatggatcgtaacaattcatacctttctcggccttttggctaagatcaagtgtagtatctgttcttatcagtataatatctgatatgtgggccatcggcccacacgatattaactctattttttaagggagaaagcccattatgatagcttgctatctgggctttcacgagtcgaccatgcgttgcactactgcacggtcttggctcaacccgccaactattcagtctaaaaaaattattaagtatctatagagataaaaaaaatcgaaaaaccaactaataatccacaaaggcaatatatttacggacctacataaacattgacggttcagatctgggcttaagaagcccataatcaaacacatcctaatgattctccattattgacccaaacagctcgtattagtacagtttccaatcagcgaatcattggtcagtggtcatcacgcgccttccaaacacattcttttgttttcttatcaaatctaaattctttcttccgaacttctctctgtcccatcgaatcttttttctgagtggctagttttttgttttttctttaataataactacaatacatagcaaagctccattattttcgctctgtcagacacagcttcagtttccctacaaaacgaattataatcagatctagaccgttaatctcacgacctacataaatatagacggttcagatttactgagccattttgtaactttaattcgccggctctcttgccgtgttttcgattttgacaaacgaaaaaaaaatcttcaatgagataacaataatatcagcagcggaacaaggattgagaaaaggaacctttcccttttaataagccgatatagatccttggaggagaatttgtagcagaccgatctctgtctgttgtctctgtttctacgaatctctgtgtttgtcggaaatcgtaaattatgggtttgtgggatgctcttctcaattggcttcgcaggtcagtttctatgtcttctacttcaaattttttgtctgggttcgtgggattttgatttggattgtttctcttggtattttgagttcaatgattggggaaatccaactatttccgccgaatttggttttgtttacaacaaaattagggattttagctaattttgattcctgatgtattaatgcatatacgatcacataagtctctggctaaagaaagcaacaactctctctctttttcagctattgattgatcatcaaatctaccctttagttttgattatcaagttttaagtttagacaatacaattgtgagattccatgttggatatagatggttaatcagtagatgaagattgtgagagcaagaacttagtttcccaaaaaaaagttgcttgcttcgcatttgcccgatatgcatagtctcacaatgccttattgcagcctcttcttcaagcaagaaatggagctttcattgataggacttcaaaatgcaggaaagacatcacttgttaacgttgttgcagtaagtagtatgcttccccaaaaatcgttccctctttttttctctaaatgactcgttgatggcttccttttgcatttccttgtccagaccggtggatacagtgaagacatgatccctacggtgtgttatactacttttaggtggcgaagtatttgcttgctcttggactaatcgtaaaaaggatgtttactctttcttaggttggtttcaacatgaggaaagtgacaaaaggaagtgtcacgatcaagctttgggatctcggtggtcaacctaggttccgcagcatgtgggaacgttactgccgttctgtttccgcgattgtgtaaatctctcttgaaattagttttcgtactatctttatttaggtttcagatgattaaaactctctgactctgattctgctttcaggtatgtagttgatgctgctgatcctgataacctcagtgtctcgaagagtgaactccatgatttgttgagcaagacgtcgcttaatggtatccctctcctagtccttgggaacaaaatcgacaagcctggagctttgtccaaagaagccctaaccgatgaaatgtaagcctaaaacctaaaacacgacaatggacttggcattttttactttgattctaataatgttttattttccattgtttgccacaggggtctcaagtcactgacagatagagaagtctgttgcttcatgatatcttgcaagaactctaccaacatcgatcaagtcattgattggcttgtaaagcactccaaatcatcgaattaaactttaccccaaaaggagagaagtcaactctctgcagttgtcgatctttcttgtgtttttggtcatttgatgatgatgatggtgattgtggaagaagacacagcttttttcttttatcctgtgaaaaacaagatttgtctatgttctctgtctgattctttatctgtctttcttctgcgtatgtggctgtgttctctgtatattagatttgattggtgttccctcttcttaaagccatgatgagatcacttccttcggggtcagctttttcaattttacgagttcattgcatgttttgaaagaacaacaaaatatgttgcgtttttcgtaattttgaaaaacttgaggccaaaaacggatattttcgaaaaaagcaacaagataaaataaaagatttttccttttactctcacttgcactatcctcctcttcgcaacaatggatgcttcggtggtgagattttcccaatcgccggcaagagtgccaccggaatttgaaccagatatggagaagattaaacggaggctgctcaagtacggtgttgatccaacccccaaaatcctgaacaatctccgaaagaaagaaattcaaaaacacaaccgtagaaccaagcgcgaaaccgagtccgaggcggaggtgtatacggaggcgcagaaacaatcaatggaggaagaagctcgttttcaaacccttagacgggaatacaagcaattcacgaggtcaatttctggaaaaaggggcggcgatgttggtttgatggttgggaatccatgggaaggaatcgagagagtgaagctgaaggagctcgttagtggcgttcggagagaagaggttagtgctggtgaattgaagaaagagaatctaaaagagttgaagaagatacttgagaaggatcttcgttgggttctagacgacgacgttgatgtggaagaatttgatttggacaaagaatttgatcctgcgaaacggtggcgtaacgaaggagaagcagtcagagttctcgttgacaggtttgaacactctttttgtatttcaatttctgcaaaactttgattcatgaagaaattgttcgattgaattgtgtgatttagattgagtggtagagaaatcaatgagaagcattggaagtttgtgagaatgatgaatcaatcagggcttcagttcactgaagatcagatgcttaagatcgttgatcgattgggacgtaaacagagctggaaacaagcttcagctgttgttcattgggtgtattctgataaaaagcgtaaacatcttaggagcaggtaatgtattcctggcgaaaagatttcaactttcatggccatagaatctgtaaaacttgatttctgattgtatacaagactggtttctacagatttgtttacaccaagcttttgtccgttcttgggtttgcgaggaggccacaggaagctcttcagatattcaatcagatgcttgtaagtggcttctgatttaagtcagttcgtgatatggttgatgtagatgatcgttgtactatagcatcttgcgttttttggattaactctcattccttagtcactttagggtgatcgccagttatatcctgatatggcggcgtaccactgtattgctgtaacacttgggcaagcgggtttattgaaggagttgcttaaagtaatcgagcgtatgaggcagaaaccgactaaactaactaagaatttgcggcaaaagaactgggatcctgtgcttgaacctgacttggttgtatacaacgctgtaagtgagcatttccgagttttaaacttcgtttaatatctatatgcactatgcagcgaatcactgtatcttattgctgtgtgatcaattcttggcttcactggttcccagattcttaacgcttgtgttccaacactccaatggaaggctgtttcatgggtatttgtagagttaagaaaaaatggtttgaggcctaatggagctacatatgggcttgcgatggaggtagcgttcttttttccaacataaacgaactgctgtggtgtagtatttgtgggtaccctcaaatatgtagggtggtcttaagatgtcattttgacaggttatgctggagtcagggaagtttgatcgtgttcacgatttttttaggaagatgaaaagcagtggcgaagctccaaaagcaatcacatacaagggtaaatattgattctctctgtatatttaggttacttcattttggtatctataaggtgatatgattcttatagcgtatgattgattctcagttcttgtccgagctctctggagagaaggcaagatcgaagaagctgttgaagcagtcagagatatggaacaaaagggagttataggaacgggttcagtttactatgaattggcatgctgtctgtgcaacaacgggcgttggtgcgatgcaatgctcgaagcaagttccctcctactttaccctttttgcttctcagagaaacccacaaaattaactttcttcataattcattaatgcaggtggggaggatgaaaagacttgaaaattgcaggccgctcgagattaccttcacaggactcatagccgcttcattgaacggtggtcatgttgatgattgcatggctatattccaatatatgaaagataaatgtgatccgaatataggaactgcgaacatgatgcttaaagtttacggaaggaatgatatgttttcagaagctaaagaattgtttgaagagattgtcagcagaaaagagactcatttagttccaaacgagtatacatacagcttcatgcttgaagcttcagctagatcactgcaatgggaatactttgaacatgtgtatcaaacgatggttctttctggttaccaaatggatcaaacaaaacatgcatcaatgctgatagaagcatcaagagccgggaaggtaacaaatctttgtctagtttaagtgtttatggaagcataagctgttgtctaattttgtttgttaatgcagtggagtcttctagagcatgccttcgatgcagtacttgaagatggagaaatccctcacccattgttcttcactgaactgttgtgtcatgccacagctaaaggcgatttccaaagagctatcacactgattaacactgtggctctcgcatctttccagattagtgaagaagaatggactgatctttttgaggagcatcaagactggcttactcaagataatcttcataagctctcggatcatctcattgagtgtgattatgtaagtgaaccaacggtctcaaacctctcaaagtcattgaaatctcgatgtgggtcttcttcttcttcagcacaaccattgttagccgtagatgtaacaactcaaagtcagggcgaaaaaccggaggaagatttgcttctgcaagatacaacaatggaagatgataatagtgctaatggtgaagcttgggaatttacagagactgaactcgaaacgttgggtctagaagaactcgagattgatgatgatgaagaatctagcgactctgattcactttcagtttatgacattctgaaagaatgggaagagagtagtaagaaagaatgaaaatgcttgtaaatttcctcaaaatctttagtagaacaaaatctcaatttttttgcttactcatctcacttcaaaatagtttcaaggttactaaacagatcatccacatacaataaaagatcagttatacagaatctcagattcggagaaagaacatacatatgatcaaactgcggatttacactgttactaaccaaaaaaagagagcagataggtttggaaacttaaaaaactctgcaggtgatgagatatcgcctgattcaagatcggcactcttaagaaaccagtaaacccactaagtatatatattttatggcttgctttgttacagaacttccccatgatggctatttctttctgtttcaccaaggatgattacggatcctgaacttcaaagctttcatggctgcctttgcaaatatctgagcagcttcagcttctgcttctgctctttctgcctcttttgctgcttgttcagcctctgtgatagcaaattctgcctctgcaactgctcttgctgcagcctctgcagcttcttgagctgtcatgccttttatcatatataattcaccgtctactcggaatttagtgagactgttggcaccgttctcctcgggttttgttgggtctttcttgttgtttccttccagaaagagttgaggagccttctgtcttgcacctgcgggaataaaattagaagaaaacctgtacttgtgctttatctgaaagtgagaaatcaccaagtaagtatttttgaaaattctgagagtaatgaagtgttagtgatcatgaatcttgaatcaaaagttgtgtgtttaccttaactaatgttccattcgatgataaatgctttaatcgtactgcgacatgccttttcatattcggtggagtcttgaaattctcctgaaatttaacagctactaagtaagtatgcaacaaaccccaaccaaacatgtaatcccaatggtagaaatacctctatatacagaaagattgatgttctgtcagaaccgcgtagttccctcaagttggtaattgcctcaaagatgatcttatccaaactacaaaaacagacaatagcgcaagatcaaatctttatgaactcaagaaaatcgttatgtggtgcataagtcagggaaccaaaccttgtaattgatctcttagaagcacaagtgcgtggtgatccaccaccagaacctccgggggaagttggttttgcacgttcatcatcattagtcaaagccacaatggtaagagctgtgttgttatcatcctgtttagtacctggtggagtcctcttaagcgcaagtttagccttcttccttgaaccccataaagctgtcacgcttatatttctccatttgtcctgttatgccttgaactatcaagattagtccgaaacacgcgatcacaacctccaaaaagcatattatattgtattaccttaagatcaacattagagcgagacttaaggattaaactaaactcagtatccgagagtatggtacgccacttcccagtcccatgcttaagaactccagctttaagagctgcttcttcttccggtgtccacttctgctttggtgcacccatccacagttatcaatatttgaatttcttcttttctctgccaatagatgtgaacgctaacattagaatctgttaaatcgtacgaaacttaaccacatcaaagccattgttgaacatttcttatccaatacaaaattttggtcatctaaatccagcagatacacaaagccacaacataaaaatgtaactacacaaatccaaagaaattagatacgccccaaagctcaattcaacaaaaaaatgagtgattcgagcaatctcgaaccaaaaaaagaggatcaaagcccattaacaacgtcgcaaatcaacaggaatttggaaatacagccatcaatctaaagcgatagctaaattatcaaccaaattcaaatggggcgatcgtagaaaattaaaaacaaaaatggaaaattcagagaaggaagcagaaaggaggaaggaggagaagaagcatgccagatcaaacgaaaccaaaggagagttttcgagagagagacttgatgatgaaagctaattccttgtatagatgtgtcatagatcaaatgtgattcgctgaaacgaacgaagaagaagaagaccagagaggctagcataaggaagaagaatatccatagaaacgagaaacaaacttgagcttttcttttgtattcaagctaaggaagatgtaaccctatatttctccacattcacaaatttgcctcaagtttatcaaattacacaataaaacctaccaactaaatgaataggatcaagctgaataaaatatactagtactattttttaaaaataatgtatctataaaatttatcgttgttaaatctcacagatagtttaggggctattaaagatttttcatataatagtaagaccgaaagcgtaatttataaaattttgatggctagattgaaatatgtgttttttttttctttctaaaatctacagaagtagaagaaaccaaagcgaaatcaaaaagctcagcaattttccagatttctctaattgacgatggcgctttgtgctactactcaaaggactatccgtatagcggcgacgctccggcgtgttgctcgacctttcgctactgacgcggtggttgagtcggattacaagcgtggtgagatcggtaaggtctccggaatcccagaggagcatctttctcgcaaggtaaataagcattcgatttcttacgaattcagtttagaaaattagggttcgtgatcagagaatcgtcttaattgagctacatcgtgttcttgatttgattttggtcaatcgaatagtgctaagagtattgaatttggaaattaacaggtgataatatactcacctgctagaacagctacccagtcaggatctggaaaactcggaaaatggaagattaacttcgtctccaccttaaagtatgctactttttgattaagataatcctcttttcctcacattttatgtcctaatatgattcttatccttaaaattcctatcttttcaaaacttaagtcttctgcttgtgactagtactagtccatcacttgttgattagatttcgattgacatcacttatctatggcattcatatgtttctaggtgggagaatccgttgatgggatggacttctacaggtgacccctatgctaatgttggtgactctgctcttgcttttgattctgaagaagctgctaagtcttttgctgagcgtcatggttgggattataaggtacgttgtttccttcttcgtttttagctcatttttttttctggtcgcattcactcacattttatgagaatgtgatggttctgttttttttttttttcgatcaccattgtgatggttctgttttaagatcccttaatatagaattcagagtactgaaaaacttacatctaaatcattgcaggtcaagaagcccaacacaccattattgaaggttagtaactatctttttgctaatgccgcattatgacttacgagctctactcatatgaggtgtttaaccctaaagctggagattcactggaacgacccttgaatgttgtgttaaatagataggatattctttaacttaactcatattgcttcatcagaaatggtttggtgcctctagtttaagatttagctactagtttgacgagcgatagtctctttcattcctttgatttatttggtagaacattctttagattgaagttttaacctaaccccatgattgttcatcatctaacatctaactgcaggtcaagtcttactcggacaacttcaagtggaaaggcaatcctcaaccagaaaactgatgttacaccttcttccaattcttctcgagcaaaagaagaaacctcatttgatattaattctcatgtttctttgttattttagcatctgtgagctttttggttgaaaagaaccattatccatggctatgtttacttattacaataatatgatgatgatgatgaaacacactcctttgatatttcatcaagatttctgatcacttctttactggtttatttcgaattcgtgtgattggattatgaaagagagagataattatggtcggagtcaataaaacataagataccaaaattcgaattgaaagaagataacaacagaagaaagattgttgaacattacataacatatatgaggaaataaaagttgactgaggcaacgtatataattatcctccgatcagaaacatgcatccaagagacagcaacaacagagcgcagccaaactgtgacgtatttatgaacagagcaaagacatatattaactaatacagtattattccactaaaacctaaatacaaagcaaaacaagaaaccaaaataaagttaatataaagtagaaaagatgggatcaagaacgtaccatccttcaagcataccggcgttttgcttctgctgcggagcttgagagtactgcggcggaggataaccttgtgcagggtatccctgagcatatcctggcggtggataaccggctggaggataaccggccggaggataaccgtccttaggtggataccctttaaaccgaaattcaagagcaaattaaacaagcagatcgaagaagataaaccaactatccaaaactaaagaaaaagagataataccttggggaggaggagcaccgacaggatgttgttcttgatgatacatctttcttcttcttctgagttctttgagcttttttttctttctctctttgtttaaaagcaaactctgttcctttcctttataacgaagctatgccggtgaggaataatgatatatacttttaatttaataaaggaaccagaaaataaaggaaatattctttaaataaagtctttcttgcatcataaagattacgattaaatttctttgaaaattaggtgatcttcttctaatgtgctagaaacttgaccgtacaagaatttaatttcaactactctactactagaatcattaattatggaataaaaatatcagaaaaggggttcttagtaatcataaatttacactgttttaaattctaactccaaaatgctgcatcatatgtttcaaattcaaaagaattaagcaaattatgtcaacaaattgacaaaaaaaagtttaagttactatgaagttaaaatcactatttgacacataatttaccctcttcttttgctaatacaatgaatacatttccgtcaatttttcaatatccatcgttatccttgtactatcataataggagaagaaaaccaaatataatacaacttcctcgcttgaataaaagtttgagagaatttcagaattcgagaaaaatatgagttttatccacccacatgttagtccatattcccatgtcatagataatcatattgtaatattcgaatattaatatccatactaaaagattcacatcaccatgaaaagttgaacccattcaagatcataaaaggaaaaagaatgctcattgcattgtctacacacaaacatgacgcaacctaaaaacccaattaggatcgttacaacaaatcgtggtctcatccacaaaaaaaaaagctaaaacactgaacaagtcataaaagaagaaagcaactttacctacaaaggctctctctctttctacaaaagagttccttttctctctaaacgttatgaaacttaaaccggcttggttcagaaatcagaaccaacgcatccatttccgtggctggtttttgctagaagatccttttcttggtgttacattgatcctatccgcattaactgctgcccatttgccaaaatcgggtgaagaaaccaattcttgaacagcctttgtcgtgctatccttagtgagctttttccattcttcttttgttagttggctcctttcaggagttttatggaaagaggaaggaaatgtatctgattcagacggtggagattctcgcatcccgttgttgattcctgtaaagaatcattacacaagcttattatttgtttcaacttgtttaatttgtaatttgagatagagataacaaatcaaacctcctgatggagaagcagaagttacacggttgcgaaatccagaagcatcaggactcttttgcataaagtcatggagatatcccgggacggatggtatatcagtatcacgaattgcctcccagattcctagcagtaaattcaatggaatcctgtccaaaagaaaccaacttacattcaaaactgtacactttcagggatatggatgctgtataatcaaacatagtttggtttgttgaaggaaaaagatcaaagagattggtcacaactcactcgaataagcgtagaaggaacttcaatctggtgatcttctttaaagtcgatgacataagaattacagatatcagggctcctccagcaagtaaaggatctacagagctctgtaaacaacaaattcttgttaaaaggatcaactggttaaaaggataagtatagattgagggacactgaaagaaacctgaaggatcaaaacagcagccataattcggatggaccaagaaacaaatagtgatgtgctaacatcaatggagccatcttccgtcagaataagtttcctcacagtccaaaatccaaaaaatgctccacccaaagacagaaacgcccccacaaaaatcgccgccttgcaaaaccaaaatgcagattaaatctttaaaatgggctttttaaccagcaaatgctgactgatgcatgaaacacgctaaaattacagcagctgcaatgtattgacattatcaaaacttacatacaggtgtgtacatttcttcgtcgattcccatctctgttagcagactttcaaacaatccgggtaagtagcgaagaagaaaaccacccaaaccaagctggaaagaaggaaataatcttgtgagtggtagataaaacaaggaggtcagagaaaacaggggagcaagagaaaagacgaattattcaacaatcaccagggttgagtatatgaacaatgcaaacgaactccgtccagtaggtagaagcttcattccctgaacacatcacataacaaaggcgaaatcagagggttaatacactctcttctacaggtcaacacgataaacaaaatgaggttacctgaaagagaacaagcagcacgacaaggataataccaacagccattgcactactgtagtaaaacgctaaagattggctcagtgtagaagccgaagccagtaatacagcaccaaggagtaagaatactatgcgatgcataaataattctgcaaagagaaaatagatagcttagaaaagagaaaagaaaatgcaataaaaggaaacagaaaaggcaccttctacagcagacacttccaatgagaccttgttagagctaggtactctaacatcaaggattttatggtcgaagggtgacattgtctgaacccatgaacctttagaggctttctcccatcgactatgagggcacattccaattccacgcgacaaattccttcaaacatacaacatttagtgatatctattatgtaccaacgaacttacaggaatatcaagaatttaagtccaacagcaaaagataaacgaaggactcaccggtgaaagcaaacgtcaatgttatttgttttcccagagattgacgcgttaactatcaacttgagcgaatgtgcatacttgtctagatgtttaaaccttccaagtccatggatatgaatcctctcacaaagagaggttctatctggcttcaatccaggagaaccttttacctctaaactaggagtcacttgaagctctccgctttctcccacaactgtcccataaggccacaagaaattaaccacaacaccttcaagcggagaaatccccaagcgggtcatagaagaaaagtagaattctggcactcaaattcgagtactcaagagctcaaaattacttaagcgatataaaccctaaatttcaaccaacaaaattagaaaagcttaccaaactgaagttcatcggatgaaacaagagaggcgaaagtaaagagatgtagcaagattattccgataacgacgccggagtttcgtagaagacgataatcacccatcgatttcttccttgtgggtttcaggaataaaaaaagtttcagggcgcggaaagcaaattagaataaatcctgagggtatttatggtaaattcaaagaatataaaaaaccgtgtattgtcggccttgtaaatgggcctaatgtggcccaatgacagagtttaacattttcttttataataattctaaaaactcaagtgtgatattggctttctctttaaaccttcagctttccgagacgaattctgtcagactgtcacccagttctgaattatttcttagtgaagaaaaaataattttacgtccaatgcgtgatgcttagaaaatatggttgcttggatgattaatggtggactattgaagagactgaaaatgattgagccgttaattacgttacgtcgacttaactgaacaaaatggaatgatgcattagtgattaattgaattattgactgcgtaactatgattgacaaaaaaggccgaccaaatgatctgccaaccatattttaaaagcatactacatttacatttcttacaaattaaaatgtaaaactatagtttatccagttattaccattgccttaaaactcgctcaagttagttgactcttgactggttgtttaattctaacatcctcacatgaaacgttatgattggataatacggtatgacgtaaaaatccaattaggtccaacacaaacaacgatatccaaacgtatacgaactgtcggtttacacttttcattattacatacattgtttaaggaaagaaatgatttgtggaatcttgaatctgcaaacaaaaaaaatccggttatacaatcagtaggtccggtacatacatgagacaacatttaagcaggaaaaaacagtgttggattgaaacaaatatacaattagttggaagtaatcatgtcacaaaacatgaagtttgaatgggcctaattctttttctttcttttttccactttaaatttccattaaagatgagcctaattcaattatcggttgataaataaattatgcatacctgaaaattatacttcaaccaactatttcgttttgcatttggatgcgaaaattcgaagaaattcgtattgtggatgtgccttatatttgtatctaataggttaaaaacgattagagttcttgaaaacatttgtcgaagactgaaatctcattaaagccacagaaaacagtaacatcgctttacataaaactttcaatgttgtcggatgatagttgctttaagaatatctacgcttttgatcaagagctctcatgaggatccaaattccggaatgctgtgtaaagctggcctccacccaccaccacctcttcctccaccgtggctcctcctcataaacccatctcccccgttttctccggcgacctataagatcggtcgaattaaattaagcattcgtacataaatgataaaaggataaagcgatcagagtaatgtgaccaggacagtcatctataaatatcttattcatcatgtcacaactagaactaaaattaaggatccattttaaatgttaaaaagaaaaaattggacgatgagagtattaacatgcacttaccgcattatcagcgccatcttggttcggattcggatccgaattcgggttgactttgcccgtttcctgatccagcttcttcttcctgtgtttcgtcttcttcttcgtcaagtcaagccctcctccttctttcaataacttgccaagcttcacacatttcttcgtcgcaaactcgttcaaaacctctgcatgatataaaattgtcaacagctttatagatcattttatttatcagaaacagagaaatggagttaagagtgtatatatatataccttcgaagctgacgagacgatagacatgtccgatgagtaaagtgtcgtcaggacgaaggagtttaagctgcttcagtggcaaacctttctcgttcttcatcgtaggtgacgtcaccaccaccgcaacgtaatgaccaggattggatttcatgatgtcactcgctgtcactgaccagtaaatcctctccaccttgttctccgccgggtgatgaatcaaaaccgtcgctgcttcggccgcttgacaattccccatttttattttttttgcaaaaaaaaagaaaagagaaaagagttttgatttttttgttgggttcctgtctgaaactaaagtatataagaagagattgttttggttttaataaatagcgacgtcagaattcttcatcatttgggattgtcaggtttgacaaagaggtcgcttgagatcgataaaaaggattaaacacaaacaaataaatttagaaaataaaaagaggaagaagaagaagaaaataacagaaagatagaatttgtaaattaagatgtcgacacaagagattaagcaatgagacgaataaataaagaggttgggagtggtagatctatttattttatttctgatgtataatgataatgacatttgaattttatatgaaattaataaatgttattaaggatcttgcatatcgcaaccaatgaattaattaacaacatgtttcattctcttgaattattaagttgactagaggttatggtatctaattaaaaaccaaactagactgtaaaatttaatcaataaccatcttttactaatactattcaacaattttcatttagaaagtaatatattgatgatttgataactaattaaaggggaaataataaataattaagaaatattttcaatatgatcaaagttttttttttttttttttttttttaactttatgtaatttgttttatgtatggattgattgctgtttttatggcttcaatgtgtgatacgaatctctgaaatgatatccgagcaacacgtaaaactatgtccaattttacatgttatttgaactaaagtgtagttgataacaaaatctttatggatttgatttatttgaatattcattcacatatttcttatcacaatccgattgtttttttgtttttttcatcatatcacaatccgcatcatatcacaatccgattgtttcgaagaataaaaagtactattacaaataaaggctgttccaaaggaagctgttgattcagagttacggtaacagtgagaatgataaaatgtagtatgggacccatgacgagttgaatcagatgtcacaatggcagagtacctaaagacactgcgactctttactgtcaatagatttgttcgactttttataatgcatatttttggttggattcaccagcgtgtgatgtttgttttttctaattacttgcaagcgatgtgtaaattagattaattcaatccatgagtttggaacaatttgtttggccttctatcattaactcttgttctacaaagccgtttgttttgaaatctttattcaagaaattcaaggacacacgtttattcataaatttagataatatttcactaaataagttgaaattgacccgaccaagcaaaataaattcgttacaccaaaacacgccaccaaaaaccgatgaagtctggtaagagaacactcgtaattaatttactctgatggtagagacttgcatgcgtgtcaaattttgcgaacaacacacgcttacatgtatttaatgataagagagagattcactatactcgtcaatattgggcttaaagcccatataaagtcttaacgggccagactaatttagtaaaaccatctcctacagtctagtctaaccgaaccgaaataagttgaccaaatccaaacaaaatcaaatttgtaccaaaccgatctgtattgaacttggttaaatcattttctagaaccgaatctcgtcacaacttaaaaaaaaaaaaacataaatccgagttcaacatcctaatcatacatatcaccacgaaacatgataaataaggcaaacagaggtggatcctcagatctgcatagcatcttgttcgtcttctgcagcagcttcatcgtttttgattggttcactgaacatatactgactctgatactcaacaagatactgcatcgatctcctcacatccaagaacagtctgtaaactctctgaatatcctcaacctccacgactttccctttccgtttctggcatgacaatgcagctgcggttataagatgaatcgcataccttagagatgtatcacgtccgatcaatgtcaaaagctgtttggcctcttcgttcatctcaacgtcttcctcttggcaacggatttctaatatcttccttatgtcatcgtctgtgtaaggttgggtagtgatgatgagaagacggtcaaggagatcaatcgggatcccgtgtggtgatttctggtttgtgccacggattgtcgtcactcctcggtttgttgccaccacaaggattggtgacatttcgttttctagagctcggttaaggaatgagaagcattcgatgtcgagcatgtggacttcatcaatgaagagaactccgggaactatctctgcttttccttcttctctccattcagctacttttgtatcaatttgttcccggacttctgatcggatttctccagtatcgccagtgaaaagggcaagaaacccttgtgtcctgcaagcaaacaaagaagaagtacacaaagttacttttttttgttctaccaatcatgtttcaaacattaaattccgcaaccaaaattggttctaacgataccacaaacagatgagttagttatagttataaagagtgctctgactacacactgctaaagaaaatgagcttgagaatttcaagagcatataaagcaatgaattaatctcaaatttgagacatctcatctgaaattagtgagccaaatcaactaaattcccaatcacctaatcactaaaacttcaattttgcaacctacattggtattgcagataccaaatcatgattaccaatgtttacaattcagggaatgttaaaagtacctgctgttgataacatcaatctcgtgaagagtgacacaatgtacaacctctttcctcttctgcaactcaccttcagggcactgcacaaacttggtctgcgcacccatagcatcataatcacgagacctcgaaaacgatcttccaagcttagtaatcttcccagtagctttatcaatggcaataacatcaccactctgcactttctccttgttcaaagcctcaatcatcttagctcccatatcatacacagtttccatatcagtcgttttcatagtcatcttccctgacttggaagcaacaccagaagaagcaggcctatcaatctgaacctcaacaacttctccttcaataacctctgtctcttctttgatcctaacaccaatcgctttacgaaaagactgagtcaaagcttctgtctttgacatctctaatgagaaaatttcacttcctgcaatcatcgcaaaaggagtttccaagccaagagatttcgccatacccattgcaatcgctgtcttacccgttccgggttgacccgctattagaatagcccgacccgcgattttcccttctctaatcatctgaaggattacaccggcggctttacgcgccttcacttgaccgaccataccttcggaaacagctcgcggctcgagggcagagtcgagacctagtcctctgatgtgtgagtgtgcgccgattcgctcgactctggttaagtcccgactctctgatagctttagttccgccatattcgattatcgtcttcgtgcgattgaggcggagggagaagagcaaaaagttaaggttttagggtttagagaaaagctacacaatggcaatgacgatgtaagagttaaatcctcttaacaagggcataaaaggaactcacaaatcttatagacgagaattataaatttagtaatatacccttgaattattaaagatgaagtaattaactcttagataaaggtctgtgataatttgaaccctaattaggaatttcagggattgcattggatccatcctggatattcttagaactctctttggccagtttcttagcatttcttctcttcttgacttttctcgtcttatcattgtcaccgattagtcctaccaaacaaaaaataaagagtcagacgcgtaatgtaattaatacacaaaagagaacgtttgagtaatttgcacaggaccaacaatgagacaacaacttgatgagctagtagattttgattaaagtcaaacccttgatctgaatacgtacatgtgttatgaaatctagttagataaagtacgaatttttcccaaaagatttgaaactaaggatatcgtcaaaaaagtcaaaagctgtgtgtaccttctttcttctcttgggcatttggtcgaacaagttgtgagcatatgttgctaatgctcccatcaacctcttcttcgccaccgtcagaatcttcttcttcaacattgctcccacaagcatctccgacacttctttcatcatgggtctgaagcatttcagtcggaagtaaaggtccgatgactttcttccgtcgagctgcttcctctttgagcatcttcttccttaacctctttctctgcgctcgactctgtttctctgcaatccccaattcgtctccgatttctttgtcttctccgtgattagatgaatcgattttcaagtaatcctctgaataataaacaaatttgaatgtgacttccaaagtgtaaataacttgttaagattacattaatcgtacctgggtttatgagtgacacatcgaatggttcgttatcaacaacctccacctgaaacaatggcgggaacatttatcgattcataacccaatcgagaactaacaaattgacacaaatagagattgagaaaataccggaggcggagaataggaaggagaagaaggtggcgatgaaggaggatacagtgtttgaagaagagcttcgtgaaattctcgacgcttttcttctcgccgtcgcatcgtcggcacttggcagcgaaatctccgtctaattcataagatgtgtaacttttttttttttttttgttcattatgtccctaaactttagtggtaactgtattactactcccaatttttttgatatagtattgcacccacacaagtcaaagagttcacgtcaaatgtaactaaaactttttttttccttctttctttaataaacacattttaaaaaaaaacacattcttattccatgattgcaggaaaagtcggattcacgaatagatcttgctaaaacgtcaaaacttgacgaagaagcaataaatgataagatcgagatcgattctaagggatcgatatcgacaaggttttgcaagtcctccttacagggcttgaacacaagctcttagggttaggagtccttttttataggctttacacaaaacactctttaaaactctttaatcaataatcaaaactaattacaatactaaattacgtcttttcaaataagagaaagataaaaaaaaaaactaacataaaagagaagcaaacgaatacaagtactaaaaggctaaataaacatgaagcccatgagaaacaaaacccaaacaacgagccagcccaaacgggacgaacaacacgttcgtctttgagatacgctgcatcagcccttctgggttagaaagattcgacccaaatctgaaatctttgaagacatcctttgtccaccaattcataatactttctcttaagaactttatggcgtttccttttcagcctcaagagcgacttgctaaagcttcctccatataaaaactttgttaaatgaattccaagattccttgaacacatgtgaccaagatatcctctgtctttttggataaactcatcacctcgcagatctttcctctccatttaattgttgcctgcatatccaagctgaaatcaagtaactttcacatgaacacaacattgactgcattcatgttcacatgtcaagagcttgcttgttgtgtaagcaacgtcactccaacacataaatattgtggacatgtaacagaaatccgattgtgggttacgaacagttctgtttacccatttagaagctccactcaatgctgacttgatgttgacaagatcctggtggtggtgcaaaatgtggacctttgacaagtcaccgacaaaaggtacggcgtcgaaagaactcattacaaccaaaaagcgactgttctcgtgaatagtatgatttccgaaaagtccacaagtgttgatctcgttacaattcaacacattatccttccacctaagacatgttgcgaccccaacgtagaaccccaagtgtttgataaacacatcttctcttctctttttagaagccacaaatgaaaaagtatcccacagcagccaaaaaaatgtagaagtctcccagccaacaaagccactttccaataaagattcaaatggaggcaccagatgttgagcaaaatagacaaaacaaaaagcattttagactctcactatctgcacttcaccaaagtccattgaaacgcccatataagacatcaaaacatggacgagaaaacacacttcactctgttcttatgattccctctgttcacaaaaagattttctagaatggagagatcaagtaggcggtgatggtgtaacttcgtcatatccggcatggctccacagattagtacaacatctttagacttatttatagcttgccgaaagaagtgaggatgaagaagaactagcttcatatggggaagacgatgctcatgaaactggtttgttgtcgcttacaccgtaaactgtccgtagagtgtgtattgataagcaaaaacttctttagccttttatcttgcgagaagagataacctcacaacttggctatgcggagaaacataaaacaatgtcaatggtggtgggagtagcagctactaaacaccaactctatctttatgtgatcaaagataaagttgcacatgttactcggcccactatttgggccacaataaggcccacaacaagacaaacaacaactcaacaatactgggccaagaagataaaagcccaagcgtagagcccatcagcagtacactattttcccctcccgcgcatccaacaactgaaatacttttcttcttttacaagctt

SEQ ID NO: 981 - DNA, 76175 bp, Arabidopsis thaliana
aagcttctgacgtgggctcaaaacactaaaacggcctctgaatcagtcaacactttgaggcatgagagattgattaaaccacagaccaagtctttacgacaaatcaactcgagcccaataggctctaataaggcccaatacgatataatcgtcttcttcctgtagagtcggggacctgggattagtcaataaatgagtagaatttttgtaaggaagagagtagttggtgagcgtcgccattgaaggggaaagcagcccaactttgcattgaatgacacttaaaatctttctctcagcagctgtcttcatttatgatcgatcctacttctttcttctctctaccaatttcaagatctggtcgtcgctcacaggagaaacgtaatggaaaacaaagagaccaagcaagaaccagcagcagcagctgagcaaaagaccgttccgttgatcgaagatgagatcgagaggagcaaagtcgggatcatgagagctctctgcgaccgacaagatcctgaaactaaggtccctatcgatttctttaagtaaaaaaagaattcaaccagaaaagtattgatttgataaaagccctaatgatttggatttgcaggaggtggatgatctgatgataaggaggtttctgagagcgcgtgacctggacattgaaaaggcttcaacgatgtttctaaattacctgacttggaagagaagcatgctcccaaaggggcacataccagaagcagagattgcaaatgatctatcgcataacaagatgtgtatgcaaggtcatgacaagatgggtcgacctatcgctgttgccattgggaacagacataacccttccaaaggcaaccctgacgagttcaagcgttttgttgtctacacgctcgagaagatttgtgctaggtgaataataataatattactacatacattaagttagtgtgggtatataagaaaccatttatgctaatgctctttttttgtttgtttgaatgttgtcatgttagaatgccgagaggtcaagagaaattcgtagcaattggagatctgcaaggctggggatattctaattgtgacatccgtggctaccttgctgctctttccactttgcaggttacttcctttaattcgcctatcatatcttttgaaacaaacatttaggtttttagcaattatcactaataaaggaaaatattgctaataatccacttaactccaaatatagagaattcagtttgacttccaactaagaaaccttttgttcgtcagtactatttactatgttttaaaaggtgtttttgttattttggagtaggtgatcaggttaaaggtctttttgttattttggtccttttggccacacttggcttctttttttttgtttctctttgtttatggattttttttgaaaaggaactttcatgattgtaatcctatttttagcaaaatattgcgttagtaatattgttcatggtcgtgagtcctgacagtgagtaacccccacattaagaaaaccttgttttacaggattgttacccagagagattagggaaactctatatagttcatgccccctacattttcatgaccgcatggaaggtcatttatccttttatcgacgccaacaccaagaaaaaggtacattgatttgctctgcttcacaatcactttattagtatgttttaagactgtgttggaaaatttgattgttaatttcgtgtttttttgggggggcagattgttttcgtggagaacaagaaactcactccaacgctgcttgaagacatagacgaaagccaacttcccgacatctacggaggcaaattgccacttgttcctattcaggagacctgattataggtcttactacggcccacctctatttccaaattattacttactagtattattttttatttgaataaaatgaaaaacatattgagtgtcgccaaatgccaacaattatatatttactgtcaaagaagctaaaagatataatattgaaaacacctttaaatttcatgtaatttttcataattatctatctactgtgatctagccataatacttcggcaactatacaatttcagtctagcttgctgttgctcttccctgcaaatctaacacacaacttgttccaactagaattctaaaccaaaacaacaaaataatataaaagaggtttaatttatgaagggtacattgaaaaaaagaaaacaccttgaattgataatccataaaacaagtctttactaatattttcactcttattagaaagaaaagaagaaaccatcaaatcccctttggcaagtgagatcgatccacttacacaagctgtttgttcaccagatgcgtgggcgagtattaccatttagaggagctccatgatctttggctttggctttggtctctctcagataagcccgagtgatctccacgcttagatccgggttcctctgcacaaacgtctcatatttcatgggaacaaccacttcttccatatgtttgacaatatgattgatagccgcgtctttcaagattgtgtcacaaggtatactggcgagctctaagatgtctaggacgttcctagagctcagagatgcgatgaaatggttacggcatacgtcttgcagatatgaaatgtcgtacttatctgcagccagatatagggatcggtattgattgtatggagcttttaggttaccgctgtagaggaactcgagaagagatttgagttcgtcgtgggacaaatcagggagagtgattgattcctcgggggaggtcttgcattcatcagaatctaacatgttcctgaagacctttgatcttgccgcctagaacaaaaacagatttattcagtcgtatcatgatccagtgttatcatatcatatctaaatatagtaatgtcttgagactagaactgtgacattaatataaaagcaaaatgtaaatcatctgttaccagaacggctttgtgggtaggtatgggtggagcttcttcaccaggtttaacgagaacatcagtatgcatttgctccttgaatgagacaacaagaccaccgaggaaagccgccttttgctctgcttctgtcattagtttattcaaactaatgtcacaaccaaaaagctttagtatgtagtattacttggccaaacagagaacgaaataccaagaagatcaaagttaaccatacatgccacaattgtttattttaatcaacaaatcttaagagtagtagtagagaggttctctattcataagatcaatattgtaaatttgtgatcctcccctaagctttaaaactctaatcaaagctttaaaatttgaaagtattgttctggctaatagttatccaaggatatggtatcgaatcttaaaacgccactctccgaaattttaaaactcaaacagaaagaccactcacacaaaacgaaaattcaatcaagccaccgatcatattctcaaatttcatgatgattttaaaacaacccttttccaagggtttgtcatgcaattctcaaagaaaacaaaaagaagaagagaaattaggaaagtagaatgatagtgtatattaccgactgatagcgagatcggctgcttcctctatagattcggtacgatgatctgagagactctgaacttgacttgatgattactttacttgtgatatcgatataatttaagattatatttttagtggagcaatatttattatcaaaaaaattcggaaaagcaaatgtttaaagcgaaagtttaggtgaatatcggattttgaaatatcactagaatttttttaagatcttttccagcattttaactataggtccaacgtgctctaatgggtcaccggtatcggcccataacaaaccaacaacaacaacttctgatttattttcaagactcgtttttttttcttttcttttcagttaagctagacttttatcaacatcaactttatattagaagtgttagcatcagtttttattactatcagtcatattaatgaaaaattttagttgctactatatataattcctctaaaaaacttgtgacccttttacattagtaatctgtaaaatactagttggacatatgtatgttatagaagaaaatctgatcatcatgactcaggaaaagaagccaagtctattcatggtttcatgtctaataatagagagaaactagcaagagaggttaaaagagttatttaaggcaaatgtggtatgggctctcctgtctagttgtgtgaaagcgtacagagacatatatattgacctaagaaggggtgtgttgtattaacaataaaaaaaaactagaggatcatctgatttttatctgttcccatctgatacatagcaggttgttttaagacgattgaggttgaagacgaacgtgagggcatggcctgtcgggttcccctgttgtccacagcgtcttcaagtcacctctcttgtgacccaacacgaacaaagtacctgacacattgcaccacaaaccattcttagtttcaaaacatacatagcttttggttccaaaacatctgttgtgggttcagtgttcttacctagtatgaatgggacgatgtaaagcagagccggttgcccatgtccgtccatcaagtttagagctatgtatgttatgagaagacctgtgattgtcaagaatcatattaaaaaacctttactagatttcttattcgtttctcccctacgtgagggatcatacctagaccataagcagacattgtcccaaggaagtaccctgactttagcctcttgttcgccagccagtcgtacctgcagaacggtgcacgattttgatcggatttaacattagattaaggtacttatcataataggtttcctttttattactgaaaatgataagatggatcacctgaaaacacatccctacagttatcaattctttttctaaacaatatcttgtctccatttgtctacctagtgcaaccttaccctgatttctctgaagacatttgattcattcacactcatctatttactagactatgtaatgtatatttctatctacaagttcttcaaaaaattgcaaaccacattaaacagacacaaagcataaggacataaggttaaattgaaccagaatgtcggattataagatttttttgccaggttcaagcgattttgttttataaaaaatctgtcagagatgatgcgcaaatgcggatataaaggtatatcatgaccccaatgtttctgataaacccttttcacattttgttgttttcgctgagcacctctattggtttgttgtcctgatttacattgatatccgcatttgcgcatcatttcatacttttgtatgcttctaataactcagtttagttgagatcttgatatagtaataatgtgagagagcgcaagaggagattgtaacagtgcaaacctcagtgcgaaagttacaagcagtcctggtaagataatgtcaccaaatccaattatgctgtagccaccccaaggatcaaacattcgtgggatctttagtagcattggaattccgtcctctccgcttctgtcaccacgggctacctatatgtgggaaaatgggaaaagacgtacaattctccgataatatcagtgtggagcagacagataagtatgtgtagttggaatatctaacaaagtcttcttgcatgatggtctggagcaaaaaagaaaaacttaccacaatcatcacgctttcacggaaccaccattttgaaacaaaaacccagaagatgtcatacatgaaggcacagctgagaagaacaaacccgacctgtttacgtaagagttcaatgagtcatcataactaatattgttattatagagattggtcttctatacattggcagaaatgattgtatccgtctaccagcagcaatcaaattttcagtcttcaactgattggtttagacagttgaattttcaacatgttagagcacaaattcagaatatatacacaggaaaagtgatggttcaaaacaaagctggtacgagatggctaaaggtgtttgtcaacatgtgatatttagtgccctcatgattgtaacggcaatcccatgtgacatttgataaggaattggtaataccttaagatttggtacgcggacaatttgaagaaccgtgattatcagtgagattccctgtcagcaagaaaaaccaaaagtaagctgttaacttgtgttatttgttaagactacagataggtcaacctaacaccaattacttatacatatgcatgaaggtatgtacatggtagccttgtatggaaatttaacagtaggtatacttgtagaaagacatggattcaagaaaggtcagttaagagagagagatggaaacccgcgcttacaagtatatcttgccctatccaagcataagagtattgacgtttaaccgcccaaaatacagcaaatgctatgcaaaagggacaaatagccagagtcaagtatgagacagcacccaggaaaggaactttgacatatgattctccaaagcggcggaaccatctgaaactataacaaatttaacgtcagtatcagattttcttttttacttctcaaagagtgaagaagcttgaataccctagcatttcatagtcaacaaaaagaaacaactcatggtttctatctgattcattatttcatggtaaaacaagacctgaaatcaagacaatgcagaacgtagaaagtttgaaaagagatcaatgcacgagaataaataatgaaaaaatcttgggatcacgagtgtttcttctagtattaaagggctgtttccatcttaatgttcctctctactgctctttgaaaagcaaaaagaggtgaaacaagctccttacaagaaaatgttaatgagagaagaactatacataccatgagagtagagagaccaaacaagtttgcagcccctgatagcaccaacaaaactttcaacatcagtacaggatggttcaataaggtattgctatgatttcaattggtcacaagataaacgttctacctctacgccacctatgcaaaagagtaccaccaacacctctataaaccagaatgacataagcttgtagagcatgatcaggaaacaagaagccaccactacaaacaaaattgctgatatcacggtgacctcaacaacacctctagagctggtggttgataactgcaaaagttcatctgatccgtcctgcagtttaagatagataacaaacgaatgagggcacttttccttggctgtcaaaaggttcgaacatggtggatgtccagaatataaaattgtacgaaattttgagccagcaatcacctttagcagcttgtcttgctcaatagcttcttccctgacggtccacgcagaccaataagaagcacataaaatggtaccgacagccataagccaaagaaagacctcagccacatcaactgctggacgtttcggcgagtagagctgcagagtaactgaacaaatatagtcaacaccaactcaaagaaaaagagagagcacagagatgccaaactatgataagatatgctaaaatacaagaagagcaatctatgcggaagtacagtttgatttatacgaagaattacctatagcgttacttttgactatgttctccagacttctaccagcatcaacaggtagcataacaacaggaatagtaatatctaaaacgttttcacccttctcgcagaccatcttgaaaagatctgcaaagcaacattcaaccttgcaaaactcaagagggatttaactagaattgggaaataaataatcacttggaactagtacaagaggaggaatatatacagaaaaaagcctttagtgaattacctgtactgttgtttatgataaggatggcagaggcaccagctgcttcagcaaccttagttttggtggtaaaactgcatttaccacgatgaacaagaatgacctctcctgtaagctaccaaaagataatgaaactggaattacacaagaaggaaagatgagtacaagagagacaagccaaaaaggaaactttaccttatttttgggagtgctgcaacaatcaggagggtcagcaatagcaagtttgatgagggtagcatgtttctccttagattccaaggttgggccaaacctagcaccaacaccaacatactccgtgtactccgacccattgactcgagttgggactttcacctgtccatgaaattatatgttgtagttatatatgttggaagatgacatggcagggtcctaaacgcaaaccagatctatatcccaatttcttcactcacaccaaatgactccttattatagctaacaagaagcttgcaacaaattgaaagtccatgcgactaaaacgagggtttagttaggtaactcatggctatacctactctccctctattctgaatgacatcaaatctggaatccaaaagttcctctagagtctgtaaaaacccaatttctcaatctgctggcaacaacagatatagaaggaggaggacagtgagaaagcaatcaacagactcattccactaaaccctagtattacaatccaaagcctaaactaaattccaaattcctgaaagtcaccaagagatagacaagagggacaaggagataagagaaagagtaagaacgacagatcaaagtgaaatagatcaaaaatcaaaccagaacgaaattgttgttgcaaccaggtctctgcggaagcgaatcgtcgtggtgaactatgtctccagcacaaacgaaactagcactgtacaacaacaacccgaagacgaacgagaaacaactgagagatttccacaagatcatattccagactccacggaatcgttaaaaggagggaagaagaaaaagaagataaaaagattagagaggaaagatggagaaaaaatggaggaaggtacaatgaacgagagagagagaagagaagagaagagggaaaaaaaataaagtctcgtgggagagagagagatgaaaaaaggttggtgtcgttttagaggtaagtaaagcttaaaacgctggctttgactttttttttctctctctttttggtcctctggcgcgtgggacgcgtgtttagatgtattggtgtctgtgtacagtactgtttattattattgaattctttgtccgtacgatattttgccttttctgtagttatatttatcaaaactgtttatctgctgatgatgataagtgataacagatcaagcgccgtgtagttctaaaacatgtggagtcattaacggaaccaaaaagttacacaaaaaaacaaacatcatatattaacttaccgatgcttgaataatagtactattattgaatgacaaacccattctataatctatatcactatatgccatgttatgattattgatgatttaaggtttaatttttttttcttttttgaaatatgttgattgtctatataataaacatctctcactcaataaaaatcaaataaatcaagtgacctttttctgaatcatatcataaacaaaaaaatatcagtaattttttaaaaagtaccggttttcaaataataaatttgcagtaatgaattcattgatgttttgggtcggttcaccctaatacattttttctctctcgcctccctgctttaactccaagtggtcgttgtgctcgtgacggcgcgtggcggctcctacaacgccggcgtcggtcacctttcttgtttcctgtttagtttttcttttcatagatgtcttctttggttttagaagcatagaggctctttacaatttggagtggtgagtgttgtgaagcagatctagtgagattgggttttggtacttggatctgtgggatctgatggtcgagggtgttcttaggtcactgttcttgttcgctggtcatggagtgcagtcacgcttcatctttgccggtggactttcaagacttttgcttcttctcttgacggcttgtttctcttctcccatggctgaatctgtgcaacatcggatcgacttctcgataactcggtatctccattgtctctcatgtcttctgcttttgtgaaacttgttgctctgatcagtttgtattcatgagatctggtaacatcagcggcttaggttaatttgtctccctcttttgggctattgtctcccttttttgggcttagcttctcttccccgactaagttagactttgttagtttggggttgagctcttggattacatatcagttcttcttttgttgtattaagcaacgattagcttaattaattgatcgttgtggtgttgaaaggtttaagtggttctcgattatcctacggttcatccgggttaggtactctttgaaaaagaagcatcatttacggagaagaccaagttccactatcttgttattgccataagtgttgaagcccgtcttctcagtttgttgtgcgggaagtccttgtggtgaacttcgagagctttgtttagtctcgagataagattagtttggtttttgcaatgttctcgaaaaaaacccttcttcatgggtcgagctttgtgtatctttaaagtctaaactctttattttcatatgtattatatcttttccaattctaatatcaaatataattcaatgagaaaaaaataaaaaaatttgcagtaatgaattgcatgtgcgtggaacatatatagagacaagctgcgcgtggaacatgcatgcgatatgtacttcaaatccaccgatcaccggctacctcaattttaataatatatatattttattaaatacttttttagtcatcacaaattttaatatgaatccgtatgaaccgtaccgacaagacggcatgttacagttaaccattagataattatttttataatctgaaaatctaatgtggtcgacctcatgctaagatcaaatgttatggccaataatattctcgcacgtgaaaaaagccaattcgtccttttgtacacgcgtcacgttgttaatcttaatatcacgtgcgcttaaactctctaccatattcgtgggtcatttgttgggccatctttagtaatactggcccatagaaagggacgtctgtgaattcaatttacaaacgccaagatatgttgacgtatctcaagagagagagcaaaacagcaagcatttttgtaaatgggtactagagagaaccaaacagtttttatgaataccactcacagcaaataataacagcttttaagtaaacacaacaaaagcaaagattctcaagagtttcgttgtagccactcctgaatcgcggaacgaagggcgtgattcgggacaaggttgttgtgggcgagcttcaggtttgtcattggtgaggtctcgtgaccattatcgagccattctcttaaagattcagcttcataggtgaaaccatcggctgcaacacgaggctctcgcattacttcctgaattaataaataaacaagcattaacttctaaacatcgaatataagtttgttctgttacaatgctctcatttgaacaatgaacccacgggggtcctggtccacatacctgtgagataggacatatgaaatatgagggaggctggcgtgtaacggaatcctcatcggagaatccagaaggagttccatggcgacgagtgtaactctgaaggagtaatagaatctccgaacagactgagctcgctgcgtctttctcagccgccaccttgctgagttcttcctctgttccttttctacgtcttgcttcttcttcatacaacctcatgaagttttgtcctacagagcaagcttcttccttctccttcttcactttctctagctcctctcttcttctcttcaccaactcctctgcctctttcctctgcctcacctgtcaaaacgatcttttaatatatgatgaaagtaacttctagtttctaaattaaatctaagattgatcacctcgtcttcatatagctgcatcaagttcttgcttatcatgcacgcttcttccttctccttctttgtcttctcaagctcttcctcttgtctcttcatagattcctccatctctttcctatgtctcagctgctcgttgtacagctgcatacctaatttgtacaaattcaaatgaaatctctaattgtctgagaagaaatattcacttctgtttctgacagtaccatcctgaacaatggctcgcacttcttcgatctccttcttagttctctcgtgttcttctttctctttccccaacatctcttcagcttcaactctgcgtctcagttcctcattgtatagcttccttccatttagaatgatgattagcgcgtcgtccctctcttgtttagtcttctccaccattttcctctgcttcgctaatgcttctttaccttctttccttagcttcgcctcttcgttgtacatggcctcgtactctcttgccttttaagtaaaaggaaacaagtctaagcaaaaacacattttcaatgtatgagattatgaatttgtgcaggtgttttacactgcgaatggcctcaacggctgtattttcagctttaaaccgcctgacacattcttcgtaagcttcccttttcgattcctcaacttccataagtgcttgcttaagctgtctatacagttgatcattcctgtcgctttcctgcaacataacagagacacaggaatatattggtttttgcacaaaccattcgattatgcatctaattcacaataccaacaatatttagaacatacagattgatcctctgatgcatttggctccaacatatctctgtctctccttgtgtcaatgtaagctacaattgcagagactaattctgcagagcatttcggtgaagcagaggaatagagcttcggtttggattgtccagcttcggattctgtttcacccatacagtcttcaagattggcttccctgtgtatttaatacacagagacaatcaggtaatttcttcaaagacaagacacatataagtaaagagagtattcaaaattctcactttgtgtagatgagatgtccatcacacataaacataacctcgcacgagctgggcgcgtgttggtaaacatactttgcctttcttgatttgagatcgaacatcttcctgccattttcagcaagtcaacgagtgaatgtcttgatgagatttaaagttttcctaggtttccaatacgtactctgaataatgatgatctgatgcagctcccatgacgagcttcttgattttgctctcatggatgagttctagtatcccctgcttcacatcgttcatctctatacatgatatgtaaatatcgtcctcattcacctgcgatcataatgaattcaatatagggtattaaaccaaaccatttgaaagcaagaaaagacagaatttaacagtataagaggacaacagattaatataccccttcttgttgacaaaaatcaaaataatcatgtaatgtctcgtacatgatagcctccaattcttcaagcttgcgagctaaataatcaaacataaaataacttatcaaatgcgacgcatgtaatcacttttctagcctttaaaaacacattagaaaatggcaaacatctagccacggaaaatcatataaatctcgagcttttactcaaatggggcttgaagatcatgaagcttaccagccggagaagctgtttttggctgataaacatggaggatgcagactttcttagccccgaggttcctcaaagcccaaagaagagttgatctgctctctctgacatcactcttcactgcaacatgaacaacatcattgcccatggccatgagttccgccattgatgtcctttcttttcgccttcgttttctatctttttttcttccctgaaaactgaaaccagataaacagagaagaatctaacagaaagagaccaacagtggttagtggtgaccctcaatgttcttcttgttgaccgcttcaggtttcgtgagggagacacagtaaagtcaatgtgtggcaattaaaatacaagtcaatgcataaaaatactaaacaagaaacggcacttttttccagtgaataaaggactttttattagatttttcacaaacaaattcaatgaatcacagcacgattaacaccacatttatcctaatactaataatcacagaattatggatgctgttgcaaccagtctttaatggcggaacgaagaacaagattcgggatgagattgcgattctcgagcctaagatttgtcattggtgatttttcacctccgtgattgagccatcttctgaactcatctgcttcataggtgtaaccatcggctgcaacatgaggattttgcataatatcctacatttcacgagcaatggcatgaaaaatagttagactgcagatcagcagcagatatcaaaatggaagataagttataaaaaaaaaaaacaggtatggtttagaatacttgtcagcttagaacactaaagttgagatattgaacagaagccaagtcaagatctgaatagaaaatatgatatctcgatggaggctttgagtcctaacctttgaaatgggacatatgaaacattggggaggctcgatggaaacagaccactgcaacgggattgatgactcacccttctccaaagctcttaaaagctcttcagttgtcttgatagcttcgtctcgctctttctctaacagacggcaatcagcataatgctgttctttaagttcaatttggacccttttcatatcttctatttctgcttttgctctgtttagttccgcctccacttctctcctgcgcattacttcttcattgtacagtatcttagtgacaccagaagaacttgagagtgcttcctctcttacacgcctcatcttatcgcgctgctccttctctctctttaattcctcaatttccaatctccgtctctgctcctcgtaatacattttctcaatccctctagcctgtttaacaattgaacaaatgagaatcgcctatagaacaccagcacaagaatctcacatagtaaacttgacattaaactcatgttttaagacaagcggtacaggaaatgagacatatttggcttaacagggagaggtgttggaatctagattttccaatatatcactattcaatttcttcatatattctccaatggttttgtgaggttttaagcaattcgcaaggttccaaattcataaaacaatcctccaaaatgctatgtgctgaccaaagtggggtttacatactgattgttcttcagatgatgacaaggcatgtggctcggtaacacgttcagctcttcctgcacccccatatggtatcagagcagaatcaatgctatgaaggctgcttgaggatgagtacgctgaacctgcatgttcgaaccgtccctccctaatcaacaaagaaaattttctataaactttacaataattcaaaacatgcagaagtataatcctcaatctcacctcgtttggatgagatttccattacatacaagccatatgttacagcaatggggcgcatgttgaatcacgtagtcagcttttgtaggtgtgatatgaaccatgcccctgcatcatcaaagatatataactagagtggacatttacttatttacagagtcatatttgcatcacatagattattgcagaacagaagaattgtttaacagcgttgttctggagacagagaatgatactgaagatatacgtactcggagtagtgtgaatcagcagttgctcccatgataagcttcttgatattgttttgatagataagttccacaatccattcccccacactatttgctgaaaaacatgacatatccacatcttgttcaataacctgcaatattaagatttagtaaaatgttatagcttataatcgaaattgttgttgtaaaacaaataaaccacaagaatatgttataagattccactagcttccttattgtatcaactagttggaagagcactcactccttcatctatgcagatatcatgatacttgagaagggtatcatttctactagtctgttccaactcctggattgcatcgatctcgctttgttccagcccacttgctaaaattcacaaacataagaccaaacgttaggagaaaagtcattcaagaacgtaaagcatgatcttcctaaataatcaggaatcattaatagcttgataataaccacacataaacacaaatacaagacacagagctgcaaccatttgcatcatttagataagtattaccaaagcagagaaaactaacaaattgtaacatttttgattaatacattcccgaacaagtttcttagcacccaaaaaggagaagtgaacttagggaagagatggttttacatgaaggggtcatggaaatgagctgatgaacatggagaaggtgaagctttttcgctcgaagagtcttcaaagcccataacaaagtcaatctactttgatcaacgtcttcgcttactgcaacataaacaggatcgtcgtcattcaaagcctttgccatggattctccacttttctctataagatagatacgcagagagacaaattctctctttttccaaaacaagaagataatacacaaacaacacatgaatatacatatgtatcgttcgcttaccaagtcactgcaaagatgtttccgacaattttcttagtcaattatataatattcaaaatcgtaatcgtcttttatgagaaagaaagtgattagaacgaaagacatgatctaaacagagtaggataacatcattcagaacgagccaattctcacaaataaattaaatgcaacttaagctaatcgcagaacatttcttaattcttaccgtaaaagacacatttcctacgatcattttagattttttttttaaagccagatttttaatttaaaatgtcaactcagagaagattaaaagtatatatatgatacgtggaatccgaaatcgaagacaagataattttagggtttagtgacggggaaagctttgacgaagtcacggagaagtagaaacaaaaaatatatacatgtagagagcttggcttgatagtgagaaatttcgtttcgaaatttacctgttctatatccgattttcagaccaataatgtccgatcaaccgccgttcaattagccggagagctgaagaagagcaattctatgaggtggagccagtgaagaagtcaacagactactgagcaaaagttttttcctcgagaaataatcgtggagtttaacgattcaggttacgacacgtcacgaagctattagtatgaacgattagaattacttcgcctagatctcttcttatttaagatccaaaaagcttacaaacatcggggtcaattaagtaaatttgcagtgtgctgaataagcacggagtatttagggtttcttttttcttctgtttctctgttctttttcgtaaggaggacaagaaaatggaaaagataaatttatacacagattgattgcatagagaatcgcattaataccctccatggatttcgtagtaagatacatgaaggttttatttgttatttcacaaagaaattccaaaaatcacaacataatcattgactttcttgttttttctcatatagatagatgaatcaacgtttataatttgggttcttctccagccaatcttttatgattatacgaagagtgtgatttggaacgagattgtgattctcaagcggcttgtttgtctttggagaggttcgacctcctgaccttagccactttctgaattcctctgcctcgtaggtgaaaccatcagcagccacatgaggatctcgcattatctcctacaacatcacatatgaaatcgaacaacagcgttgatgatgtggaacaagtctagttttgtttcaagagctgaaaatcaaggaaatatatatatatatatatatacttcaaatatcctaaccattgaaatgggacacttgaaatcttcgagacgtgggtcttcatcgctctcattgctttttgatttctctatagtttccttccttcctttctttggtgattcctcaggttctagtatccaaccctgttggttttacacgacaagaatctcaattggtaatcttgacactaaattatatatagggttttgtctaactttatgacaatcttgctacttactggatgttctttaggtgactcgggttcctcttcctcatcccttcttcttcctttgctaattggtttctcagcagaagtagagaattctgagaatgagtctgatggattcccgaggtagaaacttctttctctattaaacaaatgaaagtttatgttagaactctacaattagtactataaacacacacacacacacacgtgtaatatcccaagctaacctttgcttgatgagtttccccttgcagatgaaccatattttacagctatgaggtgcatgttgactcacatactctgctttcctagatgtgatagacattcccctgctttatcaaagagaaggttagagtcttttgctatatttttggtttacattagattgattcactattgatggattctcaagttatctttacctggaatagtgaggatcagctgctgctcccataacgaggttcgtgataatgttttgatagatgagttccacaatcccttcccccacatcatgtcctgagatcattgatgtatccacatctttttcattaacctgcatcaatatagatttctattaaataaaataagtcaacattatgttttccttttagctccatcaaccgaaaagagaactcacccctttgtttatgcagatatcacggtacttgtagaggctatttactgaagtattcagttctgaatcttggattgcatcgatctcactttgttcaagcctacttgctgaaaatgcacaaacaaaaacagagtaaaaattccaatcctaacatctgcattgattcaaggttagttcttagcatatgtgacataagtgcaattgcaatctccctggaacatcttatgtactttttaactcccactagaagaacagataaagcaaaggtcaaattaaaacatgatgtgtgacttaactacaaatagctagtaatagccgtatatgcccaaaaaacgaatttgttttggaagtaggtagggttgaaaccaaatttggttttaattgttaaaacaaactatatcatcaatcatctaatctaagacgtgtcagaattcaagtaaatataagaattattaaataaattgattatttcgtccgatcaacgtgacaagttatatataattgaatcgtccataaacaagctacttccccttatgaaagtatccccggcagccccaacaaaacaaaatttgcaaaagttaacgtagagaatgtaccaacaaaagaaaaagacttacaagaagtggtcaacgaaaatggaagatgaacatgaagaaggaaaatcttcttgacttgaagatttttcaaagcccataacaaagtttttttactttctcgaacatcttgattcactgcaacatatatggcgtcttccatggtttcttactctggctttctttcttttttttgtgagcaaaggtatggagttatggaactattagaaatgcatgatatatagtgggagagggacatcaaggtaataaatacagtatatctcttttcttatccctttgcaacaaaattgcaaggaggtttcggaccatttacgtgttattttctcaggtcaatggcttgtgagggtctcggtcatatattatttaattcgaccgagcagttgaactttacacttgtatattaagtttccgggaatactagtgttaattaattccttaacacttggacattaagtttctgagaatattgtcggaaattattggtttcgggagatgttttggtgtacacgtatacatcaagtttgtttttataaatgttgacttcactgcaggttttagttctaatagtatgattttaaaagataccactttttttattttttgtgtgtttggcaattagtatatgtaattaaaaaaaaggaatgtgaagatattaaaaagaaaacatactgtatttggttcttaacggtttgtgtgatgcattttttaatgttgtgttgcattcagtataaatcgttttcattgtcactttcatctagaaattattgggtttgcattcagtatgggccatttatacacagctaatgggctttatgggcctctaaaatcgtcccttccccgctatattcattgcacaagagcaaaaacttaaaacaaaaataaaaataatttcccacttttcgttcctctcagtcagtcgctctatctctggatcttttcaaaattcaaaattcggtttcagttctctcactctctctctctctatagcataaagttcattatcgtgaatagctgctgctgcgtcttcgtctactgggtagtgagatcttgggtgatgaagatgaatattaacaaagcctgcgatctgaaatctatttctgtctttcctcctaatttaaggtgccatctcgcttctctccgtatctctctctttcacaatttgatttgagattacactgcgatttccatcgtttagggtttttgttttgttccgaatctggtttgtgactggagacgagtgtcagtgatctgtatgtggacattgtttttgatctattaccaactaatttatcgcttcccaggagaatccattagggttttggctactgataatgtttactctttggaattagaaggagatcagcagaaccacaagcatctcagcagcttcgatctcaacagtcacagcagtccttctctcagggaccttcttcgtctcagcgtggttgtggtggtttttctcagatgactcagagttctatcgacgaactcctcattaacgatcaggtttgctacttagctatagatcgtctcttcttctgattatcgatttcatatttctgtgcttgcttttcctttttgcacagagatttagttctcaggaaagagatctctctttgaagaaggttagtagttgcttacctccaatcaatcataaacgagaagatagtcagttggtcgcttctagatcttcaagtggtctttcgagaagatggagttctgcttcaattggagagtctaagtgtaagtatgctctttctaaattcacaaattagcgtggggatatgttcctaatttgattcaacttttcttcatttgtcacctagtagctcagatcagtgaagagcttgagcaacggtttgggatgatggagacttctttgagcaggtttggaatgatgttggattcaattcagagtgacatcatgcaagccaatcgaggaactaaagaagtatttcttgaaagtgagttctatgattgtctcattttaaacatttcatatttgaaaatgccaaattcgctctcttctcaaagtatgtagcaaccacataggctagcaactgaacaggggttaggagagtgtattcccttggattctcatttgcttagccaaataggatttgttagcaggggccgtgtcaatctgatcttactcctttaggaatgtgatattgacaatagtaattcacagattgacattgtttgctccaatagatttatcagtttgtttgaagatcaattcacttgaccgtgttgatcacatcttgacaatagtaattcctccatactcattgtgaaggtctcaatagatacttagctggatttatagtttcttctgtttactgcagctgaacgcatacagcaaaagttgactctccaagacacttcacttcagcagctggtaaaatcacttcatttcctgtttctttctcgaccttgtgcaaatggtttaccttactatattgattaattgggaatcagagaaaggaacaagccgattctaaagctagtcttgatggaggtgttaaatttatattggaggaattcagcaaagatcccaatcaggagaagctacagaaaatcttacagatgctaacaactatcccagagcaagtagaaaccgctctgcagaaaatacaaagggaaatctgtcacacgttcaccagagagattcaggtaaaaatattagtgcttcaagaaaatctgtatgtagttatatctatctcagcagagctgtgtgtcatatcggattgcgataaatctttagacttgtctgcacatgtaatctttaattctcactaccaactctcttataggtcttggctagcttgaggacgcctgaaccaagggttcgggttccaacagcaccacaagtgaaggtttgtcctgctttccatgtctttgttctttaagctacatatttcagcaattaatgtagcctttgttaattatcaggctaaggaaaacctgcctgagcagcgtggtcaagcggccaaggtaactctaaattctcaaccttgtagaattataggacatgtaatgctttgattcccactaccaaatctcttataggttttgactagcttgaagatgcctgagccaagagttcaggttccagcagcaccacaagtgagagtctcttgcttttcatgtattttgctctttaagctgcaaatttcagcagttaatgtggctgtttgttaaacaataggctaaggaaaactttcctgagcagcgcggtccagtagccaaggtaactctcactctactgcagtgaatatccctctcctcataattccattttgcttactagctcagctgtcactaacacaagtgtaaaatcaattgcagagcaattccttttgtaatactacactgaaaaccaaacaaccacaatttccgagaaagtaggtcaaacattggtttgctacttctaccctttttttgatataccacagatagattatataaatgcttatcttgcattgacagtccaaatgacgcctcagccagagctgtaaaaccatatttatccccaaagatacaagtgggatgttggaagacggtgaaaccagaaaaaagcaatttcaagaaaagagcaacaaggaagccagtgaaatccgaaagcactcgtacgcaggtactgggttgcattttcgcattggtcagcgataataagaacaaatgttttaacttcatcaaaatctaaggaatgtgcaattcaattcatgcagtttgagcaatgcagtgttgtgatagactccgatgaagaagatattgatggaggtttttcatgcctgatcaacgagaacaccagaggtatgaaactttctaaagtcgaaacagtgaagagctcaaaattccatcttttggtagactaaagtaagaagatgttcatattctagattacaaagctgtgtattgttacttcaggaactaacttcgaatgggacgcagagaaggaaactgaaaggattctgaggacagcgaggaggacaaagaggaagttcggtaaccccataataattaactgaaattgaggtaacttagaagtaggaggagcgtagcctcctctgttttacatgtctatatctgaagcatgtttaagattatttaaaattgggatagattttcacagttgtgactctattggtacttttttattagaaggtatgtcaggttcatcaattagtaattgagaaaaaatccaacaaaaagttataagaaccacttgtttttttttttctaatgtaaaatcaaagaggtgttcattcaaatttggatgttacttttacaatttaatattcttaatacaaagaaacaaatcttaccatagttgttcaattaactaccaaaagtttgagttgtcttgaaatttttgtattgattttgaatagattactttctttttggaatttgaatagattacttaatgaattaatactggtactaaataattaaatattttcaaccataaatgataaatgcaagaaccaataatacgttcatttttggaagatgttaaataacagtagattgtgttcagatttgttctataaacaaaagcgatgatacaatgaccaatcaatctgttagtgaaaaatttcaccagacagaaataataatttcctctctttcttagtaaagagtctcatcgtcgaaaacttttggcttttaaatcttttgttgtcagtgtttgtaagagatctgagattctaaagtatatcagaactcgttggtcagttagtatatatctgaaatgccagtcgaaaaacatgtggaagaaaagcttcgctcaaatagaaaagagagaggctggatatctggtattttcagaaggaagaagagatcaccacaagaagaagaagttgataatgaaaataactcatctgaagattctcgtttgatgggagccaagaatttgcatttgtttctctctgagatcatgagaaaactgaaacatgcaatcagaaaggagaaaccggacaagagattgttagggaagaagaaaagctttgagaagagtttgtcaactaaagatcatttctttctcgagcgcatgacttcaatatctcaaaagagatttcatcaagaacataatgatccaaacttggcaacaagcaaacaggttcaaagaaatcacgaaaggattgtatggcttcccgagtattcgtctccttttagcagcccgggaagaatatggaaacagaattcaaccgtgcttttgaggtcttcttcatatgatttcatcaagtccgaaacaattgcaggtagtttatcttttctctcatttgagatttaaagtagttattgactatccaatgattctttgagactctgcagatgattcaataactttgaaagagataggaactgcttcatcaagtgaaggtagtagtagccctcttctatctaaaagcaatcagattgttgatgagatgtcaaaagttgcagcttatggtgcagagaatgaaggtgaattcttggaagaggcaagttcacttttgatttctatacaaatttttacatgaaaaaaacacagagaataactataaactaatttggttgcttttgtttcttctaacagacactgtctctcccctctgtgggctcaccatctcactatatatctaaaactgaggaatatgactttgttcttgaaccactattcataagtccagcaagaggtatgaaaagaaaggtccaatattactggagttagattttaacatgaactaacattgactcatcttaacacttgctcaggtgaagcaaagatacaacctttgtgtaaccaattgcaagaaaagaatcgtcacaaagaatcagtgtttaagtatgtaaaagcggtgttagaggcaatagactcaaactgggaagagctgtatctgaaaacagaaatctctgaccagcttctatatccggcattgatcagcaacataccattctatccaaatcagctttgtgttgaacatgagctcctcttcgactgcatcaatgaagttctcttcgaattctgcaggtttcctcaatgggtttcctttgctgaaaccaggacccaagtcttgccatatagtgttgaaagcattgttcccgaggttcaagaaaaggtttattgtcatctcttgccaatgcaactccgtcgatcgttggaagaaagagttagagaagatatggctaaacacaggagctggttagacattagatgtgaccttgagtgtattggctttgagactagcgaattgatattgaatgaattattggaacagctgatgcttgagcttgaagataatcacaaaaatggttaaattgcattaagatatgtaaagtaacggagatattaaaaaaattattatccaaatcaaaatgtcaaatgggtatgttgggaattttcgtctctttctaagcaaatcagaaggtctagttaattagttatcaaacatatttgggcctaatacgagattgtattactaagtcacatgggccatcgaagaagtcacattgagtgatttaaaaacgataaccatattgtgggggtagtttgggaatttcgtctgtccatattgatttcctttttcttctccccgctcccgttacaaagatttccatttttccatgtttatgaatatagcagtaagtagtaaccaaccccagagagacctaatcgatcgcaatttcctctctttctcatcagcaagccatcttcaatttcttttctctctttttacttagatcactcatgatctctattccacttttcaaatcaagtaatctatttgtgtgtgttcgatttatgaagaataacaacaaaatcgcttttcgttgtttgggggcatgacgatgacaagggaaggctcgccgacaaaaacactctctgatttcaaaaggtatttttttcttcgaattcaattttgaattgatgtcttaaattgcttcctgtaaggtggtgtctcttctccttatgtagtagatttgccatcatctcttctccggcttttcgccgttgttgttgatactctctgttttgtgtcgtaaacatcagagagacgatcacattccgctctcaccgctacatgtcgtcgaaactcaacaaagcccaataagaataaggaattccagcccatgaccataattgtctcacattcagcagacactacaattatacaagctattggccaggtctatttctatcctatattttcagttattaatttttcattttagctctaaaaattaatagattttcaatgtttttattcgttcagtaacttttttttcaaatttctataatatataattttatttatttaaaactatttttaaaattatatttttatattactactagttttttataagtgtttaatttttaaattttgtgtaaattaattggaaacaacatccaaacctttaagaggtgttctaggttcaatatgttttgcacataatttaaatttttaactcctatcttttttttgcttaaaaatacttttaaaattatatttttatattactactattaaactataagtttttttttataaatgttcaattttgaaattttatgtaaattatgtgaacattgtggattgaacccactttaaagttattagttacagtcaagtcttatgactaattatttaaacactggttttacgtacctaaacactgattctttccaatttcctctaaatattgttttctcagtcgcgtctacatgcttttgtttgttccgcatcgccttgtagtattgggccttgtatgggccactttaatgacgttagaaactggaatgaaggaaatacttctcaaaaaagaccttactaacaaagaaaattgagtcttgaaacaagggtttacgacaaagaaaattgagtcttgaaacatttctattaaagaatttttgtcacattatcttaatacagtagaaccttttataaattaatactctataaattaataacctctataaattaataaattcttccagtttcgaattgagaccaatgtaaaatgtgatacaaatcgataaattaataagataataatttttttgaaagtcctatgtaaatatatagtcccatcaatatcataaattaataattatataaatgtatcaactatatatatatatatattatatgtaaaaaaattctttaaaatatatttataattatgttttgcttaaattcatatttgttctttgtttaacttataatttttatattttactgtatcaaaatttttggtgttgttttttagatattattattatgttttacttgtaattggttttaaaaagatatttctataatgaaaaaaatcttatagaaatttttaaaaaattaccaaattaggaaaatctctctataaattagtatttattagtttatcgataaattaatacctttttaaattaataaaatttcacggtccaaacattattaatttatagaggttttactgtagtagtaagtaaacacaattgagtcttgaaacaagagtatacgaaaacaagaagctaaataaagatagtcaaagcaaggacttgaatcaaaatagtgaacaaaaaagtgtccgtttagtaaaggacttgaatcaaaatagtgaacaaataagaaaatttctaagtaacacatttctattaaagaatttgttttgtcagtatctatttgtttaaagatataaggatttgactactactacttaaattatttctaaagattatcgaaaacaatcttcatactcaaaatgtggtctttccttcggaaaatttgtttctcaacgaatgcaatcggtaacttctttaccatggttgaagaacgttatgaaagcctcttgacgacggtagaggatttccaaacaaggaatccggctgtactcctttgtgaaaacttcctctttttctttcttggacacgtgtcactatttctttcaggcctcagccattcttttcgttttgcggaacatccttactacttcagcctttatctgatcgctgccaacgttgtcttcgggtatttttttctacgtgcagccagacgtgataagaacgaaaccgacgacgacaatccctacgccatgcttcctgatttcccgaggaacccaccaccgccggcgctccatcaccattcgatgtccgcatggtttctatggggggttcgttccgttgcagtttatcttctgaagacgcactccggtgaatcggacctgttcgctacgggagcgcttctctttttccacgcgtactgcatcactctgcttaaactgaatgttagtgacttcggcgtttccggcgctttcatgtcgctcgcctcagcgttctccgagactttaatgaaaagtccacactttaaactcttgaactcattaatatgtttttatggtaattatttaagaaaatttttatagcaaaacaaactaaatatgtataaatgaaaataagaaaaaggaaaatgtaagttttgtctttatttgattacataacaaaacaagagaaagttataaaagttatttacaaatgggaatttaatgaaaaaaaccctcaactttggccagatccatttttaaaccctaaactatgtttttagtaaaacaaattctgaactaaaacctgttaataaacttaaccccatagtaattaaatattaatgggatattaatttccaaaaaaaaaacaacgagacatttgtatttagcgcaaaaaccacatgatgttctttaaaactgttttgaatttattacaaaaaaaaccttctaaatgattttgaattgcttaattagtttggattttagaagctgaaagaaagatacaacaacttaaaataatccaaggagtcatgcttaaataaatccaaccaacataactatcgaagctgttgcaacacaacaatatttgtcacaaaaaaaaaaacaatcgtttcagagggacaagatattctaaagtaaagacttgtcaaacattaactttgaagagaagattgtattggctgagtgatagggttctcttcatccattgttttctgttttttccttggtcgtccttgaggtttcttgggtggttttggcactgctttacgcttgcatgaacgtttgttgtgtccgacttgttgacagttgctgcaagtctaaatatgcaaagattaaattaaataatttgaaaaggaagatcttgtgaaacataattcattgttctctattttaccatttgaactttttcacgtgtataaggaactttttgaggtggacgatcttcagttggatcacggattctgtcattgttctttggtcgatttttggaaattaatatctcattaatatttaattactgtggggttaagtttattaacaggttttagttcagggtttgtttaactaaaaacatagttcaggatttaaaaatggatctggccaaagttgagggtttttttcattaaattccctttacaaattagagttgaaagagaaaagtgtttattctccgtatttctaaaaaaactacatactttacatgtaaaaagtgtatacttattatgtagtgaggtcggtgacccacgtgacaataaaattatttaagaagaaaatatagtatttctctcgttttggctactgattatgttttctctatcgaatttatgtttaaacaatgaaatctgaagtgcgtttgattgggcgcaatttctctcgttttggctactgattatgttttctgaatcgaatttgtgtatctgtgttgcgcgaatcttattttaaaaggagattagcagatccacaagcatctcagcagcttcgatctcaacagtcacagcagtcccttctctcagggaccttcttcgtctcagcgtggttgtggtggtttctctcagatgactcagagttctatcgaagatctcctcatcaacgatcaggtttgctacttaatctaaaagacttaagagttatcttctgtagatcgtctcttcttcttcttctgaagaaaagttaattaagctatgattgatttcatatttggtgctgacttaagacttaagagatgttatacgtttaatatgggtttacacataatttaaaattttagcacttgtttttagtatattaataaatatttaaaaatatacttttatttaactcttaacacttgttttaaaacataactaaatgttaaattctccccactaatattattcccggtatctaataatctatatacagcgttcgtctttcttacataaggaaaacaattcttaatatgattttacttcaatttgaatcttactaggtagaagaaattaaaagtaattatactcatcattcttctcctctcattgttttgtctacataaagaacatcatcaatccaagcaactatgttaaaagctaaaccttcaagaactcttgaataactctctaacacagcttttccaacatcctgcaaaccacaaaccataaattgttataatattcaataaaacatgattcaggtcactgtttgtttcttaattaccttgttgcaatgaatcttgcaaatatctaacgatgtctgagacaattctgggtaccgttgtttcaaacagaagagcaaagactctgctctctcagccaaaacatagttcttgtcacttctctctgtaattgacattaaatctttcaccatattccatgaagacttggaattgttaagacaagctttgcgtctccatgtgtacattgaagcttctactctatctgccagctgaagcgcttcatgttctgatacaatcttgagacgatctagaagtttttctggtgaaaaccgccctgaactcgtcatgtgtcgatagattgcatctcctgtgctcgcttttccgctctgcaaatgcataatattgtaagcaagaaaatgacaccaaaaatagaaaaccaaaacttcaaaatcatcttaagtgtggttacctttggaagagttgccatgtaagaatcaggaatatccatttcaccgagtatgctgctattgatggccatagcagctttatggatttgattagtgctctctcgcttgctcttaagttgtttccttgccttctctgataaaccttgtaatggaaccagaggaatcggtaaccaccatttctcttctttcctctgcacaatcactttcctgaatgatccagttgcggaacgcgttgacttcatcgacaagcttccttcttctgcataccaaaactctgtcttttgaaaactatccaatgcctcctgcagaaaacaaagagaatgacttttatgaggaatattaaccgagtcaatcttattgatgatagcttcttgttctggtgtagtaactaccataagcatggaatctagttttctgagtgcaggcagattgatgtagatatctgctcttggtctactctccatgacctgacaaaaaaaccgcaacagctatttttaaactattgatgtttatttcagtttttggacttatatctataagcaaatcttgtttacctcaacagtggctccattgcttagattctgtgactttgggataaactcgaaaatatagtcacacacagagagaaggcaattcatttctctcttccacgtcgtcttctgctctatctccaatggttctaatcttagattctgtccaaaaacagtagctgcaaatctcaaaatcaaaagacattaactacagtttctctagatggcttagtttgaaagtcacaaaactgtgaggcgtattagtgtttagttaccataaagattggttatagcgtttgagattgtcactgcggtgcaaacgcctttgccgcttcctgacatatcttccccaagcagaagcttcgagaatctttccttcatcgtctccagctctgctacgaaaccgataacagtttcatgattataatgacaaagaggaaatacagacacagagaaagagagagagacggagaaacacaaaacctggctctgaaatttcttggaccgcaaggtgctcatcagtctcaatctgattatgtttcaagtcgaagacagttggaaaatttgagctcgcagagttgttggattcggttaagacaggccaatcactaggagaagcctcagtgcagaaactgctggtttcatctatttggtctgaaaagcctcctccagaggtttcagaacatgttcgatgataagcaaaagaatctgtgctcattgttgagtaaaccggagtttcagatgctgaatgatcatttggatcgatgggaccaggtgactgatgatagcccacatcgtcgttttcttcgtgatttggcaaattctccatcttctcaatgttctgtttttgaaaattcctctgcttttgttgatctcttgttttaataaaagaaataaagcttagaactttcgttgtgatgtatcaggaaaactttagaatatgaatctaaatccgacaattagaatcgggaattatttttgattcttggatagtgaaattttgaggaccagatagcagtaaagtagaagaattgttttgtttttttttggccaaaagcagagaccgttaggcgtgccaaaatcaaaaagcaaaacaaaacataaagaaacgaaaagaaagaaatgaagtaatcacaacattatttatcgaaactttcacgaagatttattttattactataacaaacatttcgcttatgtcgatcaagatacatgaaagtctgaaacttgaaattttgaaaaacgatattaaggaagaagaaaaaagcaacggtctttattttatttacctttaaggctttaaagcttctgcaaatttgtctttgaatttgaaacgcttgaatcttttataacgtttataaaacactctcttttccgcattaagctttctacacaatttatcggtgcccggaaaaaacttgaacaatgtggaccgtccgatggggaaggatgactcatcctacggttgagattgtgaaatgttttttcaaacatttcaactaaaacaactaattgaagatacgaaatcataaaccccaaaggtacctagcgtgttacgcgagaaacacatagctacagagaatatctgtttccaaatgtacatatgctttaagattaagtaggaggaaaatccatcgtgacagtgagacccaatcgatcgagaaagcatccatgatttggagaaaattaatactgattcaaattgaaacatagactagaaacgaaaaataacagctttcaggagttggtaacaatttaattaaccactgagtgataatcgaacaagacgaaaacccgtccggagtggttactataacttgcatatagtaaccattggttttaaacaagcaaattaaacgaaaagaaaaataaatactgattcaaatagaaacattagactagaaacgaattaaaataacagctgactgagattctgttattatcgtctcttctcatgggccatttagaaatttacttagttcggatttattttaaggccttaaagccattaatgggccttgaggttgtaggatttgtttattgctttttgtttcatctcaagaattaaattacatcacaccaatattatttgtatatttcttcatttattaatactaattattattattttatttataacacgtgagagaaataaaaatcgaaccgagtccacgtattcttccataaaccggagctggtagttgatacaattgatttaccttgccaggtgggaggaaaccacattttctcacacctaatcatcatcatccaaccggcgatttcttccgactagccgaatccgccatgaacaccgagtcaggtaagcctataacgtgagattgaggaatgacgtagtgagattttcggcgaattccatgttgttgctgctctgtttttgtagttgtcgagttccttggaaacgtccctttactccagaaattaccgagctcttctctgaagaaaattgctcaagttgttgtgccgaaacgttacggtcggtccattctcaatttcggatttattcttctctctgatttcacgatataaaaaaattgagctgtgttgttctctattgtattattgaagggaaaggggattatgtggttcgtgaagatcaaacttgggatggatgttattttattttgcaaggagaggtttgtttctgagactagatatcgatgtatctatcttcgccattgttataatttgattcttgtttgcaggctcaggtttccggaccagacgaagaagataaccgttccgaattcctcttgaaacagtatgattacttcggcgttggtgagagatgaatgctttctgttcaaccttgggtttggtgatatatgctcagcttccttgtcttttttcttcctcctacaggtttatctgggaacgttcattcagcagacattgttgctatgtcccaggtatttgctgacttttgatatatattccaacgacaagcgtgtccaagtttcttccctcacttgtcattgcagcttacgtgtttggtgttgccgcgtgatcactgtcatttgcttgagactaattccatctggcaatcggatacgtcacttgacaaatgctctttagtggaacgcattttgcaactcgaccctttagaagtacgtacggacggtgttcttctttatcacatttctttctgcttctggcaactgaatctctttttctctgtgcttctttcttctagttgaatatcttcagggggatcacactacctgatgctcctatatttggaaaggtttttggaggacaatttgtcggacaggtatcgcattttctctaggaaggttacattattatgtctctgtaaaccttgctgatctgattcatgtgcatatatatattgcttgttaacagtgataaccgtaaccactactaagtcacttttaccaacattttacaggctcttgctgcggcgtcaaaaactgttgattttctcaaggtcgtccacagtttacactcctattttcttctcgttggagatattgacagtatgtacataatctcactggggcactttctagccaccaatgatgcctttcttccctattgaaacccaccctgctgttggattcatctgattatcatagtttgttgctcttgcttgcagtccccattatttatcaagttcaccgcatacgtgatgggaacaactttgccacccgaagagttgatgcagtacagaaaggaaatatcatattcatcttgctggcatcatttcaggtttcccattttattctttacaagatagcttatgaatctctacgtccacctgccaccaagagagaatagcctttcacaaaactgggaaaattgttttcttaaattttctcttttattactttcatagaaagaacaacaaggatttgagcaccaggagtcaaccatgccctctgtaccagatcctgatacggtaaatcatttctccagatttaagggttccaataaattgttgtgtgttttatttttcaccattatctgctacagcttctatcactggaggagttgcgtgaaagccgtataactgatcctcatttaccgaggtaagtggtagtgttttccaatgtatgataacttatatcaaaagctcaagttggaccaatcttccaattgtttctttctttcaggagttatcggaacaaagttgcaactagaaactttgttccatggcctatagagattcgattttgtgagcccagcaattcaacaaatcagacaaagtctcctccgaggttaacaactcgctgaaataaatcaattatatcatagagtactcttgagtgtatactcataaattccattaagtatttcttaaaaaaaaaatcaagaaactcacaatgccttcttgcagattgaactattggtttagagcaaagggaaggctttctgatgatcaagctttgcaccggtaagtaactccatctatgtatatcaaggtaaccatctaaaaattggtattattcatctggtaacaatcctttaaactttaaaggcaagaatgattgtagacaagtgaatcaatggtgttttagtatcccaagttgataggttgagacttgtaaaaggccaaactttcttaatagcattgaaaaactgacggtatattgaaattcaatttatcattcttagcaaactaatcatttggcaaagccatgttgatatgcagatgtgtcgttgcatttgcctcggatttaatattttgtggtgttggtttgaaccctcaccggagaaaaggggtgaaatccgccgcacttagcctggaccatgcgtaggtttttattttctcttggtgatgtatgagttttgtgtgtctgggttaaattttttaattacattgaggcattattccagtagggatcttccagataagtaactattacgagttactattcctcatttggtttgcaggatgtggtttcaccgacctctaagagccgacgagtggttgctctatgtggtagttttttctatccttgtttcttatgaacatttcagatcaaatgtttgttcagaataaatgaaaatgatttttggtatagagttgttttataaacttgtttgctgtaagaggttcacccacttacaacacaaaggatgctgcttgcagattgtgagtccaactgcgcatgagacccgtggttttgtgactggtcaaatgttcaacaggaaaggagaggtactctttctctattcttttgaaccctattatacatacatatctggaaatgataagtgataaaagaattccttttggtatgtgtttttgaatatgagaacaacagctggttgtatcattaacgcaagaggccctattaagagaggctagacctccaaaaccctccggcacgtcgaagctctgaatggctctcaacgtaagttaaataagatacattattacgagtacaaggcgacgaataaaaagatcaaaaaccaatctgggtgggtactaaataaaagattttattagacaaactcataatgtcaatgtagcacgctgtatgtacattgtttgattccggccttctcacctctatcatcatctatctataaattctcttgttttttttttttgttttaaaattctttctcacaagaacacctttagatcgattcgtgggccagaaaattatgggcccaagtatcaaattagttttcgtacgacccattttggatccgcgggggtatctttgatggaaccggtacacctgcttaaccggccggtttatagttttgtatccatttgtgatttgcgggtttctgttgccacctccccactctcctcgcttttgttggtcttggaaaaaccctgggattttgggtatctctgagcacgaattctacattctcatggctttcgaacacagaaatgaagacctaaattccttggattcggaagaagatctggagaaaatggagtcagaggtggagcaaatgtcgcgcaaggtttccgagtacaggaaaagcctaccgagtaatctgagcaattctgtgatttcttctcgtagatccaattttcccaacatcgattctttgggctttcgcacaactagcacaggttcgtacgtttctttgcttatatttagttagataccttccttctcctttggtttcagctggaattttagtctctttttctttctagatgatgtaataatagattgatcctctacattattcgtggatcattcttgtgaagaccaagttgtttagcagcagcagacttgccttttgattgtgatgtcgttttttgcatttaggtttgtgtcatgccatgcgtgtagaatattgtgatacttgctactataccctctggatgattatgttcatgagttattacgcttaattctgaggtgatgatacatatacaaggcttttccattacaataaatcatgtatttttgtggcttagaatcgacaagcatgagactatgtgatgatatgtttagctaagctgagagaaaatgattgtttagccaatttttgtttacagataccatgagataagtggccacattaggtgacactaagatttcatagcattgtaatatacacaagtctctagtgaactgctgttgtgataaccaactcatcagttattttgttccttgcaagtttggaagaacctctagtgtcaagagatggagcacatataggtggaatcgaacaagaatctcgagatagcctgattcagctcaaagaaagagtgtacgagaacattgccacagtgcctctagttgtagagagaatgcgagagagtaaagagagaatcgacaagtccatttctttcaatggaactactatgcacccggctttcacaaggcggaaagctagctaactgatcagtttctacttctccctattggctttaccactcaaagaaagctaatgcataggaggagatatggctggtatttctttctactatattagtatcaaccaacatctctcgcatttagaataagagtataccataacctctgttttgattgtgttctacattgaaacaggtctttctctgattttaatatggactcttatagaatcttgggctgattctacaccctgtatgtatatgtaagaatcacataatcagatggttgcacaattgtcaagaacacccaaatccaagcttgcgatttagcaatctcacccgtgtaagaaacttaaaaccataaaaccaattgatataagagcttttctagcaaaaacttaaaaatataattaacaccgtcgaaaatggtggaggctactagagcgagatataaactttatcaccgtttaatcgtgtgggattttgaaatgatatgaacctattgcaaaaagacaaaaaaaaaatataaacggaggaactaggcagtgggaccggagatccaccgaccggaaacgaagaatccatagtaagatagagcccaggggttcggtcgtatcggaccggtcggatttggattctaacgacaagtgagtggacccccagaaacgacagacgtaagcaatgacaacatcaaactcatcgccacgtcagcaacggagttctacttgcgaaacgtgtcccggcagcgtcatccacccacgtgtgttctagaagctcttctcctcctccgtatctcgacacgtgtccactccctctccttatataattgacttttctctcattctttccaagtttcaaaaacgccaagtttcagaggtagagagagagatactacaattgattaggataggatcaggatcatcctcaacaacctcctcctaattcctcctccattcatagtaacaataatattaagaaagagggtaaactatgtcagaattattacagttgcctccaggtttccgatttcaccctaccgatgaagagcttgtcatgcactatctctgccgcaaatgtgcctctcagtccatcgccgttccgatcatcgctgagatcgatctctacaaatacgatccatgggagcttcctggtgacatactagctctctttctctttaatctttgccggattctaaatctgagattgttctctgctgactcaaattcaattttacaggtttagccttgtatggtgagaaggaatggtacttcttctctcccagggacagaaaatatcccaacggttcgcgtcctaaccggtccgctggttctggttactggaaagctaccggagctgataaaccgatcggactacctaaaccggtcggaattaagaaagctcttgttttctacgccggcaaagctccaaagggagagaaaaccaattggatcatgcacgagtaccgtctcgccgacgttgaccggtccgttcgcaagaagaagaatagtctcagggtatggaatcagatctgattcacatctttgtttcaatctcttgttctgtttctggtaaattgaatcaacggtgttgatttttgcccagctggatgattgggttctctgccggatttacaacaaaaaaggagctaccgagaggcggggaccaccgcctccggttgtttacggcgacgaaatcatggaggagaagccgaaggtgacggagatggttatgcctccgccgccgcaacagacaagtgagttcgcgtatttcgacacgtcggattcggtgccgaagctgcatactacggattcgagttgctcggagcaggtggtgtcgccggagttcacgagcgaggttcagagcgagcccaagtggaaagattggtcggccgtaagtaatgacaataacaatacccttgattttgggtttaattacattgatgccaccgtggataacgcgtttggaggaggagggagtagtaatcagatgtttccgctacaggatatgttcatgtacatgcagaagccttactagaagggaattcctttcctgccgccgaaacgcaacgcaaaacgaccctcgtttttgcgtttatggcaacacgagaccgttttatatggtcaatgagtgtgccgattcggccattagatttctgttcagtcttcgtttattctatagaccgtccgatttcagatcatccctaatcggacggtggtcgttggatgtatcagtagtgtattactgtgttaggtagaagaaaatccacttgttcttaaattggcataaaagtcagaagctaatatttatatgtgccgcaatcaatttaatattttctgtctacttaggagtaatggatacaaactagcgtattggttctatatttatttatcagctttcacagttgatctgacttacatttattgtgaacatatctaacaagtgtagaggagtaatggatacaagctagagtacagtgtgttagcagaaacgctataagatgaagtctgatgttgagctacatgttactgtccattgtcacttgtcggacttctttgatggaaagatgaactctttcacggaatcttgcgctgaaagtatcctctgtctgatctgcatatgcaaaatgtcatagataatatagagttaattggctacaaaaccccatcgaaccataagaaattgatttggtgttcaagagtaaatgagtaatcagtactctcaacatagagagagtaacaacagactaaaaactcagcaaaacaaagtagtcactactcattcgttgaagatccaggcaaacgcaacaaagctgagcatagaagtcaggaacattcatatctcattcaaagttttctaagatcaaaattcaaccctagcaactaacaactaataaagagatctaaccaatatcaattgaaaccaagtgattgtaggctgtagcaaatatctgcgattcgaagcgatgatgatcgagaaggttgacggttcgatttattaaacacaaacaaaaaaaaaagagagagagagagagagagagagagagagagagagagagagagagagagagagagagagagagagagagagagagagagagagagagagagagagagagagagagagagagagagagaaactcacaggatcaagagcgttgggctctggaccgtaatcagcggttaagaggaagtacgatacaacagcagtcgccaccacactggttaccttcaccaccttttcaatttggggattcatcgatgttttcgttcccagaaagaacaattccggtgattttggtttttttcaagtgacacaatgatgatgttatacgtttttttattggtaaaacgacacacaatccgatttgtgtaagaaaattcatgccgttttcgttcacttcaaatatgggcccagaaaggcccaaacatctcatcaagtcctcacggcgtcgtttttaagatccccgctgcgttgatttatggcgatctctttcggcggttgaaaacctttgaaaattgaaaatggagaaatcgacctctccggcgactcgagtcaccgaacctcctcctgctgctacttcatctcttccagcacaagctcctccgcttcctacatctgcagatcagagatcagctgagttaccttcgcctgctcagccagctcagatgactgcgcctccgtcgacagttaccacagatccgtcgtccaggggaagaaagcgagcgctggaagcgaatcttcagatcgagagctccaactactacaagatgcgtctccttgtcaaagatcttcgccctcacgttctcgaggttggaccataattgtgataaaaacattcaaactctttgtttgggaaagggtttatacataacaacttggattttgtggtgtgctacaggttttacgaactccagacttgaggaactctaaggcagttatcgagattcaagagagtgagaagctcttacactctcttcttttgttatctcaattttcacttagctcaacaaaaggcccaacttgtttgattctgtgtcccttgaaatgatgatgtttgcagagatgaagcttatgcttcaactgtacgaagagatgattggagagtctcccaaacgtgagaaaacagctaagagcgactctttatccaacggaaaggcgactactactactactactactactagtgtactgagatcatctgaaactgagaagcacagctctgatggagatggcgacaaggtggttggagggtcggcatttggctggaacttcataacctctggagggccaggcactgaacctgtttattctggaatgtcaaaggaagaatacagaagctctcacccaattatgcaagtggaggcagagcttgagttgcccaacacattctaagctttgttagtggtgtttgtataatattattcactttggtatccgttcatcccaatgttttatatgtatcaactgaaacaatggattagcttctacccatgaagccttaattagtacacaatatgcttaacatctaaacctttttttttacacaatatgcttaatgagacagcacattacctttggattgttaatcaaagcttcttcatcttctaccaaaacccaaaataataagtctttagttctgtgtggaagctgaaatctttctggcttcaagaatggatccttcggtaagtgcgatttgagattccttctccattcccaggacagaaagagcagcagactggagatacaatgcaacataccaaacaggagaaatgccttgagccttcattgcatcatctaaagcttctttcgccatgttactcattaggtaactttgacttcgccgcaccaagactgttgcagagatcattcccaaatcaagaaactgggacaatttttatagacagggcatcatcaactatggaggaaggtcttgttacggattcaagtgtgaaagaaagacatacctgcgtgtaaaactcaatggcttcactaaagtcttttcttctaaatgcaatatcaccttttttcttcgagtttatagcttcttgcatctgttccgtccacataaacgaaagctgcgtttaaacatgtcacataaagaagccttcatgggatgggaagcataaggattctaactctaaagtggtaaccgtaaagcatgacgacttacatcttcatcgtctttgtaaccaattttttccaagatctcaaccatagacgtcaggtcttttcccgagcaagcctcagcaaaaggagacggaggtgacgcaaaagtaccactttgaggcagacccattagaacatgagacagaacctctgtgtctttctggagagatatcagtgcagtgaccaaagattttatgtttggtcgctcacgagcttcatactgaagacaacaagatgtcaggcgtactaactccgtaccatcactgtctgaaaattgtccctccaagcaggaatcggttagagtctgaagatttctgtctcgaatcaaatcaagggcctaaaacacacagcaaaaggctgagataattaataaagagaattcaagaaacgattaaagtagctaccatgggcacttacatggctaggaggaatatgctttccggtgagaagatcaagcagaagagtgccaaaactgtaaatcacactctctgctgtgattctccctgtatcaacacacacttaagtctcaagttgtagaaattgttggaaataatatgacctacgaggagggtgcaaatcaatttcaccagttcgtagatactcaggtggggtaaaagcaagatttgtgctataacttttcccatcccgactattcttcattaacccaaatgttgaaagtcttggattacattccttataaagattcataaacgcattagtgggggaatatagcataaaacaaaacatggtttcccggacaagagttgcgtttaagtaattacctcgtcaaataaaactctgtaagcattgagatcatgatatagcgtgtgtccattgttactacagtattcaagagcttctgaaatgtatagagcaacccttagtcgcatcgcccatttcattggctctgtatcccctggtagatgataaaagtggtaagcaaatcttaggagaaaatcttgaaagaaaatcgaaagacaattgatcaaaggcattttctttttacagtggaaaaggtgtttggctagtgtctcattaggcataaactcagccacaagtaacctctcgccgccttcacagcaataaccgagtaaattggccattcttttgctgcgtagctgaccaaccaatcttgcttcttcctggaaacagacatatccaaagttaatagatttgagaattggcaactagataaactgaaaggtacatgccataccaggaattggcgaggatcaggccaggcagttccagaaaagcgcttgatagcaatcttcatatgattctccaatttcccttgatagacaacatttggagctgtttctccatgttcagatacaacattctccaaagcaaaacaagaggtggcgatcttaagctgttctagtgagtattcacgaaaagaatgcacaccgtttacctcaccattctctttgttttctgtaatattgtaaaaaggggattacgatatcagccaaaagagggcttgtcgttgtagcaagagagaaaaacagagacgtcaccaacatctggagcttcaagagcagtagtcttgtgtgaacaacatgtaccaatctttgagctttgacctcccatggatgcgttgcttcaaattttcaattataaggtaactggggtaaatatgtctggaaacaaggagaaatttcccaatcttactacttacagagagatatcacgcagagatcaaaattgaaaatggggtacagaaataggtcgtaccttgtcaagtcgctaccattctagtgagccaactcggcggctagtgacagcgagaccagttactaatttggaccagatgaaagaaagaagcaaaacacagctgaactaggaagccttcttatctagtcatctagatacacatttgccgccggtattcgtatcgatgggattctatttctcgcactagctagtagctaaatccacgaagtttccatatataactttctcgatatcaataagaggctttaaaaaacactccagaagaagagagactgtattccgatgttgaagtagccaaagcagaccgggaagtgtcgctagacaaatagtataccgacagagtataaatattatggttggacttggagaaggcaaacaaagaatctaaagccgccacaaattttctcaatttaattgatcacgtacaaaaaatattggggttttatgtaagcgagtgtgtctgtctttcggtgggataagcccatgggcttatgttaggccctcattgaccaacaatttttttctgtttggtcctcaattaaccaaaacaatagaaaacgtttttgtgagtccaaaggttttattttctcgacatgacactgatacaattggttgcttattttgtccaaatccattctttggataatatgatgatcaatatctgcagtttatcatagcgcaaaacccgtttgaagagaaatgacgaaatcgaaggctaattattgtttttttcgctaaattctaattaaatccgcacccaatagattagcaaagtctacgaccaattgtgaggaaagaaaaagtcaaaaaaattgaaataaaaagaaagaaaacatgtacatcatgaaacctcaactccccaatgatgtccggaacaaacttcaccacatgtgcttgcatatacacatagatacatgtgtattatgcgaatgcgtgaataactgaatataatatagactcactctaatatatctaatgaagtaaatatggcaacaacgtgacagcatctaagtcttcttggttttaagacgtgaccagcctaacgacccaaccaaactacttgtctattcttcctcccaccctctaaaacccccctaccttctctactttcagatcatcaagccccaatttcaagcagagaacaatggtctcttcctacatttcatttttatcaatctggtattgccattcatgtaatgtattgtgatcatataagttaactgactatgcatgtgtttgactgtgcaggctaattcagcgtctgggatgcacgttagcgatgagtgcaagctcaagttcttggagttaaaagcaaagaggaactataggttcattgtgttcaaaattgatgagaaggctcagcaagttatgatagacaagcttgggaatccagaagaaacttacgaagatttcaccagatctattcccgaggatgagtgccgatatgctgtctatgactatgatttcaccacccctgagaactgccagaagagcaaaatctttttcatcgcatggtacaactccctgcccttgtatttttaatgatttgaaaaattagatgttataattgagacatcaacttgcttcaggtcacctgatacatcaagagtgaggagtaagatgttgtatgcaagctcaaaggacaggttcaagagggaattggatgggattcaagttgaattgcaagcaacagatcctagcgagatgagcctcgacatcatcaagggacgagtcaatctctgaatggaacttaccgcatcttaattcgtttcagtcaaaattcatattttctgctttcgttttcttgggtatttttcatttaacttctttactatttgtatcttctgtgattcaagatctcacctctttcttttttccttttcggtacgcaataatcatcccaatagataattactttgcttccctgaacaaagctggcaatttcaagcaacttgttgatgctaatgaactaatgatgcaaagaacatacgctaaaagagagagtaaataggatgacatacctcacgtctaatttatcagaaaatcctcgcaattcaagggttttcttagccaattgttgaatggatactttcctttaaaaatctttgacatcaaataatattccgtagctttgttctgcatacaattaaaacaaaaaagaaacgtaaatcatctcagaattaaccagagaacaatatcacaaaatcacaatcttgcagcatacatgtcaaaaactcactatgagatttatacactttagcatgttagttgttccagtggaagcatgttaaagctgcagaaaagaatcagcatcgcacacaccttcagttctcggtacgatttttttgacttggaagattcccttttgtgtccatgagtttctttcaagaatagctccagtaaccgctgtctagaaaaatatatgaatatgatatcaactacaaataatgaaggtcatgcttggataacaaggctcatccccttacttgcatatagatgattgagtagacggatacagagctcctttagctgatgtgccttgctttctaccggttgttccaagaataacttcgtgtaagccagaatagttccaacacaaggaatatctaagagccaacaaatagatcacaccaccttttaagaaacaaagaaaggacacacatgtcatgtgaggaagagtattgaaaactaacccgcatgttaaagtagcttgcgcagtttctgaatgctgaaactctgatggtggtactggagctacaaaaaacagtggctggaaaggaattagcacgatatatgctagtaactactgcaatttccatgatacattggtataaagcagctagtgaaccttgttcaaacggaaggaagtcagaagttcatccgataatgggaggatcctctcatacaaagatcttcgcaagtgatcagctaaagaaaaattgtcaggactgtgcagagattgtccaacggtgatggtagaaatatacacaggctggaggacttggtaaagcaatgcccctgaagtaagaacacacaaagagagaaaatcccaataagcaaatcttaaattacacaacaaattatctgtcaaaattcagggtacagaaaccttgaactccaagaacattccatcgagctatcttatccgaacagctaacagagagtgttgtttcaccgcgaccaggctttctttgcaccatatctgctacttgtgagccattacctgaaatagagacatccaaagtaaattgataccaacatgagcctaatccgctttctcccagcttctaaataagaggaaggcaagctgagagaaaactcttgcagcattacctttgttgctattactacctatctctggaacatcagaatgccgagacgagcaaatatcagaagcttgaactaacaatgagtcatctacttgtgttgatggaatctttttcagggcatacaagggtgaactagtagaagcataaccacctacatatgacaaacacgtcaatgccaagtatattcttgaaacagataaagaaacgtaatgaggcaaattgaaggtaaattacatggcaattgagaaatgtacaaatgcaagaggcacccagatttgagcttatatttgacttctccaggacagcttgaatctgctgactctagtattgagcttgtttcgctatcaattctctgacgcttggcttcattactcttacctgaagtcaattgcatccgctgaatctcggaatagaagaacctgatgagagctcttctggcgacaacttcggcatgagaatcgttcacaatgtccccacggggactcagcagcgacccactaacgcacttggtccccgtccctaacgctatcactttcgggtctgcacaaaatcctaattagctctaaatcgaaaaccaaaaataaagcaaagagtgacagagaccttgggaaggagaagagacgaggaaagcggagaggacggtgacttcacgtccctgaggttttcccttcttcgggagagacatgtaagccgaaataaccttctctgatactgtctttccccaatcctcctccattgctacgattcccacaaacaagtccgttgattcattcatgctactcaaaaaaagcagattcaaggacccgcatgaaaatagttataagtttagggatcgttttagtatatatactacaaaattattaaagtaatcaaaatcccaatgggataagcatctttaactcacttccgtcactcgcttccttcacgtctctctcccaaaattcaaattcctcaggcctaaccaatcctgtgatcgacgtcgtcaaatattcaaaagcagtccgtgatccattgcatgatcctcttcctgtgggattcttactctcatggctaacccagacgttaaagagattctctgcgattgtgtgataaacttggtaagaatttttcattttgttttttcttttccgttaaaattcaatccattgctggagatgatttgattgaatttcagagagagaatccgaagaggcgaagggagacggtttacgtcggatgtggtgctggattcggcggcgataggccactggcggctctcaaactgcttcagagagttgaagagcttaactatcttgtccttgagtgcttagccgaacgaactttggctgatcgatggctttctatggcatctggcggtctcggctacgaccctcgtggtatgtttttggactttggaggttgctaaaattacttttagggatgctttgtaacttcaaaatctgtttttcttcagtttcagagtggatgcagttgttgctacctttggctgtggagagaggcacttgtataatcactaacatgggtgcaagtaagtgcttacaatatataatggaggaggccttttttctctctgtttttcttttcatctgaattatcgtgtttttttccttgtagttgatccctctggggctcagaagaaagttctcgaggtagccggtgaattaggtctcaccatttccgtggctgtggctcatgaggtgcattttgaaacaggtaatggaacctactttcatccctgggagatattgtcagtgttatgggtatttaacactgtctgaagccataataagtgtgattaacccttgtctttcaatctttttaaggctcgggatcatcttttggcggtcaatattgctctgcaggggtatgattctggttttctaactcctgatcatatgtgtcaaatgtgatattatcagctagtgacaattattttgatagagtagaagatatgtagaacatagttatgtgtactgtgaaggactctgggttatatgttatatataaagagttttccatggattatttagctcctccatgtgatttgtgtggtttccctgaacttttatcctcctttgttgaagggtactagcacttatcttggagcagctcctattgttgaatgcctggagaagtaccaaccaaacgtgataattacttcaagagtggctgatgccgccttatttttagcaccaatggtgaggcgttcttgtcgtttcctgtttcgtgattaaatctgatcattcttgttgtgtcatcaggtctatgaactaggttggaattggaatgacttggagctgctagctcagggaactctcgctggccaccttctggagtgcggttgccagctcactggtggatacttcatgcatccaggtgcgttttacgcttattggctcagggaagatatgatgaactactgttttccattatcagtatggtcatttcgttcctcaatgttctttaggtgatcagtatagagacatggctttccctcttctccaggatttgtcacttccttatgcagagattggctatgatggtaaagtatgtgtatcaaaggttgaaggtagtggtggaattttaaataccagtacttgcgccgagcaacttctgtatgaaattgctgaccctagtgcctacattacacctgatgtggtaagttagctgtacaaaatctagaagaaataactgtaaaaacggcggaaatatttgatttgaaaaccttctttgcaggtaatcgatattcgaggtgtttctttccttcccctgtcagactgcaaagtacaatgcagtggagcaaaaccatcttctaacacttctgtgcctgagaaactcttgcggttaattccaaaggttgttatccatagaaaatgctggtggtatttgattgatgctaaagagcaacctatgtttggttctataattcgtattttctttgcaggagtgtggttggaaagggtggggagagatatcttatggaggaaatggttctatacaacgtgctaaagcttcagagtttctggtgcgcctatgattaatatgtctatgatgtagtagcattttttggccccatcgtcgcttgaaatgactccttatggtgccttaaattggagttcatttcttatcaagtgtatgtacgtattttacttgtgttttttccttctttctttcaggttcgatcttggatggaagaaaccattcctggtgttaaccattgtattctttcttatgtgattggggttgatagcttgaaggcgacaagcaacggcactgaatcttggcagtcatgtggagatattagattacgtatggatggtctttttaaactgaaggaacatgcggtccagttaacaaaagagtttactgctctatatacaaacggaccagctggtggtggtggaattaggtaatttcttcacgttgatgttcgctccatatatcaatccaatgctaattgtagctttacagtagtaccaaatcctgttgagttgagacatcttatgactagggacaatgtattgaaactagttatttgttatgagattcggggtggtctttttggtttgacaaaactgcttgtaaattatatgcagtaccggacacaagatggaaattgttcttgaaaagcgtttggtaggtcgtctccatcaaaaaatttaaactaatatagccttgcatcaatcaattttacggattctgatgttatatgtttggttatccaggtcagccgtgaatctgtaatgtggaaaactggacttcagcacaccaacacttcagagccagagacctctgaacatcattctccagagaaaatgccaaaggttagctcgagagttcttactaaactaattgtgatgactgatagataatggaaataaacatgacctgaattcaaattccttggtgaatcaatcctagtgtgttcgaacatcaaactaactctgatgactgatagatatgttttactatttgaaagctgaaaatgtgaaagaactctaacatgtgcatttgtattaacaccttgttattacttccatttgtagttacctaaggaaaatccaaagaaccttacaatgagaggctatcaatctggatttcatcactctcctgctccatctggccaaaagatcccactctactctgttgcacatagccgggctggcgataaaggaaacgacataaacttctcaataatcccgcattattccccagatgtcgagcgtctgaaactcataattactcctcaatgggtaaagcatgtgatgtcagttctgttatcaacctcttcgtttctggaattggatgcaaaaccaatggatgaaaatgtgtcagtagagatatatgacgttgaaggcattcatgctatgaatgttgtcgtacggaacatattagatggtggagtcaactgttccaggaggatcgaccgacacggaaagacaatctcagatctcatcttgtgtcaacaagttgtgttgtaagactactttaactttgcatatcagatttttctattcaaattctgtggtaatatgttaataaaaagggagacttgaactacactatagttctaaaagataatagaaaaagaaggaatcgacttagtggtgcttcactttcttttacttctatacattaaaattactttaatttacaactggatatcttgatagatacgcatacagataagtattaaaagcattgttttgattgagagagaatgatattatatatttgtgtaatgttaggttgttgttatattcttttgcaggatctgactgacatgggttgcaccacctcagagacagttggcttaaagtaacaatcccttattggattgaaattgtcagaaaccacaacccttcttttgctcaactccaatcactttgccacccaattttatctcattcattttgcaaaaaagatcaaagagagagagagagagagagagaaagaaaaaaaggaaaaaaccttcctccgttacaacctcacaattgcaacaaagtttcatataaaagaggacagaaatttcgcaggttcctccgttgtctgaggtaaaggtttccttctttaactaattcctcagatgacctcttgatttgttggaaaaaaaattaaaaaatctgtttcatacaggatcttggagaaggaaggaaacaacaacaaccaaaaaaaaaccaaaaaaaaaaaagataaaacaaaaaaaatgtctttcacaggaactctcgacaaatgcaatgtttgtgataagacagtctatgtggtggacatgttgtccattgaaggaatgccttaccacaagtcttgcttcaggtgtacccattgcaaaggaacccttcaggtgcactcattactcattttcttgttagatcttctatgatcatattatatcaacaatttatctatgtgttgatggcagatgagcaactattcctccatggacggagttttgtactgcaagactcattttgagcaactcttcaaggaatctggcaatttcagcaaaaactttcaaccaggttcgtattataaaatctctgacatcgaatctctctatctttcaaatcatcatgatcataacaagtctctttcttttctcaggaaaaactgagaagccagagctggtaggttcatcattacatgtccttgtatatgattagcgtgtcaatatttcattttctttcttttatgatcgactaataggatctgtgtactgatttaaacattacagactaggactcccagcaagatatcttccatcttctgtggaacacaagacaagtgtgccgcttgcgaaaaaactgtttaccctcttgaaaaggttagtggtatacgcatctgcaaatgttctcatggcctaaaataccaacgaactagtctcgtagagaaatttatttgctctagaatttgttttttgttttttcatttccgtagaatttttctgttcggataaaatcattactagatcaaatggaaataaaattttgattttggtttggtttagtatacttttggttcgatttgagaacgtgatgttggttggtccaagcaaatgtggaatcaattttggcttggttctaatcgggttatttggtaacagatacaaatggaaggagaatgcttccacaagacatgtttccggtgcgctcacggtgggtgtacgctgactcactcctcctacgcctccttagatagcgttctctattgccgacatcactttaaccaactcttcatggagaaaggaaactacgctcacgtcctccaagccgccaatcaccgtcgcacagcctcaggcaacactcttccaccggaacctaccgaagacgtcgccgtggaggccaaggaagagaatggcgtttcagagtcttgaatatctcttacatgagtgtttttgagtgaatgattgaatgaatgttgttgcgggggaaagatttgatttcatttgtaatgagttgtttccatatgaagacatgattttttttgttatttttttaattcattcgttatacatttattattacacacgaaaaaaaggcaagaattgatgttttttcactctatgtgtgctgcttatgatatgctttccgatggtgatgatgatattcgatgtaatatctgttcggttcaaagataccaaactacttatataccggatcaaaccaagtggttatcgggtgatgtgaatcattcattatttcgttaggtgagagagggtgttttcgtaaaagtatctaaaaacggccttagcaatgatgtctggttggcgagaaactcaaaaaggaggagacagagaaagttgtttgactgggaaaatttgaagagacgagccaaaattatctgtttgaaacgaacggaattgaagacgagagccactcctttccgtttccacctttcttccattcttactcaactttccatgattggttagcctctctatctgtccgtggcttgtcgttgattttttttatcttggtcgtctgaatgtgtggaatttcgttttgcttcacaggagttgtatataaggttcgaggaataaagtaaggctactttttttatttgatttccgatatggagtatgcgtctacttttcaaaggccgattctattccatggtggagatggtgcgagttactgctttccaaatcgattgataagtcctaaaggaatcagcattacatctggggattctaaagtgcattcgtgttttcgattgaggagaaatgtagcacaaagtggtacattgaatttgatgaatgcgtgtttctctggaaggttttatagtggtcatttgcattctacaaaatcaatacttggcaatggccaccaagccaaaagaatcccttttggatttaggttacgttgtcagggtcatgaatctctgggtaatgccgatagtaatgatcatcggatcggggaatcttccgaaagtagtgatgaaactgaagctacagatttgaaagatgcgagagtggaaaacgacactgatagtttggaggaactcaaggagttactacacaaggcaattaaagaattggaagttgctaggctcaatagtaccatgtttgaggaaaaggctcagagaatctcagaaagagccatagcactcaaggatgaagctgctactgcttggcttgacgtaaacaaaacccttgatgtcattcgagatactgtttatgaggaggctcttgctaaagaagctgttcaaacggctactatggccctgtctctggctgaagctaggcttcaggttatagtggaatcacttgaagctggtgcagggaatgatattccacatgtgtctgaagagactgaggaaacaatagatgttaatgataaagaagaagctcttttagctgccaaggatgatattaaagaatgccaagttaatttagataattgtgagtcccaactgagtgctttgctgagcaaaaaagacgagctgcaaaaggaagtggacaagttgaatgagttcgctgagacaatacagatcagttcgttgaaagccgaggaggatgttaccaatattatgaaattggctgaacaagctgtagcatttgagcttgaggctactcaacgcgttaatgatgcagagattgctttacagagagcagagaagtctctctccatttctcagaccccagaggaaactcagggccaactctcggatgaagaaacttctcaggaggatgcgatggtactttcaggtaacgttgaagatgttacccatcaggttgaaaaagaatcacctaaagatggagatctaccagtggtacagatcacagctgaacttgtgcctgatatagttggtcagaggaataaaaaactaactcagccttatgagtcaagcgatcatgagaatggaaagccaagtgtagagtcttctaaagtggttgaagcagattctgaaaagccaaagattaatgttcagacaaaaaaacaggaaactcaaaaagatctgccaaaggagggttcctctcttaattctcccaaggcatcgtttaataaatcctcccgtttcttttctgcatctttcttctcttctaatccagatgggaccgcgacagtgtttggtagtctggttggttctgtcaaacagcaatggcccaaactagttcttgggcttgctcttcttggagcagggtcagtttgaaaatttactcttctttgcttcgagttttgaagaatcatttttgtacagaaagttctctttttgttgatacgagcttcttattcgttccagactgacattatactccaatggagtaggggggaacaaccagttgcttcaacagccagatgttaccagcactagtacagaagatgtctcttcaagtacgaagccactgatccggcaagtgcagaaacttcccaagagaattaagaaactacttgagatgatccctcaccaggaggtatgaacaattgttcttgtttttttttttcttttacgaagtgcaaattgtatggaatgtactttgcaggctgaaactttctgcaattaataggtcaatgaggaagaagcttccctctttgactttttgtggttactgctagcaagcgtcatatttgtgcctctatttcagaaaattcctggaggtaagtagtatttttttttcttcttttgttaattctatccattgcattactatttgtttcccctttccctcaaactcctacaatttctatgttctcatcagtcaaaaacattttcagttctggtctcgcaatcatgttgcatagagatttatgtgccatcttgatggcttcatctgctgcaatgtataggcagccctgttcttgggtatttggcagctggaattctgattggtccgtatggtctttcgataatccgtaatgtgcacggaaccagggccatcgcagaatttggagtagttttcttgcttttcaacatcggccttgaggtattatttgatatatgtgtatgctacctttttgcttttgaactgtgtttggtagaagagccaatattttgtttatttctttgacagctatctgttgaaagactgagttccatgaagaaatatgtttttggattaggctcagctcaggtgatttaaagatccgtgtatctcattccacatcatttatcaactacaatgcctacatgcttgatgtttctttttccatctactttaatctctacttctattgctgtaatctaggttctggtgacggcagcagtagttggattgcttgcccattatgttgctggtcaggctggtccagcagcaatagtgattggaaatggcctggctctgtcgtccactgctgttgtccttcaggtaacatttttggttgtattcaaaaagggatcttaattaaaggaattttgtagcatccccttaattttttttttaatgcaattacgctaccagttggttgaacagaaacaatgcacttggttttcaggttctacaagaacgaggcgagagtacatctagacatggaagggcttcattttccgtcttgcttttccaggtttgttcaggaaaaagttaattatatacgacaactatgctgggcatttctcatcagtttgttattttttcttcacaggatctagctgtagttgttttactgattctcatcccacttatttcacctaattcatcgaaaggaggggtaagctcatctctagggttccttctttttcttgagtatggcttgcttttctgttcgataatgtctaagtaagaggtttgataacgtctttggtctcttaagaagaaacgttgtggtcatatgttgctattactggttgaaattgctggtatgccagatatttctatatactcaaggaagtctaggaaatatcagtggtcgcaaaatgctaagtttctactgctcttttcagattggatttcaagccattgctgaagctcttgggcttgctgcagtcaaagcagcagtggctattactgcaataattgctggtggccgtctagtgagtctcagatactttaacttttgagggttcagatatcaaaataagttaattattaccaaagttgttaggtgaaatgttttagatttgctacaaaaggaagaggcatgtttccatgaactaatcatgaaagttaactgtgctatcactgctacttccggtactcaatttatatgtttcaatggagttataatataaggaatttacactcttgttgcatatagcttcttcgaccaatctacaagcaaattgcagaaaatcgaaacgccgagatattctctgccaacacgcttctcgttattcttgggactagtttactgacagctagggtatgaccgtgaccttgttggcattgagtagtttactgacatgccagtacttcccgtctgctaatttttccagtttctataaatcaggctggactttccatggcattaggagcgtttttggctggtctactccttgcagagacagaattttcgttgcaagtagaatcagatattgctccatatcgtggtcttctgttgggactcttcttcatgacggtaatatgagtttcctaataactttttccatagtttatcatttctgaaaagaatgaggaactatagatggaaaaggaaaccttttacttgtgttctagtaagatcctgatattgttgtcaactgtaagcaaactaacaaaaagagttccattgatttcaggttggaatgtcaattgatccgaaattacttctctccaacttccctgtcatagtgggaactttgggactcttgatagtgggcaaaactatgttagtcgtgattatgggaaaattgttcggcatatcaataatatctgcaattcgggtcggtctactattggccccaggcggagagtttgcatttgttgctttcggagaagctgttaatcaggtttgttatcaacatggcgtatttttttgcttttttccaatgaggtatataatcagcaatgttgttttaatggtttacccttacacattacatatatttctgtcaactgtttttccctagaaggcctaatctgtggttcttccagggtataatgtctcctcagttatcttcgttgctattccttgtcgtgggaatctcaatggctatcacaccctggttagctgctggtggccagttaattgcatctcgttttgagttgcatgatgttcgaagtttattgcccgtcgagagtgaggtaggaatcttaatgattcaaatatagaatttacctctattaggcaataatttatcaatcatggaaccacttgtagctcacacattctctagttgaggaaatcattacaaggccgactgatgagaatttttcttgtctgattttatttgcagacagatgatttgcagggtcacataattatttgtggatttggtcgagttggtcaggtttatatattatctgaacttcttcagtttatgctcttatatgagaacctctctgtagacattcagcttcacatgatagctcgaagtttctaacctcgtgaccattttctgtttgttaattgtagataattgctcaacttctctcggaaagacttatcccatttgttgcccttgatgtcagcaggtaacataacattgcttattctttgcctctattgttgaagaatctttgtgggctaaagtggtttcaaatattttgttctcgtatcgaaccgaaaatgtggggactatcagtaacttccacactcaatgagataacatttcaacctatctgatttataagtcttttttcaagactctttgtattgcaccaaccagtttccatacctcttcctcgcatgctatgcttacctgaaaacctccttttttttacagtgatagagtgactatcgggcgttccttggatcttcctgtttatttcggagacgctggtagtaaagaggtaggtacacacaaaaacagaaaaatatagattacaccagcatgtgaatattacttcacttgtgtgaacaaacaggttctccacaaaattggagctgggagagcatgtgctgctgtggttgccttagacgcaccaggagcaaactacagatgtgtttgggctttgagcaagttttaccccaatgtcaaaacttttgtccgtgctcacgatgttgttcatggtcttaatctagaaaaagccggtgctactgcagtaatactcacagaccccttcactctcatctagactatagatatgctttgtcaatcgtacactaataatacctcgatcacaaaaacttttaggttgtcccggagactctggagcctagtctacagttggcagctgctgttcttgctcaggtaaaacataaatgtttccttatttagttgaagtagtaatcctaaacagtgtatgatcattttttgggttgaaacatgtcaggcaaaattaccgacatcggaaattgcaaacacgattaacgagttcagaacccgtcacttgtctgaactgaccgaggtgtgtttcattgtcgatatatccatctatatttatcagaatctggtttggtctgattgatgtgtattgggaaatggtgtaatgataatggcagctatgtgaagcaagcggaagctctctaggctatgggtactctaggacgagtaagcctaaacctcaaccatcggatgcatctggcgataaccagataatcgaaggaggcacagtcgtaatctgatgacgttctccattctggtgagaaaaagaagagtatttctcctttggtgttcttcttaaaccaccatcaccaacttgggttgcagtgcgtggtgaagtgatggatccatcagatgatgtgtagtgtgactaatatattcattatatgttcagtacatatctctcatttaagtctttgatctcagaacaattagatttgaacaaatgcgtagcaatcgattctcggcggcagtaataacaaatgaaactacatcccgttcttgtactacagatgtgaacaccttgcagttgttggtaaaagactgaatgggccttcttttctttgacttcgactgaatgggccttaaatacagttggttttatggtccaaacaagatttacgtaattgtttgaccatcgatcattacaaaacaaaatagataccaagccataaattaaaccaaagattgggttaatgtcatgttccagaagcgagaatgataaaggcatgtaatatgaaaaatgtccaaaacacaagtgatgccccaacggaaaaaaaaaaaaaaaagaataagaaggaaaactactgatacaggaaaagccccaatagacgatgagaaaaaaacagttgctctcttttggccatttctatttgtagcttcatcagagcaactgtttttttttttgttaataatatatattgatatatttgaaacgttatttaggtcaaaagagagatttttaacaaaggaaagggccaaaagagagatttttaacaagaataacgctgaccaaaaagggaccaccaaatcacatttgccgaaaccacaagtacctcaacattataaaaacatccaaacatatatccaatgtactgtgcatgtcattattatatttgaggtcaaatatttaactaatgttttttttatgattaacatgcgagtttacataaagagttagtatatgataaactgttggaaaaaaaaagtagtagggtacatgttacgagaaaactaaaaaaaaaaattattacattgtactgacatatatgttaagaaaaaaactatatgtagcataaacgaaggcaaacgaaaatacagctcgaaaaaactaaaaaattccgattttggtgttaaaagagccaccagaaccgataacacaatcagcggcgactaagtttctttaagagagaagcatgagggtttttgaagagagaaagggtttggtttttgtacagtatttgttcgtttattcgcagaaaaaaaaacaaaacatagcagtcatggattctctttcaacgcctccgtcgactatgcaaaattccaccagaggctctcaatccttatcgtccctgctaacgtcaaatctccctccaccgtcgtttcagccaccaacgacaaatctcagtctgaattctctttcaacgccttcgtcgactatgcaaaatctctcactatacctcgggattctctagctcttgcacacttacaccatccatgctaacgtcaaatctccctctgctgtctaatctctctccactgtcgtctcactcaccaacgacgaatctcagtctgaattccctttcaacgatgtcgactatgcaaactttcaccggagactctcagtccgtaccgtctctgctaacgttaaattttcctctgctgtctaatttagggcttttattgtgctctatccaatagtgccaattctagctatggttgggttctccgtgtgcgagtgtattgtttgtctactcttctggtttcatttaggacaaaatgatgttgcagagcctgaagaagacatgtgatttggtctacttccgaagattttgatgattataattactcctttttattatatgagaattatatgttatgcacttctttctattctatgagaattatatgttatgaactcaaattaattctatactatgttttagaaacgaatgtttgctggatatttcttattaatattatattttgtgttgaaaagtgtttctagatgcgcatacaaattagttgagtttgagtagcaaatatgtatgctgcttttttcctacatttttcggtttgttatgttttcacatattcccttgggaatcgatccaagcggaaagcctaaaaagaagaatgcatcaattcgtgttgatttgtgggcttaagcccaatagctttggaccctccacactgatagcattttcttagggctatcaatgctaaaggctaaaacgagactgataattaaataagttgcattaattaagcaagtgtcacgcttcttcttgttaaaacgtttagtctgtgactaaataaatatagtatgacactgaaaaaactcctttcactttttttaatatatactataatgatgatccattctcctttgatgctaatttggaaatattggtcttatcaaaaaatataagaaatatagcggtgtctaatcttccatgtgcacacacttgtttatccctatttttttgtatatacttttttagttaacagcatgaggcttgacttttctctgtcctttcaacaattcaatggcagacccaaggttcatgcttcttctctctctgtctaacctcggcttgaaatctttttcagattttgattgttcctttttctttttcctgtttgtctccagagttgcagttgttactggttccaacaaagggattgggtttgagatttgcaggcaactagctaacaatgggataactgtggttttaactgcgagagatgaaaacaagggtcttgctgctgtccaaaagctcaagactgagaatggtttttctgatcaagccatctcctttcaccctcttgatgtctccaacccagacaccatcgcttctcttgctgcttttgtcaagacccgcttcggcaaactcgatattctggcaagtttctcttttcttttcctattatcatcaatctagatctactaatcgtggctttaatcagtttcactgtcggatcttattaggtagctgcacttccctttccatgatcacatttcttaactaagatctgatcctttttagggattgagatacttcttcaacaacttcttgtctgttgcgactaggatacatacatgttaactagaaaggatataactcttaagcgagcattatctgaaaatagcaattctgttctgtctactcttttctgatttcttgtttggtatatatgtcttcaggttaataatgccggagttggaggggcgaatgttaatgttgatgttctcaaagctcagattgctgaggtacactttcctactttctcttacctttttgaaatatatactgcacaagcttgagaggtggtcttacatataaatgactactagtgcaggctggtgcgccaactgatatttccaagataatgagtgatacatatgagatagtcgaggagtgtgttaaaacaaactactacggcgttaagcgaatgtgcgaggccatgattcctctccttcaatcttctgattccccaagaatcgtcagcatcgcttccaccatgggaaagttagaggtaccatcttgatttcttctagtcaataaacttaaaggaagggatcgtttatgaaattgactctttggctggttaattctcgtattttggtgttgggtaaaggatgaatcttgtttgtgtgcagaatgtttcaaatgaatgggcaaaaggagtgctgagtgatgctgagaacctaacagaagagaaaatagatgaagtgatcaatgagtacctcaaggattacaaagaaggtgcattacaagtcaaaggttggccaacagtgatgtctggatacatactatcgaaagctgcagtgatcgcattgacacgagtattggctaagcgacacaaatcgttcatcatcaacagtgtttgtcctggtttcgtaaacacagaaatcaatttcaacactgggatcttgagcgttgaagaaggtgcagcgagtccagtgaaactggctttggtccctaatggagacccatctggtcttttctttgatcgcgccaatgtctccaacttttgattcttcaatcttatgtgttcggttgggtgttggtttgtatattttattatctcatcaatttagcagaaaataaagtgaactccaaactatatatcaaccaaacttggttatattataaagcttcttcaatatttatgtggttttgtattcccaaaataatgtatttttcctcttgaatcctatcggcgtgtttccccacctaggttcagatagtttgcctgtgcgcgttctcgtgacgcaaaattgttattgggctgctagaaggcccattttaagtgagtctgtgagactatataaatgccctaagtctcggaaaagaaaaaaagtgtagccgtaatttgtaattgatcataatgaagccggaaactaagagaagcaccgccacaacaagacggcggaccaatgacggtggttctccgttcaatttcagctctctcaagcaagcgatcgaggccatagatgctgcaaaggatacttcaatcaatctatcgtcgttgtctgtggcgttatccgccgcgagtcgtgagatgaagcaaaggaaggagaaatctcaccgtaggcgagaaaccaggaagagggacaagaagaagaagaagaagaaggatagtaacaacaatacgaagctagtgatcggaacaaagccggaaacggatgcagaattgcgaagatggttttcatacttcgacaaatcctttaaactatcattgccgagaaaggtgaaactaacatcgccgagaaagctcaacgatcataataaaaacttgaaggaagcgccgatttgtgagttgaatacagatttctcgatgaatcactgctctgaatcctttagatactaggaacaacgcttagcttcatttttttctttttcctactctatgaaaatgttaccattctatttgtcctctttattcaatgaaatgttggagatgatgagtgcatgcgttacgcgatcataaataataatgagaatcatatatatgcaaaatacgatcatggtgtcataatattacatataagaatcacatgggttccgagacaacgtgggggttcttcatttactagagagcttctccagcctttttttttgcactctctgttgtgttgactcataattcaaatttaacacctcgtaatgcttatctgttcttattattctacagagactgcaatgtttatcattatcttatataccatagaatctaacacaaacattaaagtagtcaagcaagacaaatttaacaccaagtaatagtaaaacagacacaaactatatatggaacatgtggacaatgaaactagttcgcctttccttgtttcccttttatcagaccatcttggacttgggatgtgacggcaatagctgcacaagcgagagattgatggcttttattcattggtttgatcccaagattgcaacacacacatatatatataagcaaactgttttcttgaaatgagatctggtaaatatacctgataacaagagataagtgatgaggcgaatccgaaagcacctgtgactcggggagtgactttctttggagccaattgaagcaatccgaaagcaacaactacatccatccctgctttgatcagagccaatgacctctcgtttgatttctctacttttgcacggtattgctcattctgcttaatgatgttatctcaaaaatcagcaaaatttcttcttcactccatagagaaagggaaccaatatcttgaggaaagcttgcgtacctggtgtttatccttgttccctatctctttttctaacttcttaattgatgctgacagcctaccaagctccccaacctaaacatgtcgaaattattacattatgcggtattgcatttgaaccagaagtaagagacaattcaatggcagtgaacagacctcaaccaaggatgtgcaaaccgaagaacccatccaacagaaaagtgatatacgtccaagaatctcagcacgttctttgtcctaaagcagcagattcataacataaacagagtaggctcagtttaacctgaaggaaataaagtctcctatattgcaggcttctcctaaccttgtaaatcccagtcctgccaagccacacaatttgatctaggaacaagaacgttgacagcaacgcgtttttagactgccaaaaccagaagatcaatcaatgtttggaaaagacaagctctaaaagcaagcaaagcaacaataacattacctttccgagcagaacaagcgggagtggagtccctttgggaacagggctaatgagagcatgaagatcatttacaaactgcacaacacaagaagaacaccatttaactagatttacaataaaaccactaagcataatcacagaaccatttttttcctttcggagtctgaattatataattccccataagatatgtattccagttgcaaatcttgtatctccataattcaagtgatataacccataaatcctataactgaggtataaccatggatctatacatctagttgcatttatcaactcccataatagaacaaatagtcttttccccttaaagtcaccaacttaaaacagatgttagctagctcatacccttaagactggtttcaggtaaaagtgtgatttgaagtttgataaaagatgaagaaaccaaccttgaagagacggaaaactttcctagccaagctggtgttcttgtcgacattttgagcagtgccaggttggccatcactcaagaacttggaaccatattgaatagctcgacaaatcttgtctctcgcctccgctttattcaaatacacaactaccagaccaagctcagctcttgtggtctcaagggtactcatcgtttaagctcacaagaaaccttttattttaacaccaaattaggtttgaggtaaccatatccaaaaaagtcaaaacaaagaaaacccgattttttattagtcagttcacaacaaaatctcatcttagtcgagcaaagatggtacttttgtaataagattttcagagtctaagaagaagccctaacatttctacccaaagtgataatcagctttgcaaacacatattcattgcaatttcataaggcaaacaaaggataaaagcaatttgagatccaagtaaatactttacctttacgaatattctcgtacgagctcggagaagataaacagagttcgcctgaaaaacagagtaagccttctccgataagagcaattaaggacatattgtccagactagtaaactccttgtgccaaatgaagccgccagacgaacgcaccgtgatctatttctgaccgttgattacgttgacccaacaaaattatcactaaatatctctatcgttcttttttttgtgtgtgtgtgtgtgtgtgttattattatgtttcctagcaacaagatagacctaaaaaaaaaaagttaaaatatagtgtgagataattattatctagtggcaaaattgttctattaagcacatcgattacgactttgtgaaataaacttgggagtttcacaactgatatttgtctccttaattaattttgataaacagaatcatattacgttcatgggcctgtattttttttgttaaggtcatgggcctgtatttaatagttggccacataaattatctgggaataaacctagttgactactgaaagatattcaacttcatgggcctgtttaatataaagcccatatttatcagcttcagagaaacagcccaaagaacactttttaattactagtaaagtttaactaacggttaataaacttacatcagacaatattacactttttatcttggctgcttcaatgtctccgcatcgttcgttttaccggtgaaagaagcttcttagctttcctctttcaagcttctcgagaagcttatcggcgcccattacttccatctccgacagcttcttcagataccctattgctccgtacgacaccatcattttcttactcttctcgcttcccgacatccccaacagccccgccacggcgtacttcttcgccgtgtttccagggtttgaatccaataacatcaccaaattcgtcagaacgctcttcccgtctttcttcagttcccgtcgaatccttccttccgctaccaatccagcgatcgcctgagccgccgcttctcgacatccgtttgacttcgattccagaagtttcacgatctccgggatgcaaccggattctcccactagccttttcgtctccggcgagcaagcgaaacggcaaatagccgatgctgctgcttgttgcgcgcctaaagatcctgacttgagtacatgcctcaatcgtggaagcaaattgagagccacccatatctctggattcaccgacgggattagatttctcagtgccgttaccgccggttgttgcggcaacggaccgtcgagataagccaagagactcggaactccgccttctgagacaatggcttcacgtagagcgtcgctcgctgcagtgagattctgcaaacactcggccatgtgttctcttgatcctaacaatatcccatggtttagaagatcgatcgagactctaattattccttcttccgcaagcaattgtctcagctctgaaactgctgacatgttcttcagagcagctgcagacgcagcttgtgacacagaatcccctgttttacagagatctataagcggtgtgattccgccgtgtcctgcgatttcccgtgcgttttcctctgtcatggacagtctctggatcgcaatcgcagctttttctttggtttcaagactccctgattcgattagtctcactaacggaggcaatacaccttcggagataagccattcgtcgcagtgtcctgattctgctaatacactgatcagattcaccgctttctctctgattcttgtcgaagttgctgttagcagctgaactaaagctgcaacgttggctcgtccgatcaaaggcataagaaccatcttttcatcttcttgcattgcaccaaggaggctttcgagagcattgtgttttgattccaagtgaccgatctgtagcctcgctagaagttcttttaaactggaaattttgggtgtttccgatgaacttgaaatgtaaagaggtaacgtagcttcaccgagaacgccggtcttgatcaaaaccccacagtctcttagattcaaatccagttttccggataaagaatctagatcgctctgcatacgcagcttcccttcatacttgtcagttgaacactgctctgcaagctctatcacttcactaagcgtcttagccacagattgcaactgctcgttgcagagcttgttcttggagaagcaagggtggcttgagaggtcagataaacaagctggtatctgttcgatcttcgagatgatcgtcttccatcttcctgtaaacttcttaaccgtttttgccttgctgaggacggatggtattagcgagttgacgcgcgatagccattcttctactgattgtttatccatgatcatctggttaacttgctgctcttctgccatggctccaaattttcccatggttcccaattctgccattgttcccattggacaaaaaagaaagaagaaaattcacagcttcttatgctatttgaacattcatcttctgtgtttttgaaaacctgaagagaaaaatcaaaactttacaaccttatatacatgtctgagccatgattttccaagtctatagggaaacaaaagaactttacctcatctgaaattgaattgtagccagatttctctagctcgatcaatgattggtcgactccaacctgcaatgaaagacgaagagaagaataaaaactttttgagcttttacatgtctagtgagaaacataaagaaaagccaaaaccttaccttgtctccttgttccttttaacttcacttggagaaaaaatatccaaaatgttccccagttctttatgttcctcactgacaaattcagatcacaaatgctgattaactgtacttggagattaataaagatcaaaactttatggaagacactagtgagtagaagacaaaaaaaaataagtatagatgaaaacaacatctaactaataatacacacaagccattgcttaagaaaagaaggaagtttccacacgacatatcatttcgagtggtttctagatgcatatccattaaatgcttctccctaatatatcatatgaataacacatcaaactcattaacagccacgtattatactcaccctccatgaacaatcattgtcaatgcaaaaaacttttcaaaactcgtaaaggttagtttcgtgattggtgaaagttttcttaaaaaggggaaacacaagctgtaattttctgatcagaatgattcaatgtgttgatagtaacagaaaggaaaaatctggctgcggataaaagttaacttgcagacttttctttgaagagaagtcaataggaagtctctgtctctctattcattagaccacaaacacaagttgtaacttgtaagcaccaatgtgaggaagttagatactgagtgatctaataaatattgaaattagcccaaaatttagtagtaatctttagtggatgatctaaagatagattttgtgtacagtttataccttcaatctagtagttgacttgagtgtgaaaatggttgcatccagccaaaatttgatctgtgaaattacgagagattcagtaagtatacacacgtagaggttaagcaagattttacagaattatgcagtatgatctttaggcgagtcactgagagaaacacactcaaaacaaaaataaacttgtgactatgaatctaattcaaaaacggaagatcggaaaggagatataggggaaagtattgatcttcataattaaacaaaagaatcacagaagaaaaatcactcaattgtctctgtcgactaaaaagcaattataagttagagatgacaactttagctttatttttctagtgaatacaaacatcaaccgtaaagaaccaaccttttaagattcagaatcttaaaataattttcatcttttgtttacgaaaatcaaaaagacaaaaaaaaaaaaaaaaaaaaaactgagggatcggaaatttgaactttttattctgaatcaaaaggaagtagaaaaattacagtgatacaagagaagataatttggatggaatactcacacttacccagaaaccaagtttgttgtgtaatgagaagagaaactaaagcggaggagctgttgacaaagctgctgagtgctgacttctctcttcctcaaactcaaactgttcctctcagaataaatatttgaaaattttcaaatatctcaacacgatttagagagagaaagggaatgagagagataactaggacagaggacaaaaactaaagacaacttcgatcaaatcccgattctttaatgataatagtatttttttttaaaatatccgtatttatgtattagatgatttactttctcgaaacagttgacaaaattatataaaaaaagaagaagatacaacagtgtcactgagattcgaaaaagaagccctacggtacgatctacgagttttctcttaaaagtgctaacttcccttgggatccgacggctgcgatccatcttactacattcaattttgaccgttagatcttgttttgtttcataacgttacactctgttactgacgtgtcttgttgtacgaccgtcgatccggttaaactcacaagatttctttttaccggcccattacgtggccactgtgccacgtgttgtgtagaattttgaatctgaatgaatactttatgagtttattttacactattgtgcttctactttagtgatattacaaaactgccaggcatagagagagcctgtgtgagtcgcgtgagctatctatgcctttggcccacttctttacgtccatttgctctatttaataaattcattaaattgtttcttttttctttctttttttctggaataggaataaactaaaactcttacctaatactataacaatataattatttgaacatgttgcttcacatgacaaatgattcattattctcgtcgtatttgaccacaacatttttaattatgttaacaagtaacaaccatgaggggatgcatgaattgaatatcctttaactggtggtgttatcggacaaacaataatttgaatttaatttggccatgtgatgtcttgtttacactactcatcgttattttaagatgggacattaaatgcgaaaatctactcttgtcttcctctctcacacaaacaaacccaaaggacactttattcattataaagataaacgaaaataaaaagtacacatgcaaatgtaaatgattagataaaggcatagatatattcataacctttcaaccttatgagttatcatgaaagaccatatacagtactataatacaaaaatatgttaactttttcgttgtcaacaaatcatgaatttgtaaattacttgttgacaagaatgggtttgtgcgtcttgaattgcaaaaaaaattgaagaccctctttagtttcattaaaagaaggcctaataattaccaatttcgagtagtcttattaaagcccaattaataaattaaaggcccaaaattaaaagcagtattttacatacacatcgtgagtctattcctccgacgaccaaaccgtgctcctcgctgtgactggtaataacacaaaatacctggagaaatagattatccatagaaagcgaaagcgaaagagagagagagagagtgtgtgtgtaagaatatggcaagtatagagcaagtagctgagctgatatcatcgctggagcaagcaactttaatggcacagcaaatcggaaccaccgttggacagaaccagttactccaaatttcctctctccgcatagcccaccaacgcctctctgccttcctagcctccataccaacggcggaagctgagaaatctttctcctccgtggagccgatgcaattaggagaagaagagaaaggagaggctgagcctgctgaagaggagagatactcggcgatagagaaggtggaggagaagatgagagagtgtttcattagaaacaagagactcaagcggccactgtctccctcgtcggctgtggtggagacttcggcgacggaagagaggagtggccgtgattatgggtttgattccgacccacatgccaccaagttgagagctttggatcttatctaccagtttcatgcttgattttataaattgtagatttccagtagagagattcttttgtgattgtaaagactatttgtcggtttggtattacaaaatcaacaatttacaaagatcatctcatagacagaaaaattctaacaataacaaaccagattgggactgtattctacttactccctgattcctgactgtatggatattggtcacattcgtctttcggcaatcaacagcttgcactgcaacgttgtatcttcctcgtcttgttgccgtcactgttctgttttcaggtggcttcgtataactctaaagccgacaaaacatggatactgatggtccttctcgttggtcttattctctggcgattacgttatgcaacttgacaaagtcatccaaggtaagctcttcaggccttgactgcagcaaggtagtagaacaaatatatatgactcaaggttacaagaatcgtttctctaagaagccggtttcaagataggaaattcctcttatggacttgtggtaattgatatgatcttagaacgagctaagattctcgtgtaaactgctgctacccaagacctcatataagacatgagagagattactcacagtggctggaagaccagcaactcctagtgctttttcgatatcaggagatgatgatatgtgctggagggactttctcaacattttcctcttcccattgaatgcagaattcacctgcttaggaattcgattcagatgttttcttgttaaaaatctaagaaatagtctgaagcaagttttagctaccaaagagaagaaatttttggtggaggaaacatcaggatagtccctcggatgcttcagcttgaatgttacgacagcagcatcaacctgtaaagaagcataatcatatttctgtaatggtat

SEQ ID NO: 982 - DNA, 45013 bp, Arabidopsis thaliana
gaattcacctgcttaggaattcgattcagatgttttcttgttaaaaatctaagaaatagtctgaagcaagttttagctaccaaagagaagaaatttttggtggaggaaacatcaggatagtccctcggatgcttcagcttgaatgttacgacagcagcatcaacctgtaaagaagcataatcatatttctgtaatggtatcaaaatttagttatgatgaaagtttgaagaatcaaaaccttgggctgagggaagaagttttccctaggaactctgaaattgtattccggttcttgaaacaaaggagcaaaactacattgacgaattgcaatacatataaagagttaaaatgtcaataatggaacaagtacgtaccagaatagaagttgatcaaaatgttgatgggacggtattcagatgttcgcagtgctggttcaaccaatcgcaatgctgcctcgtcctaagattagccaaatgttttttgtcacaattgaatatataagcatttgggatcataatactctaaaaacaagtaatgaatggttaacctggagtaagagaacaacttttgagaagatatcacccataggaagtagaagcttcacaacatcagtacttatattgaaaggtaaattggaaacaacctgcattaacatacaattccattgtgtaaataatgaattgagaaagatgtggttcctggtgctgagttagtaataaaatgtaccaaaagagaaactagagtgacctttgcaagagcagaatctggatgtgataaccttctagtctctaaaatggagagcatgtgagaacggatgtgacacttgacaaaatcctcttgcaaaaccttgaacttgtcagaaccagcaaatcgttcgctcaccaaatcaaccatatgaggatcctaaaagatgaagttgcaaaatcagaatcgaccattttgctatacaaaacaaagggtgcttgaattgatatagcaagcaaaccttttcgatggcaagaactgtagcacctaaattgataaggacattggttaaagaaccagtcccaggaccaatctctaatacaaaatctccttctttcacatcagccgcagaggctagctggtcgttgatgtccgaattcaacatgtaatgctgtgacagacaattcaaaccattctctacttaatgggtgttcgaccatttgtctcaaacaaagctgaggattttaagctatgtggtctacgagtggattgtgagagaacctggccgagggactttctgggaaaccgaccacgagaattgagtgatttgagggttgagtggtaatcatctgggctgctcttgccgcatgacaccttcacggtcctccgtcgtgataacgcggcagatatttcccccaacagaagctttgacggcgaattgtctccgcatgtccatgacggcgacagagagttgcagttgatggtggctgatgttattaccgcattcatcatttccgataagaccaataaacttcttctgctctctctactaatggaatcagtttttgttttagaataacagtaacgttatattacgtatctctatagataatgccacaaggtgctgtggtgtagtggttatcacgtttgccttacacgcaaaaggtctccagttcgatcctgggcagcaccaattgtgttttgcaattttttaataagaaaaatgcaaacttccttttttcttttttatatacagaccaaaaaattggtatgatttactcaagaatgattgttctatccaaacaagagacgacgcctgaccgactttgtaaggttactactactagtagaagttgcctgtctcttcttttccgcagaagcttttgaactcccgcctgtctctatactttgacctgctgctgctttcttcgctgaacggtagaaatcggtaatgcttctttgtacacccattgttgttgctcttggtgttgctgtttcttcttcagaaacattcttctttttcgactctctcagtttctgagagttttaacaaacataaacagtcaaggctaagggaagaaaaggcatctcatagagatagcgagagactgagagatccaatgtattaccttctcatgtagaaaatgctctgtttcatcagggaaagcagactgaacaagtcctatgcattcatcagttagcaagaagcagtcaccattatcattttgcacctgaggttcatttaaaccatccaacggatcaacagactcttcttcttcttccaatacaacaattgattcttctggctcgctgtgactatgactataaccacttgtagatttgggttttctccaccttattacaaaggactgatgcccatatctagtttttatgcacttgattgaatgaaattcgtattgatcacacaacaaagcgtatcctgtgttgtttcttgccttttctctcagataaatggtcgacagcatcggaagcaacatttttctaacataagatgggtcccagtgcagtttgaaaaccatgagatccactagcattccagtatcaggagttccccaagacattgacgatccatctcctgcttcagaggtgcataaacattaggattcagaacaatgatcatgcaatacggacacgaagtcataaagtcagtgcaaacctgtcatcaaaccatcggatagataaagttcaataatctttctgttgggaaactctggcgctagagcaatcttatcgcagactttgatccaccaatcattggttttcttttgttcccttaaatctcgatccttggaacaaaaggagcattcacatctaaaccctaatggttttttaatgcaaccactatcacaaccgcagtgctcacaagaggacttaaaatgagttctcttgctgcccaggtgtccacaacgggaacagtgaggagatctttttttcatctctgagcggaattcttcaccatcatccccggatttgattccaccaggaactgcaggttgcaacccatttccaatgtcctgtagtctgcacgaaaatatatatcccaacacattcaagaaaatgacaagtcaccaaaaagcagagacaaaaagcttatggattataacctttcaagtacttggtcttcagaaaactcacgaacaatgcgcagtgctttatccacaccaatcccaagaacaccgcctgaatcataatcgtttcccaccaatagagaaatagcaatcaagtgtttccgcttcaaaccgaggccagactcgatatgtgacatatggtagcattcaaaaggttcctgcacacaaggaaattaagatggtaaagagacgataagtgagtcagggtaatactcagttacaaatgaatacttactcttgaattaggcttgatgtctttgatcacgcacatagcaccaaaaaggaaagcatcactatcaggagtaatgcaagcatccacaaaaccttggctgtttaactgtgcacagagagcttcagcctcaccattagctttcagcaccggaataccgagcaattcgagtagctcctagagaaccaaaaaaagtcataagaaaacaatgtgaaacaaaacaagcataaaggtttgaagggaaagccatcttaccacacattccctaacccattcagaaaacagcttgtttctctcaaccgagacaccatctttaatcacaggtagattacaagtatcaattccagaagaacggaaaaacctggagattctcgcctgagatttcaaaggtgatggtgttccatcaaccacaaaaaccgggtacgctccaaactgcaaaaccctaaaccgcattacaatcatctccatagaaaaaaatcaagatttttcaatcaagcgaaaacctaaaaaattcaaaaaaacccgtaatccacagaaaaaaggaacttttttagccaatgccaaaaaaggattaaaggagacgaaattgggaaattcagtagaagcataacaagagagaagaagcgcgcagcaataaaaaaaaaaaaaatgggacctttgagaagaggttgatagtacggaagaaagtgagtcggaggtgaggtttaaggacgaaacccttaacagcggtttcatgctgaacgatccagaaggagagatcaacagcgactcgtttgtttctgagaaaatcaaagccttgttgctgagcatatggtctcagcaaatcccagaaattgcctcccacacccattcaatcaaaatgccgtaatagcctagcggagcggagcggaagatcacaaaccgaaaagcctaaaccagcaaaaggcgaattaaaagaaaaggaagccgaaggatagaatcaatttctgaccgttatgcgagtcttgttggactcgcttgtgttgtgcctatctatttatggcatcgtcacatcacccgccacggttatgggcccaacaattagcccggatgatatctctgtagcccattaagtctattaagaaaaaataaaataaaaaactatttatacagatcgcccaccgtggggctcgaacccacgaccacaaggttaagagccttgcgctctaccaactgagctagacgggctttgttggttaagtattactctattcaattgtctagtagaaaaccagaaaagcattatccaaaaatgtgcaagtatggaccttaattggtgtctcgctgaggcctgcgggtaaaatagtgaaacacacgataaaccatttctagactgtagttatccttttttaaaagggtattgaattaaatgagaagatacgatgaatatctccgaatttcataggagtgaggacatcaaagaaaaaaaaaaaaaaatgtaagtcgtcggcttacgtgttcatacttggcttgaaagccagtacacaaagggattatgagtgaagtgtgaacaagcaatgatttgaatcataggaaatatagaagaaaacttggttatatggtatgagtaatatattaagtcacgccccaattattgttgcgtttgtcccctccctctccatttaatgtccacctacccctaccggcggtggaagctgcctgcattcctcgtccttcttctaaactactacccgttttcttttctttttttcctatttaaaactttcacggcttttttttctttttctttgtatagagtaaagattattgcaaaattcccacgtcttagatgaaaatttgcacctcataagactagacttgttcattacgtgttccatattctggtaggcaaatatttttatcattcaaactcttctataagtgatattaataaaaagcttgtatttgtttgtttttattggtaaatatataaatgaacccacgtcccctaaaggctaaagcaacattcagtaacagacggtcccgcacaagaacctcacaacagcgacagttacaaaacatatcatatatttcatttaaccttttcgtatatattactctttctagtcacattttcctcagctcccactgctcacagtattcacacgtcacatatatatatcttttatgtgttatatacccacagagaccagtcctaagaatcacatgtagatgcatcgctttcttttaatgctcttatttccctttagcgacaaccgtcccatgatgttcttcagatcattcatcgttttcttctttcttatctttttcgcatcaaatgtttcttcccgtaaacaaacctacgtgatccacactgtcacaaccagtaccaaacacatcgtaacttcactttttaattcactccaaacagagaatatcaacgacgatgatttttctctcccggagattcactatatttacgagaatgccatgtctggtttctccgcgactctcaccgacgaccagcttgatacggtgaagaacacaaaagggtttatctctgcttatccagacgagctcttatctctacacacgacatattctcacgagtttcttggtctcgaattcgggatcggtctttggaacgagacgagcctatcttcggacgtcatcatcggccttgtggacactgggatctccccggagcacgtgagcttccgagacacgcacatgactcctgtaccgtctagatggagaggttcgtgcgatgaaggcacaaacttctcatcttcggagtgtaacaagaagatcattggagctagcgcattttacaaaggctacgaatcaatcgttggaaaaatcaatgaaaccactgatttcaggttagacggttgaaatataaatgagccctctgttttttaacttcttttgatctcacattgtttagtctccaaatgttaatgggaataacgtgaagaataacttccaacttttaccaaaaaaaaacttctaccatatatattatgcaaatataactcgtataaacacataagatataattaaaaacgttgggtagctccataacgttgatccgaacatcaaattaccttcctcaaaaataattgatcaaaatgaaaatgcttttgatgacttttaactaaatattttgtttgttaattcaagatgttctcattaaaagttattactaatggagagcccttactaatggttccataggtcgactcgagacgcacaaggacatgggacgcatacagcctcgactgctgccggagacattgtccccaaagcgaattatttcgggcaagctaaaggtttagcttcagggatgaggtttacttcgaggatcgctgcttacaaagcttgttgggctctaggatgtgccagcaccgacgtcatagcagccattgaccgagccattttagacggtgtagatgtgatttcactctcgctaggtggatcatcacgcccgttttacgtggatcctatcgcgatagccgggttcggagcgatgcagaagaacattttcgtgtcttgctctgcgggtaattcaggaccaactgcatccacagtgagtaatggagctccgtggttgatgactgtcgctgccagttatacggataggacgtttccggcgattgtccggatcgggaaccgtaaaagcttggtcggatcatccttgtataaaggaaaaagcttaaagaatctgcctttggcgtttaacagaacagctggagaagaaagcggagccgtgttctgtatccgggactcgctcaagagagaactcgtcgagggtaaaatcgtcatttgcttaagaggagccagcggcagaacggccaaaggagaagaggtgaaacggagcggaggagcagcgatgcttcttgtgagcacagaggcggaaggagaggagcttcttgctgatcctcacgttttaccggccgtttcacttggattttccgacggtaaaaccttactgaattacctcgccggagcagcaaacgccaccgcctccgttcgattcagaggaaccgcgtatggtgcaaccgccccgatggtagccgcgttctcatccagaggacctagcgtcgcgggaccggaaatagctaaaccggacattgcggctcccggtctgaacatcctcgccggatggtcaccgttcagcagccctagcctcctcagatccgatccaagacgcgtccaattcaatatcatctcgggaacctccatggcttgtcctcacatcagcggaatcgccgctctaatcaagtccgttcacggggactggtcaccggcgatgatcaaatcagcaatcatgacgacggcgaggatcactgacaataggaaccgaccgatcggagatagaggcgccgcgggagctgaatcggcggccacagcgtttgcgtttggagcgggaaacgtggatcccacgcgagcggtagatcccgggctggtatacgatacctccaccgtcgattatctcaactacttgtgcagcttgaactacacgagtgagagaatactcttgttctccggcactaactacacgtgtgctagtaacgccgtcgttttgagtcccggtgatttgaactatccctcgttcgcggtcaacctcgttaatggcgcgaatttgaaaacggtgagatataagaggactgtgactaacgttgggtcaccgacttgtgagtatatggtgcacgttgaggaaccaaaaggtgtgaaggtgagagttgaaccaaaggtgctcaagttccagaaggccagagagaggttgagttatacggtgacgtatgatgcagaagcttcgagaaattcgtcttcgtcttcctttggagttttggtttggatatgtgacaaatacaacgtcagaagcccaatcgccgtgacgtgggaataaatttcgcatctattgattgccattttcatatttattatataccaaagaaacttattgaacaaaagcttaccctaaacttgtaagaatttgtcaataaatcaaaacatctcttatttactataatttttttacatgaattttccttctctgttgcaagaccagtctacagtatataaaaagctgttacaagagatcatagcattcgcttgtcacagatacccttcaacttaatatataaaaagctgattaagtcgtaaaacaacgatttcttggtagatatgagtctatgtagtcatgattattacaaatataaaaacaaatccaatgcataacaataaaacaacgcaaaagaagattctgcttgatcttctttcctgtcctataaagagttgttgctagatgaagaactagagagaaaaagattcagttttaattttccacctataaattgttcaaaacataaacaacaataaacccaaatgacaacgcagatccagaagacccccatgtagaaagcaagtgagttccaagaatatggcgaggaaagaaacttacaattaaagggaagaacagagccttatctttagccactcttgacccgttcgagttcttcttcagctgtttttaactgcaaacgcaatgtgtgtactttcctctccagctcctctacattgctcctgctagtggtaggatggtacggcgtcaagaacttatgtgaaaacgcctttaaggcttcaacccctgtcacctgtgatccaaacatccacaacaagtgtaaatctcaggatgtatattatataaggctttagtttcattttcgtcttgatcatgttccttctcatctatattgaatgtcatgcgttcttacctcttccggaagcagaggaagctttgtgatattaaagtcatcgtatagcatataaaactgatcaagatacttctgttgcatccgcatccttgctctgagcaacttggactccacatctacagaagacaagtgtagataattcgtcaaatttgtatgtaaaacaagttcaaaacgagaagatagacacgacagcaaataaataggcaccttcgtcgtcgtatagtacttggttgatgataatgttatgcgtgtcaatctcaaacttggcgagttcctgaacaagtctctctgtttcatagagagacaagaactcggggatgcagacacaaacgaacgtagtcatatcctacgtaatggagccaaatgtgtcaatttcttatcttaaaatgcagagtttgttagatatgtatcagaattttcactaatgcaaatgaatgctgtcaaaccgtatgctacagaacaatgtgaagaatctaaaactaaacttcacgaacagagttaagaaaacagtcaatgagtactgaaaatagcaaagaacttaaacaattgaaaaaatgttaccgggtctttgaattgccgatttacttgctcaatcacatctttcaagccctcaagtcttcccagcaaagcatcctctccgaactcatcctccatgccaaacatacggctcatctgcattaccaatcagttccatgaaaaatcagccaaagaagaaaccaaagagcaatatctgttgccaagcaaactgaatttgacaagcttaaagacatgcctgagtcatcaagccaccaaatctactcttcaatgacatcaacttcgaaagtcccttttctagtgtggccggaaactgtaacaggcggagagtatgtccagtaggagcagtgtcaaacacaatagtagcataatccattgtttgcaccaacctaaggaaacataaacatatcaaaatttgactgtgataatacatggataaaggcagatgattactagaagaactaaatggctatttacttcaacatctcagcaaaactcatagcctcatcgattccaggaatcgcatttgccaaatcagagaataaaccatccatcccgtctgtaccagccatgtcatcagtttcaacggtaggatctacctcctgagaaaagcaaacaagattcactcactatcaagagggaaggagtgtgaatcgtaaccatttgcttatagtatgtgtatatatatacatatacacacagacacaactaagagcttcaagcttagaagagtagccataaagtcatcatcaagcctgtctattagaggcgacccagaaccacaaaaaacaacttttttttttttttttgaatttggcataactagccatgaattttaactacaatagacaaaaattcgatttgatttggggacatcaaatcttcttcacaatccccttccgtatcaagaatacaaattggcgtccaaattccaaacctaatccccaaaatcagagtgggcatatgataagaaaggcacaaatcaaccgtatttatgcaagtactaaatctgacttcaaaatcaaaattgatccatcaatctgcggtttgaaattcgtgaatcagagaaccctaattcccaatgagattaaaatccaggagcgaaactaccaaattccctctaaaatctagcacgatctagaacaaaatcggagaaagcttaccatggcaaagagattagagaaaccttgaaccaaagtgggagatttagtgaagcgttgctgaaaggcatcactaagattgtgagcaggatcggtggagatgatgagaacggaggatcgaacactggcgagacaaattgcgagaattgaactgcatgtcgtcttcccaacacctcctttacctccgacgaaaacccatttaagagactcttggtccagaatgttctgtactgtcgcctccggcaaatccgccgccattgctaattccttgctcgtctctcttccactagtctcaatctaaagagctccttgttagatatttggcgtacggaagagtttaactgcggcgagagacttttaacgccgcccggttcaatattttggttctcggttttgggatatcacagcagtcttggtttgatttttttggttatcgtttttcacttgttcaatttttctttttttgttaaaaatttaaatttggtgtgtttaagttcataaacgctaaataagcccatacaaaagcccacatagatgaagccattacgacagcgtattgtgagttacgattgaaaacccctctctactcggttaaacccgtcgccggcatattgatcttcgccggaggatatggcgatttcagaagaagaagccaaactcgaaaggttcctagattggcttcaggttagatccggattaagtgttgtttttcagtcctgatctgctgctctatatcatggcattttgtgtttcgatctaatttcattcaggtgaatggaggtgaattaagaggctgcaacatcaaatattctgactccctaaaaggatttggcatattcgcttccacctccactcaagcttccgatggtatagtattgttcttaccatttcttgctgggtttttttccggggaatatgtatggaaagttgatattgaattctgattcagctctggaaattttcagaagttttgcttgttgttccgcttgatctggccattacccctatgagagttcttcaggaccctctcctgggccctgagtgtcagaaaatgttcgaacaaggacaagttgatgaccgctttctcatgattctgttcctcactttggagcgtcttcgtatcaattcttcttggaagccgtaagttttttttttaatctcttagcacacatttacgtaagcttaagggtattcatctgtctagaaatgatatgataggtatcttgatatgcttcctactcgatttggcaatcctctttggttttctgatgatgacatccttgagctaaaagggactaacttgtatcacgcaaccgagttacaggtctcaatcttgatcatttattcctgtcttatcatatcgtccttaaaatagcaaccacattttctcttttcatttattaaacccaataaccatcgtgtattcattctcagaagaagaagttgctctcgctttaccatgacaaggtggaggtcctggtgacaaagcttcttattttggatggcgattccgaaaggttgacatatttacactacttttagaccaaattattgttcattgataatcatattttgttttctctcttcgtgcagcaaggtctcctttgaacacttcctctggtatgtttggtactggtgttattccttgttagtagaaccagacttttgtgtcttgtaaagggctgcttagtgatcttgcgacttttttcaattatgccagggcaaactctgtattctggagtcgcgccttgaatattcctcttccacattctttcgtgtttccacaaagccaagatgataccggggaatgcacatcaacaagtgagtcccctgaaacggctccagttaattctaatgaggaaaaaggcaagtcattaacgtcggtctgctgaattctgtgtgaaatgcctcttttttaattattattattctatcatgtaacgacaatttcatgggtttcttcattttctgatgggtagaaattcaggctcaacctgcgccatctgtaggatccggagatacaatatgggttgaggggcttgttcctggcattgacttttgcaaccatggtatgccaatctttgtttcaaaaagactctattatcagtttctccgttccataatgttgatatggttaatgagtatatcccagtgtgatgtgatataatgacctatggttatggcagtatagatttgaagcctgtggcgacttgggaagttgatgggatcggatcagtatctagggttcctttctccatgtaccttctctctggttggccaaatatttgtttgtgttacctctcagctttctacaatttttcaatcaaacaatacagaacattctttttcctctcttctttttgatctgtatgcggaaaactaagtgctacaattctgtaaagcagttgctcaacgtcctatcccaaagaaggagatctcgatcagttatggtaacaaaggaaatgaggtaagatgttttgcagctatcttgtacaactatataacttgtctcttggtaaaaaatcacatctagccctttgtttgagtgatgtgccttcttgctgaatgcaggagcttctttacctgtatggctttgtgatagataacaacccagatgattatctcatggtaatatttacatccatcaacagttccctaccttttcaaccagtgatgtattatagaagtcttgagaatgatgacgagaaacataactttcaagatcaaggagatgctcgtcaattttgttctcacatctgttgttacgtttaacaatggatttattcaggtacattatcctgttgaggcaattccgagtatccctttttctgattccaaggggcagctgcttgaagctcaggttagcagtacaagtcttcgcactatcttacccgaagttttgattatagaccctataagacaatgtagctctttaatacatttatttccatgtaatatgtaactgtcgaactctaaaaaatatcattgcagaatgcacaactccggtgtctcttgccaaaatcggtcctaaatcatgggtttttcccacgaaccacatcagtaattagagaaagtgatgagaaggaaacagtgagatcctgtaatttcagttggtctgggaagcgtaagatgcccacatatatgaacaaactagttttcccagaagattttatgactggcttaaggaccattgcaatgcaagaagaagagatttacaaggtctcagctatgcttgaagaggtatgatcaccgttttttctttcttctgacatctgaaacccatatcctacacaaaaaatctccatctctgaaagagtgaaagtagtaacttgggaaacgaaggcggaatcataaatatccacagtttgtcttccactagataatgagacaaaagtattgttttcctgaaaagcttgttgagtcaagacaaggcgagcaaccttctgaaactgaggtcaggatggcagtatgggaagcatgtggggattctggagctttgcagttacttgtggatctccttaattcaaagtaagcagttgaatttgaacatggattcttaagggctaactaagatgtttgtctgtgggatgagaagaaaattacagacctcaatgctttttgtcctgacaggatgatgaagctggaagagaattctggcactgaagaacaagatgctaggctccttgaggaggcgtgcgtcttagagagccatgaagaatcgaggtacaatgtaaaaaatctgtggacatgtcgtttagatattgattaaaaatgtttataaaatatgttttgtggtagggacttggatgggagaaggatgagcagaaacaagtggtcaagtgtagtgtaccgtagaggacagaagcagctcacaagactgttgttgaaggaggcagagcatgcccttcacttagctctctcctctgaccattgactgatatctcatcggtgttttattgtagattattttaaacatatccatttcaaaggctaaataagcaaattgtgtgatataacaattattagtgtgtggcaccaaattaacggtctatatattttaaagtaatacccaaatcttttagctaaaccaatataaaatcttttcatctaaatcaaatctggtgcaaaatcaataggatttgcaaagattcggtaatggcaccacgccatttactcatttactcatatttagtgccgctactctttcttgatccttaagaaaaaagaaaaaaaaacttgcaactctggatcgagacactattgatgtgaaaacaaggcttcatgcatatatatatatatatatggaaatattgagaagtcggtttgtggtctaaacgggccttctaaaaacaaatttgtgtgtggcctaataattgagtcggtaatgttgtgcactttaatgatgatactcacttcttgtttttcaaactttctcctcttttacctaactcactaaaaagttggaaattaacttgtgcttgaactgctttgaatgttaagtgatgccatccgtctttctgcagcggctgctctcttttccctctgtgctgccattgctctcctcacttcctcctattacaacaagatttacaccaaagacaaagcaaatgttgacatggcttctccttaaatatcagactgagatcagattatacaaattggggtttgtgaagctaaccactttagaaattggcttctccttctccgcctgcgcagcttcggcctgcaaacacagggagggttagataacaagtctctactaatccgagttttgtttgaaaaatagaccctgattcaaaacgttacctgagccttcttttctcgggctttgcgtagtttcttcaactcctttgttcttgctttctgcttggcgtctttttctgcctgaacaacaatcaccgtcacgaatcaagttagtctgatgatggattcagactcccatatgcaaccacatgtctccgaaaatcatataccaaatcatgccagaacaaatatatacgacaccaattaatatagtatttggcagtcatcggattctaacacatgaccacacatacatcattaactccgggatagagctcaacctaaaatcccaatgcgcaatgaaaggactaactgcactagtcctattttgcctcatgcggaatccttaaccaaacttctaaattcaacaaataacaaaccaatgcaagtacctgcttggcagcttgagattcctccatctcttttgtgagcgggctgggtactttagcatcatgccaattccatttttcaaggtttaacgccataaaccgtctgaaagtgtttctcacttccttctcatttgcaagcatgtatggcgttctgcctctttcatccttagcacaaggatccataccctcctccaagaactccataactctttcacaatcacccgatttggcagcttcatgtaaggcagttgacgtaccagtaactccatcctcgatatcctcttctatacgatttggttcctctaagattatgttgctagaagaagtttcatcgggctcttcctttcttgaggttttgccagaatcctcattgtgggtctgcaccactgtattagctttggtgacttctggtcgattaacaaaaatctcctcagttacatgtgcaatctgagtcaactgattatatatacgctgtgattccttgaaggttggccgacggatcgtaaatggaacgtttcgtacagcgcagttttggctgctaaagtacggtttgcctccattgaaaagtaattgcctactgcttgagggagcatggacaaaaacacaagcagcaccatcaaaataaggtttccagctagcaagtagctcttgaatatcctaacaatagagagaaaaatgacaaaaattacacttcaaggctatgaattatctttcctagaggtaaaaaaatatataaacattttttctttatgttttccttcctatgatcctgatcccggttgataatcatcgaggaggcggccaatgtttccacccgtttaagagacctaaatcatgtttacaaaactatacaccacacttccgagttcagaattgcctttacaaatggacagagccgcatatattattataaaaaatcaacgaccttttgtaatctcagctgaaaagagaaggaaacagtagcaaaacatgtccagagacaaaccttttttaaagcaagttcattgtaacgacgaagtgaggctccggcagagtgtatacttctcccgcttgcatcttttgtggactgctttttaccagccttggctcttacaacatatctacacatagggaaagggaattagaggacaaaaagaggcaaaggactgtgaataaagttttatgaactgagaggaaatgagaagagaagtacctgtggaatgtcttatgagccacaaccgactttccattaaagacagtaccggcaaagtggccaccacttgcaagcaacacgacacgcatttgcctatcatccttattctctcgaatcaaatttctcaacctctcagtaacttcattctcgaccaagctaccacaacagtcaacagaaactcctctgtcattctcgaacgaaacactttcagcgtcgtccatgattaagcatttccagatagaaactttgtcaccactttgaagacggaaaaatagtttctttttatcaatacccttttgagcatcaaagtggaaagagggtggtctagtctcagcttcgtcctctgaacctgatatgctagacacgtcatagtcttggaccgactcagatgtcaactcatcaacatcttcctcttttaatatagccttgccagcaacactcagcttgatctacaaatcacagcaaccacattaaggcattggaaaacgaaattgtgacactttttttttccatataattgctcgaataatttagtcggaagagagaaatttgtacgttaaggcgatgaatatcggacttgaagtggtagcgttgatcttgaagagacaggaactcaattttacaagtattacaggtccatctgtccaaaatcacgccgtccttggaactcttatcctcctccgcctcctctggatcgaaagttttgggtggtccgaatgccgattgagtctccgaaggattcgacaaccgacacgagtcaaagaaatccgccgtcaagtcaaatatcgatcgaggctgtttatattctggattaccaatctcggtggtggccgccgcgccggtggtcgccattaattatgaattggacggattgattttcctaacaccggtaccgataccgataagtgtggatttgaaagctttgtgagataaacgattccgttttgttattttcttaaatggatccataatgtcattaaagtggcccatataaggcccaataatacaaggcggcgatgcagaaagatctcgaacgaacaaaagcgccaaaagcatcctagacgcgactgagaaaataaatatagaagaaagcctctctgctcgttttgcgtttccgagcaacaatggtgagtcgtttgtccattgttcgttcgtttgtcctttgttcgttctagtcagttttttttttaatatagttctggcgatatttgtatttatatgttcgagtttcctggttttgattattgcagtcggtaactttgcacacgaacctgggtgacatcaagtgcgaaatcttctgtgacgaggttcccaagagtgctgaggttagttattcactcagctcatgtttctcggtttcgatttgagctgttttctttgaattgtttacaaaatcagtccagttgaggcaaataacaaaacaatattcactaggttatctagtgtccaattagctattacctggtgctgggttcttgtattgtatggatgatttttcttctccttctctggattgtttttaatctttaggcgaaattagggttatatgaatgtcatgattggggaaattatttttccctcaacagtgttggtgtataggttcattatttttcaatgcgtattcattggatcactgagctatttctctctgacaattttcgcaagtttttccatgtatgaagcaccttgacctttagctttgatctttcatattggtgcagaactttttggcgttgtgtgctagtggctactacgatggtactatctttcatagaaatatcaaagggttcatgattcaaggaggagaccccaaggggaccggaaaaggaggaactagcatctggggcaagaaattcaatgatgagatccgagactcccttaaggtatctctattctcatctctgcttatactttccctttatccttcaaactgcatcttcaatgtaatgcaactgtctcatggcctgttggtgtgttacctcttattcagtgtcttcataatccatgttagcatccatccataattatagacttcttttagctcagaaccattattagtcttagaaaaccaaagtggctgagtacactatcctgatctgttccttctgactgtaaggtaaggtatcaatgtgttttagccaggtagtcatatgcatgccattaccctactcataaccgctagtgcaatccctcttgcatttaattccagggaagtagatagatttgagtctgttgcgaatggtcttatctatctctctagttgttcttgataatttaccagattccattctcttatgcagcacaatgcaagagggatgctgtcaatggcaaacagcggtccaaacaccaacggaagccagttcttcataacctatgcaaaacaaccacatctcaatggattatacaccatctttggcaaagtcattcatggcttcgaagtgcttgacattatggaaaaggtaaaccaacctcttaccctcttaaatcacctcgtctttctaagaagagtttgaactcttatgttttcttccttactgtgactgttgttagcctaaatcaagtgtgttaaagaagaatgcttgttagttgttggtgatatgaagcctggaacaggatttattgatctgaattttgtttttagaaaactcatctaatgatatgattgtggcctgttgcagactcaaacaggaccaggagataggccgcttgctgagataaggctaaaccgtgtgacgatccacgccaatccacttgctggttaagtctaatgtggcagaaccgagccaagccaaaagtgttgttctctttatttgtttcgatagagctgacatgtacactcagaaactgaactaagaccactgtttcacccaattaaaaagtttgtactggaggatttaccaattactgtcttcaaaggtgttttgtattatttaaagacaaaaataattttttttgcccaatacttgacgccgtattgcaatctcgccaacaagatttcaaatacacaataatctatctgctgagtgtgtaataataactaataagattcaacgtgggccatcaaattcgaaccaaatcatgtaaatgggctcagccaaacccgacccggatcgaataaaaacggatcccttccactaagccgacccgttcggcgcaattaaagcggccactacctctggctagtagggaccgaaccacactgcgcagtcagcacaaacctgaataagggtaaaaaggtaaaatacggtactctcttttgacaaaatgggacccgttgtaacgcaacgactgtctctgtcttcattcaaatactaaacgcgtgtgggcccgccaacctcctcctcctccatcactgttttttgtttaaacaaaaaaaaaacacaaaatgttaaaagaaaaaaatataacccaaaaattgacgaaacaaaattgagaaacaatacaacaccactctcttcttcttcgtttgaatttgttcttctcttttttgcatagagaagactattgattagaaaatggctatggcttcttcgagaaatggtgcggttagaggatccatgagaccagtctctggagctaattcatccaatctcagatcgtcttctttcaaatccaggattccttcctcggcgcctgctccccgtcggagctcctctgcttctatcggagccgcagacaatggaggtccgttttcatttctttatcactgatttgagttttcactgactgtcgattccgtgaatttatcaattttagctttgtattagttaagcaactctcttcctattgctggggtgctgatccctttccctttaattgcttcttaggagacgattcttcacttttattgattcgattcattcttctctactcgatgactattttttttgtttttattttgcttctgtagaaattgtgtgtttatgtgttttttttctggtaactgttttgacagtgcctgggagagttcgagtggctgtaagattacgacctcgcaatgcagatgagtcagtcgcagatgctgattttgctgattgtgtcgagttgcaacctgaggtttctctccacttcttaatataaacttgaactgagtcaggggtttcatctttatcactcaattgtttcaatcccttctctctgtgtgttagcttaaaaggttgaaactcaggaaaaacaattgggatactgagacctatgagtttgatgaggtgcttactgaagctgcttcacagaagcgagtctacgaagtggttgccaagcctgttgttgaggtctctttttctctccttcttcattatgtttatactcctttgctccttctttcttggttacccttgggagtatctttacagtgaaattgctttcgatttgtagagtgttcttgagggttacaatggaactgtgatggcttatggtcagactggtactggcaagacttttacccttggaagattaggagatgaagatactgctgctcgtggtatcatggttcgatcaatggaagatatcattggaggcacttctctagacactgattctatctctgtctcatatttgcaggttgggatactattgattgattctttagtttatttttattccttttactttaatatcttttcaaacttttctccagctttatatggagaccatccaagatctcttagatccaactaatgacaatatcgctattgtcgaagaccccagaactggagatgtctccttgcctggggccacgcatgtagagatcaggaaccagcaaaattttcttgagctccttcagcttggggaaacacatagagttgcagccaatacaaaattgaatactgaatcttctcgaagtcatgcaattctcatggtaattcacctctgtttagccttctcaactttctctggaacttcctaggccttagatagaacctttacgttcatctctattgttattttgagttgatgcatgatcaatagttcaggtacatgtcaagaggtcggtggtggagaacgagtttccagtctcaaatgaaatggagagctcatcccactttgtcagaccatccaagccattggttaggagaagcaagctagttctagtagatcttgctggttctgaacgtgttcacaagtcgggtataaacctctaataatcaaatgagatagcttgtcacagcccttgtacaaatcagatttactcatttcttcgttttccctccatgagaaaagtctaggatacttatttccttacgggagtgctcattaccaccacctttcttacaatgcaggcagcgaaggacacatgctggaggaagctaaatccattaatctctcacttagtgctttagggaaatgcataaatgcaatagctgagaatagccctcatgttccacttcgtgattcaaaacttactcgcttgttgagagattcatttggtggttagttatcttattgctcataggctaagtcctattgtcttgaattctgaattcctaataaatggacttttctatattaccatttgttgtttgcatttcaggcacagcaagaacatccctaattgtgaccattggtccctctccgcgtcatagaggagagacaaccagtactatattatttggtcaaagggtgggctcttactactttaacctaacccctagtgtagaagtctgttgagaaatttcaattcataagtgtttttaaatcttgggcaggccatgaaggtagagaatatgttaaagataaaggaagaatttgattacaagagtttatccaagaaacttgaggtccaactggataaggtgattgctgaaaacgaaaggcagctcaaagcatttgatgatgatgtggagagaataaatcgacaagcacaaaatcgtatatcagaagttgaaaagaactttgcagaggccttagaggttagttcatgcaaaatccagttaggctctccttggcataacctgaaagaatagaagaagaaaatcagaaaaatggtttcatatgtttggcttttaaaagcgggttatttttttctttacattctgtttacagaaggagaaactaaagtgtcaaatggaatatatggagtcagttaaaaagcttgaagaaaagctgatatcgaaccaacggaaccatgagaatggtaaacgtaatggagaggtacttgcccgcggaactctgattttcttttcaggtgatgggagtgttcgaatctttaaccagtaaatattactttgcaggtcaatggagttgttacagctagtgaattcactaggctcaaagaatcacttgagaatgaaatgaagttaaggaagtcagctgaagaggaagtcagcaaagtaaaaagccagtcaacactgaagacaagatcaggggtacccattgtttaaattctctatggcttcctctatctctctccccttgtcaatgatttaacatcttagataatatttaaccaagctctctggcgttttaggaaggcgaagatgctggaataacaagactacaaaaactgctggaggatgaggctcttcagaaaaagaaacttgaagaagaggtcaccatattacgaagtcaacttgtgcagcttacttttgaagctgatcaggtacggagtgtatgaatttgagtgtgtaaaattgagggtgtgtactgtaagggtctctttagttgctgtaaaacaactgtctctatacatcagctgaagaattagtctccttttgctcaaaaaaagaaagattagtctccattgtatgccctctttaaaaatacttttaaacacgcacggttagagtttctttgaactatctattgtgaatatgaggcatatattcacatatcactattaattgcttcctgtacttgataacgactgtatcttggtaataaatttggtccaatcttgagtttcttgaatgcgttatctaacagttgagtcttattcttccagatgagaagatgcttggacagaggtgccccagggaattcgtactctggcacagactcattaccatcacgacattcccaagcaagagaatctgtgaacggacagaaggcaccgtttgctacactatgtgagcaaggtaatggaaatttcttctaaactatttgaaccagagtgtatacaaatgcctttgtggttcttataacttcatatcctctttgaaacagtgggacttcaaaagatcttgcaattgcttgagtcagatgatgcaaacatcagaattcatgctgtgaaagttgtggccaatcttgcagctgaaggtaactatcatatatgcatcatctcaaaggttcaaccatagttttttttactctgggttcttactgttttccctttttctttttggggttgatacacagaggcaaatcaagaaaagatcgttgaagctggaggcctgacatcgttgctaatgcttctcagaagctacgaagatgaaactgtgcgaagagttgccgctggtgcgatcgccaatctcgcaatgaacggtaaactctcattgctactaactagtatttagtggttagacagacaatggaagcagaaacagactaattatatggcttttggtcacttggtggggaggtacatgctcatgtgtttagtttttttacggggtaacagaagtgagtcaacaactgatagtggaccaaggtggaatcagcttgctatctctaacagctgcagatgcagaagatccacagactttacgcatggttgctggggctattgctaatctctgtggcaacggtaaattaacatccccaacattttattttgaacaagaaaccgaccaatttcttaaaacctttttttttatgttgtttggtagacaaactgcaagcaagactatggtcggatggtggaataaaagcgttgttaggaatggttagatgcggacatccagatgttcttgctcaggtggctcgcggaattgcaaactttgccaagtgcgagtcccgagcaaccactcaaggtaatgctcttttccagtattccttcaaggtcattcagcctttagagagagagagagattggtttttcttgcgtgggtttataatgtgaagagtgtatgaaggtgtgaagagtggaagatcactactaatagaagacggagctcttccgtggattgtacaacatgcgaacgatgaagctgcgccaatcaggcgacacatagagctggctttatgccatttggcccagcatggttagtgcgatccttgtctttgtctttgtggtctttttgatccttgttgtggttcatcatgttcatttgattgtttggtgggggcagaggtgaatgcaaaggagatgataagcggaggagcattgtgggagttggtgagaatatcaaaggaatgttcaagagaagacattcgaagtttggctcatcgtactctctcttcaagtcccgtcttccgttctgagatccgtcgcctcggcatccagttttgacttgttttatgttttgtatcatataatcatcatctctctcaacgagattcacacatcatcaccatctgtattctattttattcattttatagtaactatttcatttttctttgctttttcatttactcttgattataaaaagaattactagatcacgttgtgtgattcattcaacctcgaaataaaacaaagaaagattgctaagacttattatgcaacaacgtgtcaaaaacacagactgtctaatattttacaatttacatataagaaagttaaaaaaaaaatccctcgtgaacactaatctcttcccatggctaccaaacaatgtaagtaatttgtgataaaaactcaaagaagacccaaacagaattatgatgaaaatcgagggagtaaatgaagaaatcttacagagagatagatagatatttagcagcaagagcggaggagaacaggtcccattgatgtctgaagcatatcactaagagctacttgtacctctcctgacccatgttcacagcttatcaacgtcgctatcaatggaaacaactccggcaagttcttcttgaacagtgactctcccatgtttcccaatgtctgaattgcagccaccactagcggagcccgcgctgttagctctttcttttttcctgaccccgagggaaccgcccaccttgaagactgctcctttgaacatgaaatatttatgtagaactctaacacctctctgcagaggcttatgaggtgggattctatttcagcctcgttgtaacccacaggctgatctgagatgaggttgtctaagaaggtcatacatgtttggaaagattcgttctccaggcgcagcagaggagcttcttgggattcaagggacgacccgagctcctggagcttggaacgtaagagtagatcagcgttgattttgtgagcgttggatccaatgccgtgcatagcgtcgaagagcatcaacatgtgattggctgtgagagacatacggtacatgtcgtagatatctgttaccgcctgaaaataaagagcaagtacacagacatacacatatactcatgagatcgattatgtgtgtatatatctatccatgcttcatcaccaaagagactgaagacttgactgacctgaatcacaaaaatctgaattgaagctttagatttggcatctgtgacgacagcatgaagctgcctgttccttcttctcagtgcgtcgttggaattatcgtttgtttcgtcctcattgcttacatcctccatcaaatcttcactggtaacgtatgagaagtcaggggatgtagcatctgctgcttctttgatacatgacacaacctcgagccattgttcgttagagaattgatgaccgacatctctcatcagacggacaagcgcagcaatacccgcaccagcaagactttggtgaggacgttttatcaagcttacaaataacatcagtaccttcttaaggagagggttaaccgtcttgtaaaaatttacaaagaggtctacaaccagctgtagagctaacgagcatgtctcataaagccaagactcttggtcgacttcaccattgtaacctctctgatctgttgaatcatcctcagatgggtcaacgtcctgacgcacatagtcgaatattcgaaataaaacagactcaaaaacccgttcccataacgccagactgaaatggtcaccatggttcctcagagtatcaaacaggactttcaatgcaaccttcctaatttctgctcttgggtcgaaactaagttcagataaacctgcacgggaaagaaagccaaaaatgtcaaggtgatgagaatgttgatttaagaagtaaaatcaataagacgaagtatgaattttggcttaccggctaacagtggaaaccaagaatacaaatgttcatcactttctagaaacttcccactatcttgttttccaatttttccaccctgaggagataatggtgggttcctcctcagtgacgaaccaacatagccttcagcaagttttcttgcgcaatactgaaggaaagcaatggcttggagactaatatctttctcaaatttacaattggtgaacgcaacaaggcaattcacacagtctgtgaaggtggttgtctctgtctccgtgatgtgtgggaagtagtctcggataatcttctcaaccatttcaaaagacaggaacacaatatttttatgtgcatcatgtgctgctgtcgtgaaaatctgcaagagcaaacagattttagtaagtatatctgccagcaagaacttagagagacatcaacgtaactggaagtttgatggatcaaataccatgaacatactcttccatcccgacttgacattgtcaacacgggataaaaccatctgtgagacacatcgtataatcaattccctgatctcaacagcaccacttttgcgcatgacaacaacaaaaggcttcataaattcattttggaagttataattcgccaactcttcccgctctaagaacttcatagacagctggcgcaaagaatccattgcaaaaattgcaatggagaggttatcagaacagccaatagtcacaaagaaatcagagagcacatgccagatgctcgaccagacaagtcttatgcggttcatgttatagtgcctgccattacaacaaacagggtataaataagagagagtgagcaaaaacaaaacagatatcgtaaagaaaagattgatccttacgctatttccacaatctttgttaggctgaagacccgtggatcagatggagatcgtaactcatccatggaaactttgcagagggctttaacaaagtcaattatggcttcactattcaatctttgactacgagtaaatatccgactcatgtcaccaacttgttctagcaagtttagattagatatcaagttgttcatctgttcagatgtcactgtattagaagcctttccagcaacaccagaaccatcgtaggaaccccttatcatagcagatgcagcatactgaagttttccaggtgctctttctttaattgcaggtacggaatttggcttagccagtggagagtttcctgactccgtttgaggaaatgcaaagaaagtggcatcaggaggcgctccttcccccaagagatgaagatgctcaaaccgtgaaacacaagtcagtatatgctcccaagcatcttgtagatagtttccttcttcctccgccagttttactattgcctatcagtgaacagaaaaaaacaatttatacatagaagacatttcttatcatccattggtattttcaagattaatcaggtttgaatgtcagctaacccaattatcatttccttgaactgagaaaagtgcaaaaagaaacattaattactttgtcccaagattttcagatgcaaaatgtgaatgctagccccagcataggataaacttaaaactaaatgagatttcccctatctcgttttgtaccctgaatataaggttgagaaaaaagttacaaacctttattgcttcaatgtttttttgcttgatatcagcaggagagtggagggaagtaaattttgctagtgaagtcacaaaggcatctctgtgcgtttttaaggacattacagaagtgacatggatggcatgatggaaaccctccagacataatgttgttattactgcatcatcactctggtcaagtggaacactgaaagctgccaacataggagcccaacaaacctcaaccataaatctgagtataatcacatccgaggctgcataataaactgacctacagtggaaaacaaaaatcagaaaccaagagatacactttttcaggtagttgaaagtataaaaatcatagctaaattaaaattaaaaaaaagaaagaaaaaaagaagtaacaataagagcagaagccagcagtgttgacctgcccagctactaactccaaaagagtgactatcagaacataaggtgaattatgcccaaacgagaaaagaatggaagcagaatcaacatgtgtaaaacagagcactgcacaagagtgcaaaacaaaaggttaaataaaggaagcttcttactcagatttgcgagccttttctttaaatctctcttgcatatgcctgataagatcatcactggtctccatgttcatatcgtcaccacgcctaggaacaacaatatttaagatagtatctaagccaagtaatctacttgagtttgtaggctgcttctgctgcggacccaaaccatcatccttcatctttatctcatttctagatatcctttcatataatgcacgtagatattcctcaggcaaatctttcccatcatctataccacgattgtttctaataaaaccatcagctgtcatctgcaagttgtaattgaaaaatttagtaatgagttactttgtttgaccaatcacaagcttcaaacaagatcgtattaagatattcctcaagagggatttcagaaagcttctaagcgaaacagctcaaatatgtaccttgctcttcaccatagggttatgtgcatctgtgttgagcaaaatgactgagtaagcgaggacatatgccgtatcagcgctagaaaaatcctttgggttgcatttacagaatcgctctgcaaatttttccattatacgatcgattttttgtgcttctcctggcagcctaaagccccggagaaaggctcgaattgcctcatcaaattccatgccttgaaattcgaaagaatccacatatgcatgcatcactttcagagataagtcttctctttcccccagataatcccctatcaaagtcttgttcaaccctgatgcatctttgagaaaagctgctatttcctctggcgagtcccccaccttgtttgccttgattaaaaattcaatacctttcttaggtttctggttgaaaatagaaataccttcctgccattaataaaaacaaatcagctaatcaggttttagctgaaagactgagacaaaagtcaatgagcgctgaatcaaactttaggtaaacttttacctgaagttcaagcttgtaagctcggcgctgctctattgctaaggcatcagaattcccactggacaattcagactgagagtctgatctttcaaaaccaccatggcctccatcccccttaccattttctactggatgacttccttcttcaagatttctatcaacaatttccagcatttttgccgaataaggatctggaagacgcaactgcttattcacccagtctcccatagaccttaaaacagcaactaagcatttcatggcttcaagcttcatggctgcttcctgaggtggcaacaaggtagtaactgtaccaggaggcactccttgagcagtcttaaggagaccattgaccatcctaaaaacaaggtcaagaaaaccaatacagaaatgaatgctacttcaaatagttcgcactagttaatgatcgcagctctgataccacaaaataaatagattcagggcgtaaagataagccacaacaagatattagatcatacctctcaaatatattggatgagttgacatcgcaatcatagttgatgaagatatctaccaaaatctgtgaatcaacgcagagcttgtccaagaaccgaagcactatcatcttctgttggaaatcaggttgagcaacattctctaatactcttagaacaatcatagggaagaacaccccaatctctgccttcagcccagcacgaaacctcgaaaccaagctaagtaaaatcgagcaggaaagctggaaaatgatcataagatttgaagcactgttcttcagcaaggagagacacagatactgcttgatggcgcctaagaacctgttccataatgagttgatgccaaattttcagaagaaacaccaaaagctaaattacattctgtccaagcaactatcaagcagaatgttgaaagctgagggaaaaaagactgaatctagagatatgatagtttaatctacctaacgtgggttataataatgcaagaagataaacaaaacaaacctatcgctggttctaaagacagcaccggcattctcaagcagaatcttcaataactcgagagccacaatcttccctctcatcaactctggatcttccttgggaggcgtcttcatggacagcttgcaaagtgccctgaaaaccaagaaggcgtctcttctcagcttattcccaatctgaacttcagaatcatcgtctttctccacttctccatcggccagctctccttttcttccctcgagggccgacttatacatactgatctcccagtacttggcatccaacatatccttatcagtagaatccaacaaatcagtaggattggcagtgccaggcaatgaagtctcgaaggccccgtcatggccgccgaatgtgcccttggcgttagctgaattgaagactccgtcaatgtcctgcataatcttggtaatgaaaccttgaacagactgcgtcgtagatgggtctgattcggatttgtccatgggctccatcagctcggccacgacgatgggctgaatggggacggtggatgaatctgcctccattcttctgaacacgataacagacatctgcacgagcgaggctttagcagtcgcctgattaaccacgtttctgcttcccaagtagataccataacaagtcctgacgatctgtagcaaagaatctccatggatcctcagggaaattgaagttaccgcagtcaagagcgtcttcagcacgagcaactcgagcccttcgtcgtctagctcgtgacatttgcagatggtttcaatgagcttggaaaggagtagcgcctcaggtccgccggtgggatcagcctcaccgcgaacgtagccatgagcaataagcttctggatgcaatcaacggcgggatcgacaatcttgagaacgccggtggaggaggcgttgatgagagggctgaggatgatctcggactcggcgagagagtattcggcggctcctccgtcgtgaagtggtccaggaatggaggatccagattcagagtcggcaacaggagaggaattttcaggggatctaaggcgttcgatgacggatttgcactcgtgggcgagcttggagtgcttacgccaggaggcgttcttaatgaccttgtccaaagcagggataacaactcgacctaagcgggaatcgacttccgtagaagccattccagattggtagccgtgacttcaacgaatcaccaatttagatctataagaggagagtgagtatctatctatgtagcccagagagaacggataacaacaacaagagcaacgcctcctcctctgcgatccaatcaaagcagtattcttatcagggagtcagtgaattacagacatctacgaagatgaagcagacgagacaaaaaaaaaaatggtgagcttgagtgaagtaaccaatataataaaaatccgagagaaccagatttggatcgccgtcctctcctctatatgaaatgacttatatatccttgaatagtggcggtaatgtctccggatttgagggcatagttggtattttcaaaatgacgaattctgtatctgttgaccgtcccggtggactcccccggtcatgagctttctagcttatttatcctaaataaattgcttttggtaatagtagtgatatcgaaaaacacccatgattaattcccaacaaatatgtaaatttgttttgcgagtaaagagaaaaacaccttcaacaatagtttttgaatttcattatcgccattgaatttcatttgcggaataatgggccataattgtaacggaggcccaatattaataaaaggcccatagtgaagtggtctctagtgttgtctaatccgccagacagaagtagagcagagcaaagaaagctaacagagtcatctccaccgctctaaattctaatctatccacaccagctctgtctatgaactttgcttggctcatctcctttatctccagtttctcctgagctctgctttttgtaagtaatcatcagagaagctcaattctgtacttgtatgatcctcaattaggcctttgaattcatgacttgttttctagagattaggttcatgtgaaatcatacggccgccaaatttaggtttttctcttttagttcttgaggtatacaatgggaatttatagctgcagcgcagtgttgagcttcggcttgaaatgtccattagttattgcaaggcataggctttaccatcgcatgtttagacgaaacccattacttgtagaatcccatcttaataggctctgtagttgcaaatgtaatgcgagtctggccattggcgaagttgtggagaaggaagatgcagagcaaagccgtagttttaattgggctgatgttggtctgaatctgacagaagaacaagacgaggcaatcactcggattcctattaagatgtcaaaacgttgtcaagcgcttatgcggcaaattatttgcttctcccccgaaaagggaagcttttgcgatttgttgggtgcttggcttaggaggatgaaccccattagagctgactggctttctattcttaaagagttgaagaatcttgactctccgttttatatcaaggtacttgctttcctccttccatgctcgattgatctttcatatgtatctaactcatgctaatttgctatccgagtttatctattgtcaccttcttgattacgtttaaatcattcagtcttgttacctgcatctccttaggtggctgaattttcgctgctccaagattcctttgaagcgaatgcccgtgattataccaagatcatccattattatgggaagctaaaccaagtagaagacgctgaaagaactcttctttccatgaaaaatcgaggctttcttattgatcaggtgacccttactgcaatggttcagttgtacagcaaggcaggctgtcataaattggctgaagaaactttcaacgagatcaaattgcttggggaaccactagactaccgatcctatggttcaatgattatggcctacatcagagctggtgtccccgagaaaggagagtctctacttagagaaatggactcccaagagatatgtgcgggaagagaggtttacaaggcattgttgagagattactctatgggcggagacgcggaaggagctaagcgggtttttgatgcagttcaaattgcaggtattactcctgatgtaaagctatgtggactgctcataaacgcatacagtgtctcgggtcagagccagaatgctcgtttggcgtttgagaatatgagaaaagcgggaatcaaagctactgataagtgtgtggctcttgtattggctgcatatgagaaggaagaaaagctaaatgaagcgttaggattcttggtagagcttgagaaagactctataatgttagggaaagaagcttctgctgtgttggctcagtggtttaagaagcttggtgttgttgaagaagttgaattacttcttagggagttttcatctagccagtctcaacccctctaacattgtgggcttttttcatcatgcttgaagcctctttcttgcagtgcgtattgttttttctgtccgccaaaacagcactgattttcttatttgcattttgtacgtatatattactcctaaatgttctgaactttaatgtatacagatttcattgccaaaaaatttgctgatacttagatccaacttaattagaacgaaccgaatcaaattgcaattgtaagactagacttattcaaaactaaacacggaaaattacgtgttgtgttgtgtataatcttgttttatatagatgcatgccagttcttgtatttcttgcaatttgtgcagtcaaattttctgacttggttgttctgaataaattagctaggaaaaaaatgatcccaaggcagcctgggatttaaaactattttggtcatttgccaaagaaaaaaaaagcaagagaagatctccccactcttgctaccaaacctaactcgaggatggcttggtaggcaaggtaggtatactttgttcatctctgaaaaagttttctggatccacggctgttttgactttgaccaaccgatcaaaattctctccgaaatactttctcccgtaaacctcagcttctctgtaactgtttgggccatggctgttgatcccgatatcaagatccctgtagttgagatacgtgtgtcttggattcttggtcacgaaaggagccatgtagctgtagaagcttctcgtcttttccatgaaactgctttcaacatcagtgcccgggtctttccagttcatcgaatgctggaccttgaaaagcctcttcctgtgtgggaacggagtcgccgtcgtagcaacttcgctcattttccctccgtatggattgaacactagccctagcttcccagcctccatcaacttcttacacaagaaatctaaaccgtctttgctgatctctttctccacgtaatccgattttcttttcaagaaagacgccgaatccggatttcgatccagcaggatctccggtttaatcaccgtggcgttgtcgttgttggcccaccacatcaccgactgtatccacgtcatctccgtgcaattctccggcttcagaccaagctcggggaactccttggtcagcagagacatgagatcgctctgttttcccaagaacagagcaactaccgacgcgcgaaccgtctgagtcgtgttccgggtcactggctgcaacattagcctcatgaagagatccgggctggtcttgggagcaacaaactgccatttatggaccatgtcaagtgcgttttctactagggtcttctccactctgaaaacagtcaccctcggaggaacaggcacgagtttgatcttgaaagataagatcacgccgaagctcgcaccaccaccgcctccaatcgcccaaaacaaatcctctcccatcgatttacgatcgagaatccgtccgttcacgtctacgattttggcgtccgtgacgtagtccacggaaagtccgtattttctgatcatgttgccgtagcccccgccgctaatgtgacctccagcgcctactgtgggacaaacaccggcgggaaatccgtgagtgccgtgagttttgctgctctgccaaatgttgtaataaacttcgccgagagtagcgccggctccaacccaagcagagccgccgtcgtcggacatatcgacggtaatgttacggagataggacatgtcgaggacgaagaaagggcggttagagatgtaggaaacgccgtcgtagtcatggccgccgctgcgagtcttgagctggaagttgagagatttggtgcagaggacggtggcctggacgtggcactcagaacgcgccgcgataacgagcagaggtttgggggacgtggaagtgttgaaacgagcgttacggatgtaggcacgtagggttggagtgaagctggcactgctttgaggcagaacgacgtcgcataacttctcaggaggagcacctgtttgattgctgaaacattggagaaagctttcatatatagatgtgttgggcggagcggtggcaagagaactcgaaacaagagacgatactatgagaaaaaccaaacaagagagcttcatttctttttaacatgaaactcccttgttcccccttttttttgttttgttttttccgttgtattaatactcttttagtatttatagtagtagtagattctttctgaattcagttatagttcctatccatagatagtcatttattatgatctatcgattgacagttaaagcgtgaagtacgggcttcttaaatatcttcctggttcagctattcaactcttcataaaatcaagtttaaatatagagaatgaaacgcctattttgctatttctttaccaatgggatagttttgtcaacaaagatagcccgttgaccaaaataataaaatactcttcactaattaaatatgggatagttgtagcgtagcgactagcgagagcctgcacttgggccaagcccatgaagcattagctttcgtctgtttatattttataaaaaggattcggccttttacttgtgactgtttctttggtctagtggtataagatatgcacatctttattcaaccaaccctagccttatctgcaaggatgaataactctctctttttttcgtttttctttaaccaaaacaacgaaataacacacaaaaaaagtattatacttagttaaattttgaaaaggattaagaaaatattgaaaacgtgttagtaaaacatatgtaaatagcttttgaataatacataacagttttaattttttgtatgaaaaatatgtaaatcggcactttttttcttcgattgtggcctacgaatactcagagccggttttgagagtagcctgagcttttttttttaccgaatatacaagggccaaagcataatgtatcaaatttgcgaaatgtattatgtgggcatgtggcaaaaacagatacattttttgcaaaataattaaaggctgaccaaaataacgtaaataaaaaaactccaaggctacacacaagagtaattgtccacttacatatgaaacagcaactccaaggatacacacaagagtaattgtccacttacgtacaaactgatgttatgaattatggaaaagcaagcaatctccaaactctttcctcatactctcatgttcagaaagaaggaagttgtttggttaggtcatttgtacacaagtaatcagactggacgtagctggaaacaaagtatatggcctactatatcacataagaagaaactgtttggttgttttctatcttttggcaagaagaacacccagagatggaatccagttgggaatctaaatcataattaagcacctctattaacggtctgcaaatgctcataagcatccgattcatcttagggaacaaacaatgtaactgttgttgtttcaaaacaagactggagagtttaattaccacctatttaccatcctagagatagatagaaccaaaacataatgaactttgtttggtaaacaaaacagctgcaccttaatgaatgacgtgaacatgttccctaataagtatctcctcctcctcctccttggtcgtggtcgtcgtgaaactctttgaggacattgagaatctgagcttccattctcctgacacgagcaagcaatcggttgcaggatctgaggtaacccttgacgttgtccttttggcatttatcaatgtaaacctccatgtccctgagaatctccatgagctcatcaaccacctgagaatactccatgacccgaccagggtctctctcaaccacctcctccaattctctcctggcagtttctaaccactcggcggataaacgaatccgggctttcaaggagtcgtagctgtcggagtcgaaaacgtccaagagtttcaagacggtacctggcttgattttgtagaagtgaagagctttaacgtaaccaggcttgctctccaaaggaagctctttgatagcgccttcttcttccaaatcgaggtggagatcaacgggggaggtgatgataggagggtattggtgtagacggaagaagaaccaggcggaagcagcgacggcgatggtggggatgatgaagtggccgccgccgccgaattgaggaaggggatgtttaacaggaggagaaggaggttcagaggaggagggagaagtgatggcgaagagggagatagggttttgaaggcttgaaggtctgtaatggtgaaagtgggggatgatgctgttgtgatgcatctggttacagtaatatgctttcactaaactccccatttctctctttctctgttgttgtttcgacaaattttgatgaaccctaaacccccaatttcatcgaacccattttcgatttcgccaacagatttcgcccgtcggaatacctttttcttccttcaaagttctaaattgggcgactgcgatttttgttgattaatcgggaaagaaataaaaaagagagtagagaaagaatctgattaatgggctcatcaagcccagttaaaatgttaaaacttaggacacaaattttaggccttttaaagcccattattaaatcatttaatacgtttggttaacatacatatgagagatgaggagactaattattatttacttctcattctcaaatgaggtttatcaacttaattaccagtaccaaaatgtttcttgaaagtgagaaacatgcatctctcttctgtaataaagagatactacaagaagaaggtcaaaacacatataataaacaaggtcaacatgtgcagtctgcaccgaccttagttttacatcctaattattattagtgatactatgtgttttttatttcttaattcaactttgattaaatctataatcttaatctaattattcttttgagatatgaacttattacgctgaaaccagtatcatgcagccctactaattggtatatgcatctaatacagtattatcagtacgtaatcactaatgttttgtaatatggtaaaaaaattatataatctcaatatctcgagaaatattaacatttgtttacaagagtgtcttttgtcatttcttacatcacatgggggccttgggcggttccacgttgtttttagtatgttttcctcatttgtttattacacagattttcttagtggttttagtaatagctgttttgttcgataacataataaatagtactgttattatacttaaataatttttggttactaaactcaaggtacgtgacgaaaagaaattaaaaaggtaatggacgtgtggacgcgtgattgatcattgtttaattgcacgtatagtatataattcattaatttgtcttgaagcctactcttttcctttcttgcccatgggaatctgagctttcagattaagttttaactcttaatttttaatttttaatttaatgatttactccgttgatgatgctgttcacataataactagaacctactagttaatgctacaaaatgcaaacaaaacaatttcacatcgcgacactcttaattaaaaaagatttattacttgatccccttgatccacaagttaatataagtagtatttcctaaagaaagaaaatgacagttaatgtgaatgacagaatgagtaagtaaaccccattaaaaagggccgatgatagaaaaacaccgtggaattaaacgagagcactaatctcatttaattagttacaggtaaaaagagagtcaactaactaattaatggttagatctctctctacttccccttgatttgttacagtttactctcttcttaaccatttttgaaatttgaaaagaaattttttgattggacattttttcttttaaaaaaagaaataataagattgttgatgtagccatagaaaccgggaggcacaaaaaacggcaaccaaagaaaggaaaggaaagaaagaaaacaaaaggagtccaagaaaccagaagattgtctcccgacgccattatccttcaccctcggagcttttcttgaagcagggattcttctaatcattaatccctacttctttctttcttttttgtttgttctcctttgagatctatctagtactagtagtaaaaccccctcccctccattgaatttgaattgaattgaatctctgggaatcaaatctttgatgtcgcatctggacgacattccttctacgcctgggaaattcaagatgatggataaatcccccttcttcctgcaccgtactcgttggcaatcctccgtcgccaagcttgccttttggtcccttgtctttttcggattgctcttcatcttcttctaccgatctcccatctccaatcccgattcctctcgccgctctcttcgcacctactcttggggcggtcccgcctgggagaaacgcgtccgatcctccgctcgtgtccgcacccgcaacggcgtctccgttctcgtcaccggggccgccggtttcgtcgggactcacgtctctgccgctcttaaacgacgcggcgacggcgttctaggcctcgacaacttcaacgattactacgacacctctctcaagagatctcgacaagccctcctcgagagaagcggagtgttcatcgttgaaggagacatcaacgatctgtctctcctcaagaagctcttcgaggtcgtccctttcactcacgtcatgcatcttgccgctcaagctggtgtcagatacgccatggagaaccccggctcctacgttcacagcaacatcgctggtttcgttaacctcctcgaggtctgtaaatccgctaatcctcagccggcgatcgtgtgggcatcgtctagctccgtctacggtttaaacaccaaagtccccttctctgagaaagacagaacagatcagcctgcgagtctctacgctgcgaccaagaaagctggagaagagattgcccacacttacaaccacatctacgggctctctctcaccggcttgaggtttttcacggtgtacgggccgtggggaagacctgacatggcttacttcttcttcaccagagacatcctcaaagggaaagctatttcgatcttcgaaggagccaatcacggaacagtggctagggatttcacatacatcgatgacatagtgaaaggatgtttgggggctctggacacggcggagaagagcacagggagtggtggcaagaagcggggagcggctcagctaagggtattcaacctggggaacacatctccggtgccggtgacggatcttgtgagtatattggagagattgttgaaagtgaaagccaagaggaacatgatgaagctgccgaggaatggtgatgtgcccttcacacatgctaatatcagttcggcacagagagagtttgggtacaaaccaagcacggatttgcagactggtctaaagaagtttgtgagatggtatcttggttactacaagcaggggggaaagaaagttgctgctgctgcttgaatattgataattcacaagattctttagtgtatagtgagtgagtggattgatacacaccataaagaagagacatgattcattcgagattatatattctttacatttgtattctgctttgtaatttcgatctcttgagtcgaatctctgatatttatttcataggaagttcacattaatctctgttattcaaccgatggagccagagagagtaatgaatatgatatatacattatgctataaagctgaattagcaaagcacaaagtgaaacaaagtgtgattgaagaagaaagaatgcaaattaagtagtgaataagaaaaactgcaggccttgggactatctgcataactaaaatatatggttcaaatccaatccaatgaagcattttaccaataaatctaattctaactaaaggatcaaattcaaagtttttcttgtaaacaaacatacgtaaaggaggtaagcttggtacatgagaaataaaaataatatttaagttagtggtgaagaaagaagggaagaagagctaatttgagaagagagaaaggaaatctattaatagtgttagtgtgttcccaatttgtaagcggagccatacaaacaatttgatgaattgatgatgaagatgaaaatgaaatcactccccgtctcctcttcatcttcttctgaattcgtactgtttggttaccaatgtcgttctccgattcagagtcatcctctcacggaggaggaggaggagattacaagttctttcgtcagatcagccgcgatcgtaatctccatcttaatttctgtattttgatatttggttgttgtttgtgaaaaaaaggctaaagggggatttgggtggtttcaggattgctccacgagatgcttggatctaccaaaaccggggattctaaagcttggaaggtctctctttctctctgtttcatatctattcgaatacattgattccttttggattttggaatttggatttggatttgaggggatatataaatacaaactctgcagatactaataatggatagagttacggtcaaagtaatgtctcagtcttgcaagatggctgatatcactgatcaaggcatttcctgtatgtcatttatttgcctccatcctttattcattcattccttattattattcagtttctaatttatgtttgtctcttgtgttcatgtcctgtggaatcatcatcagtggtagaagaactttttaagagaagggaaccaatgcctggcatggacgctatctactttatccaaccttccaaagagaagtaccatcatccttatctcttctccttccatccatggactatgtatactactatcaagaactcatcatgtgtctctctcctttttatcttgcagcattgtcatgtttctatccgacatgtctggccgggaacccttgtacaggaagtaaatacaacatgcctctttccttttatatttttttctctatatcatcaatcatcatcattatcatcttttctttctctttttttttcttcagggcatttatctttttcagttccactatccccaaagaattggtcaatcacatcaaaagtgattctagcgttttaccacgcattggtgctttacgcgaggtttttctcttctatgctatcatcccttccctttttacctactcttttatcgctttttggttcctaaattttttactactttctattcagatgaacatggagtatttccccatagataatcaggtataggttctattccctttactttctggagcgctaccatcttggagttggatttaatttgaaccattatgtttttcctcgaatattaatagacaatgcaaaataggccttcccctgatgatcttacctctttcccagggatttctaactgatcatgagcaagcattggaaacgctctatgctgaagatgctgagaattcacgccactttcatatttgtttgaatattatggctactagaattgctaccgtatttgcttccctcaaggtaaataccttctgcacaattcaccaaaggctgactcactacgtcttcctttcatagtcgtaaggaatttcggatttgctggcaagctgttctttataaggactctctcagccaaattaatgttatacggttttttaggaaacttaagcttttcccatttatctctcttttctgtgtttttaggaactaccctttgttcggtatcgagctgctaagtccactgcttcgagggacttggttccatcaaagcttgctgctgcaatttgggactgtatctcaaaatataaagccattcccaacttcccccagaccgaaacatgtgagctgctcattgtggatagatcagtggatcaggttttaaggctcatctactacatttactcctcaagtccatattgatagtttatttctctaaacgattgaggtgtaactgtagatcgctccta

SEQ ID NO: 983 - DNA, 107234 bp, Arabidopsis thaliana
gaattctcttaatgttaaagtaccacaaaaggctttttatcagttggtttattttctgcccacaacataatcttcaaagttttggtaaactctcatgtgcaactgatggaatagaagacactaggacactacataatcaaggttcacaagaatcttcacaatcattatcatagaaccctgtgaatacattcacacgttaatgttgaatactgtgaatcagaaaggccaagactcgatcttctggaagtaatcgacattcactccaccatcaatgccttgagttaaaatcactttgttgtctgaaatgtataacgcaatcccatcttcgattattaagtttgggttttatcaattcaatactgaaatacacgtaaggtctcttggtttaaattggtttaatttctggttcaatattcttagcaacacaccaccacaaacacgagaagctgcgacgtaccttttcccgcaacctttctcgtcggcttggtttggcggactgaacgacgaagaggagggtttggtaacacagatctgtgaaggtttaatcccacggcttcattgttttacctttccggtgacttgggtagtgctacaacggttcacaaacgagattttaggtactgctacaatggtttgactcagactattttttgtttttgttggcagaaaaagagagtcaagccgatttctaccacaaaaattgtggtgccctatcatctgagctaagcgagctaaattcaaacaaatcagcaattgaggagatatacagcaaacaatcctagagtttccacaacttggattacccaatcaaatcgataattaatatcacatacatcaaaagatataatcaacaatccactgaacagtacaaaaatctcagaaccagatcgatcctatagtttatcatcagctggcatgaagaaaaaaaacaatacgattgcactgtaaaactttgttctcctaaatcgataaaactttacaccaccgatcagaaattccaaacgatctataaacaaagagaatcgaatccaagaaataacaacaacaaacgagaagtatcgaaacagattcaacacagatcagcagaagagaaagaggcagatcgtagatggtgatgaaaaagcttacctcggagataacgcaagagagtaaagcggctagggtgaatgaagtaaggaataaagctatgatggggattcgtttgccaaattacaaacatacccctatcccgccgactattctctttttctttgggccttgaagagtcggtcgcgtttcataaaagatacgggaagatttggaacggaggttcatcgtcgccgtcgcctgaggagggtgacaagataaagagccgaacgacgtcgtttagttttagattttttttttccgctctgcggttgtttagatccggtatactttccggtttgtgtctaaaaaccgcaggaaaaaacattgaaaacccggtcaaaaaaacaatttaaaaaagccgcctctacttttctttattcaccgtacaatgttacatttgtgtatgctaactaaccctgagtaaagttctagagagggccttaaagcgaagtagtcaaaatcttagtaatgatcaacatgtccaaagaggatcccaccacaacattgatgagttggtgttggacttgtcttcaaggaatcccaaatcattgctctcaaaggacatattatcttgttcttgtttctgttgttggtccatgttataaatcagctctagtaaatttgatctttgaaattgcatattcaccatctccacttgagcttttgcaagttgtgcttggagttcactcacttgtctttgtaaatggtatatggcacctgcacatccatacactggatctcttattctagcttcggcttcatacaccatactgttgaccgcatcagttctttgtgattctggaagttcctgaaaatatagataaataatcaatcatgtgttcgttcataaaggtaaggatttttttgtatttaattgaccaattcgagtaaataccatttttctacaagactttgtgaaaggtgcatgataaggaaaacgttgacaatgacactatatgcaatactttcactttttttttggttatgtggtgcggcttttgtgagaagaaattattgacattagtcttatgacaaataactacgtaaggtccaattttcacatgacctatgaaaccattttccgaaacaaccatttcaatatatgtatcttcctaataagaacaagaaaatcattcccatctatatcattaatataaaatcgggtctttcttaatgtaattctttctaagaactaaagagcttatagttattacaccaatagatatatagataatttaggtacctgcaagaacttaatgatgttgctggctccaaagacgcggtgtgcaatagtgaacttggccggatccgttggagggaagtacggtgccaaaacgcatctctctgcacaacgtcgcctcaagattttgcaagcagcacatggactaagcactacccgcggtgaaagtgatggtggaggagaagaggaagaagatatgattggagtggtggcgacagaagcgtcacttttactctccataccaacgcaaaaactgtgaattatggggaggaagatgagaaatgtgtaagtagagtctttgagaggtgaagtgctttttggtggggaagtgtatatataggggagacacacaaaatgatgtagggaaggaggtgaccaccctgacatcacaagctcgaattatgacgtggcttttttgctaattgaaagttgaaacatatttccacgtaacggtggctactaaatttctctacgctttcatgtttcaacggtttgcttgactttggcacaattaattttcttcttaagaaacaaaaaattcttcttgtcttgtttttctccttacgtatagtttcaattatattagtctctaaaaaatcattagttagtccaatggtattctactcttcgtcttacattctttaatagtctttctgattatgaagaattgaagattaatactataatttgggagaaaccatagttaaaaacctcaattgaaatgtgtattacgctaggtggttcgataggtctttggaatacctagatattcaattctagagtacttctcttctagtgaagtttgattattatttttattcagtgcttacttaattgtaaattctactgaagtactgatagagaaattaacacaaaaggccaagtgatttattttaggttgcctaatttttgctgaaccgtattttgtttttattaaccattattcttgggactcatttttatacattagttatatctattgtatgagacttttctgtttaatttgaacgacttatacatacacattttttccaaattaaattaaccattttccacgtatatatatgcatggagaaaatgcaaaactacgttaagagtcgtcatttagaagaaatagaattccgagcggtcccaaagcatcatttattcaataagagagtcgtcttcacgtaccaacattaagaagaaaaattcggaatcaaatagagggaagacacgtaaccagttagattgctaaacgagttattgggtgtgcaagctcttgcgtccaccttcgacagattgctctctttctactatacgtatactctcaactaaatcttcaacaccttattgaaaatgacttaaggcttataagattttcttctttctagtatcatcaattcatcatcatttagtcttattgatttaatcggtcaaagattgtcttttgcatcgtgtacactgggagattgtttgttagtcagatttatctcaataaataatgtacgtctaacagtatcgtcatgattatcctcagatcaaatcatcaataccttttcttccaatcatattcttgggcctttttcaaataactctagtgcagttaaattctatcaaatcagtgataagattccactaatgttggaatggagacaagaaaattggggtcgttacgtgtgcattgaaaattatgctaccattcactaaaatgtaaatttatacatatagtaagcacaaaagcattcactagcgaaaaaaaaaaagtaaattgtgccatgcaacacatttcttgcgttatttttgttttgtttgtttcaaaatacaagttaataacacatcggtcaatacaattttatttttacaaattcaacaaatcaatatttggtctttgagaatcaatcatatcgatcgaagaatttgtaagcgattccctccggaaaggggaaatacataaaggttgccaaatgtacgtataccaagccacgggcaagggattattgattacaaccatctgctcaaatttaatctgatgatgtaacctaagcgtaccgaataaatgatatatttgactcattgactttgatttcaacgagtctgaaattacccagttcttaaattcagaatttatccgacgatgtagaaaaaaagaacaaaaaaaaatccacatttctgatttctggatactttcaaagttatctaagtaactatgtatttttctaaaagtcgtcgcatctttgaaaaatgtattattacgtctagatgaaatctatagcattacctctctctttttttgttttttttggttgtctttttgatattatagtatttttattcttttgaagctatagttgctttgaatttctttttaggctaaagtaagataaggattatacataaaacaaacgagacccacacggaatgaaagaggagctcagtaatgttacagccaatttcccacacacacacacaaaaagaaaaaagaaccgtttcgaactctaaatggtgtgaacgtgttcacaaaaagtcactccactcttcccttctctctactcgtcgctccaatctcatcttttctaaaacctgattacgacatagaccactcaagattcaagagggtcctaattgcagattcggttcaattcaagataaaaataagagacgtttccatcgacaacataaaaatagaaaaaaaaacggttttagagaagcgcataggcaagatccttcacctagaaaaggagtgctgaatgacaatcatttgaataacacttgacttcaagctctttactccctcggccgtgatcaaagcagcaaacactttggtaatcatagtggtgacattataagccagagccatccgtctcagctcacgccggtctttgatctaaagcatcgtctgatcaacatcgatggaatccgcctattcgggcaccacatcattacatgctgttgcatgtggtgatagaatcactttggattggtttatgggtatggaactaaaattcggtaagtgaactggtctagattggttttggaacaatgtcaggtttaccattgatctcgtagtacatagtcaaatcatgttatactaatacttctacttctgattaaagatttggctgtttatcactttatataggcaattagccactgtatcttcaaactcttaatccaagttctactgttattagagactaagcagatatgaatggatttgaggcataaatatcgagagaaattaattttattaatgtgtctaagcagcaaaagcgcaacggatgtgttcaaatcgcaacccaccgaaaaaaacagatacgtaaatccgagagtacattaagcaatcatatgacaaagttcaaatgcaatgcgacccctccagcccccaaccaaaaacagccatgactctcggggagacacacacacacacacagagcatacgtcacagcttaagcatcagcaaacctgcaaccaacagatacaaactcaaatcacaccactgaattaatatttactttctaaatgattcatagattcaggataagtacccaagctcagaaagcttcatgtgggcctcagcgtaatcagcgaaaaaggcatcttcatcctgttcacattgtcacaagaaaccatgagttctcttctctctctctctaccaagtgaaaaacagaaaaaagggaatgaaagacatacagcagcgtatttctcgaccaaaggacggaaaacagggtcgtccaatagtgctttgtcagagacaagctgaagaaggccttccttctctccgctcaagagttccctgcccatatataatttgattagtaaccatataagccactgaatcctcctacaagggaacttgggatactcacttgaagtaagagttgtcgaagattagagggtttgatgtccatgcaccttcgaagccagacctatccttgtggcatcgtccctgcgatatcatattttgctagcactcatcagaatttgtaagcttggagcaaacaaattttaaagttttaagcagttggagagaaacgaaccagagtgtgggcaccagataaagcgacaatgtctttgtcagataagcccatctgcttagcaaagacatctctcaaatggtcacaacccttggtagcatcaggaagacgaccctctggaggtggttggggcttgtcctgaaatcaagatatgcattttagaaacagaaaatcaagtcccacaattatcaatcagccatctctacaaagaaagcagaacacgttctctcgaccaaattgagtatatgataaccttagagacggcaaacaaatctacagcaatgactaacctctcttccagggtggaaaggaatgtcagggccaccagtaacttcaacggccacaacaccagcaagctgaatgatcaatttcacaccacaaggatatctagagttagaatccaaaccttacagttatcaccgttaaccaaatagtgctttttaaaatttaaaaccatgtacctgatggaaatcagcaaaagagatggtagggaattgctccctgatggggtccaacaacctaagagcaatgtggataccactgttggctccatgagcttgctcagcgtcaaacctcattgttccgaatggacctccagtccttgattgacaatcgaaagttccagcagagtgccatctgcagtttagccagacagatcagccatgagaaagttcataatcctacatacttcaaaaccacaagcaaatatggttagttacttacgcgagtcggaccatgatgggtgcacagttcttctcagcgatcaaacctctgagcttcctcctgcacttctcaacagccttcttgtaatcttcgctcacggttgggtagttcttcgtcatcttagctaagctctggaacaaatacacagatatatatacatgagcctcactactaaataaacgcacagatcaaatccaaaactcacgaaatccaactatacataacaagctgagaatcataaacaacaacagcctctaaaacagcttcatacgagtggaaaaaaaaaaaacctaaatcaagcaggagtgagctacagaagccaaatctctcaaaaactttcacagattcgtaagattagcctagaaactcagcaatatcgaaccacagaacagaaacgagagagctgacgataataacgccgatcgcagcaacgaatcgtggatctactacgaaaaacacatcattaagcacagatcaagccaagcataacaatgatccgatcgagtcaagatgaaaatggaagcagcaacgacggatcagagagggagagagagagtttccgtcataccttgtttcgaggaaggataataaaatctggagaaatgcgagtggctggcacgagtaagacacgagtactactttttatgagagcgttgaggagaagaaatgcgaaatatatagagtcatgaatgagaacgttctggtagatctgtagatgccgttagatgacggatatcgtgtggtcaaatttgccaatataattgacgatcatgattaaacgcacggctttaaaatggacgttcggatcttagggttggtggtatatagatgggaaaagaataatccttcaatattattaggaaataattggcaatatgcaattggaggatacatgcttcgtgtggagggcccactaactttggggaaattatcaaaaagggcgttgatgttgaattttcttcagtaaattgacgaaattaggcatcagaggacttttattgcgaacacgttgggcagtggtatttccgtgatttcatctgtcgcaggtgtgaacgcgtctcacgcagacgaagatcccaattggactaaggatatgataaagtcacagcagcagtgttattaggtttctcacccatcgctccttgattggtgggtcataaaccaatgcggtttagacctagcaatgcacggtttggttaattgtccacatttattaagtctgcgattcggaattttgaatcggttattagaataggtaacaacgaatgtcctctgtttcatggggaacaaattttcatgcccacctacttttgcttggcttgtcgaaagattcgagaaccggtgttgtttgataggaatctactcgacggaagtcgtgttttctctctactcatgttattaacgcaagccagaaaagaagataagccagttactgcagcaaaacaagtgagccgtatataatatagttcaatgacaagtctgagttagttagtagtaacagacgtctgctgtgctggtccttcccaagtgtatgtatctgttttcttgattcctcaattctattgtgtggcctacttttcttcttctttaatatctcatgaaattcttgtgttactactgatttctgcagacatggtcttatactcttatagggtagttgtttttggttaaggtttggatcataattgcggagaatgcaaaagcaatgtgagagccttttcatgagagaatttgcattgtttcttagtattttgactcataaaatgctgaagctaatttgaaatattcagtgatatgtttttgtggttcctgagccttatatcttagcttcagctacatctacataattatcaggtttgatcaccttctctgatccttaatatgtaagaagatataagatgggagaattggatcgataatgcaggtttgtgagatagtgaaaatgagttcagaggtgttttactttcacacaggttctgtttacttagcacacaagagagagttttgacattgaaatgagacttgagaataatctcgcttttgtatgtttaccactttgctttttacttactattggttcctagggacctattgatccacaatgagatagctttttctatagtatacttctcttttgtttcttttgaatttttctttaatgatgcagaagtcaagttttaaccttgtaataataattctcattcaaatttcgaagttcaacggatcaaataaaaaagtttgtcttcatttggcccaccaaaagcaaaaggtgccaccattttctctcctcttactcactgctttgcctttttaacggcaacaacagctacttgagaaacagtcttttaaaacttgcttccttttttaatcttaaaacctgtcttgatccgagttcttcttccaaagaagagatggagaaaagggaagatggagggatcttgacatatgatggtagatatgttatgtacaatgtactcggtaacattttcgagctatcttcaaaatacatccctcctattgaacccatcggccgaggtgcttatggtattgtctggtaagtctttatcactttcaataaaaaaacataccattcttgaatacaatcttaatctcaaatccttttttatgattacagctgtgctacaaactcagagacaaatgaagaggttgctataaagaagatagcaaacgcgtttgacaacagagttgatgctaaaagaactctccgagagatcaagctcctttcccacatggatcatgacaatgtaatctcttcttcttcactttgatgaacactcatatagttggcttattacgttcatattgctacacaggttatcaaaattaaagatataattgagctaccagagaaagaaaggttcgaagatgtatatattgtttatgagttgatggatacagatttgcaccagatcattagatccactcaaactctaactgatgaccattgtcaggtgatgatcagtggacacattcctaattagagcttttacataatgtttcctaacatttagcattgtttgatatacttttttgttgtctccagtacttcctttaccaaattttgagaggccttaagtacatacactctgcaaatgttcttcaccgcgatctgaaaccgagcaacttggttctgaatacgaactgtgacctgaaaatctgtgattttgggctagcaagaacgtcgaatgagacagagataatgactgagtatgttgtgacgagatggtaccgtgcacctgaattgcttctcaacagctctgaatacacaggagctattgacatttggtctgttggttgcattttcatggagatacttagaagagagacgcttttccctggtaaagattacgttcagcagctgaaacttattactgaggtaagcaaattaaaaccttaatccaaaatctatcattttggtttgtgtgtgtgtgtgtgttggttgttggaagcatttctctgttttgttttgggttgtttttagctcttagggtcaccagatgactcggatctcgacttcttgagaagcgataatgcgcggaagtacgtaaaacaactcccacatgttcaaaaacaatcattcagagaaaagtttccaaacatttccccaatggctctagatcttgctgaaaagatgctagttttcgatccttcaaagcgcatcacaggtgcttatcacgttgttttactactttgtgatgctataaatggaatgtgaaatatactaacaatatgttttaatttgacagtggatgaagcattgaagcagccgtacttggcaagtctccatgagatcaacgaagaaccaacatgtcctactcctttcagctttgactttgaggagacagccttagatgaacaagacatcaaggagcttgtctggagagagtctttacacttcaagaatatgtaatctcccaaattctcactctcttcataatttttaagacacttgaaagcttatttgtctaagctgtggggaatagtgaacatgactcgtattctcgtgtgcatgtgtttgttttgctgatggttggttgtgcaatgggaaaaaagttcttacccaaacaaacccttaagcgattgcaaataatttcaacccgaccaatctctacacaagataaagctaattcgaccatactctgcctaaatcaaatctaatttcaccaaattccttaaaagtcccaaagattagctaaatcgtcctaaagcaaactctcttatttacaaaactagctagctttttttaaataaaaatgtatgtaatgccaatcgattgccgaaaggtaattttcttgttttatattgataatttggtatatgatattagtagataatttgaattggaccaagcaagtcaacatcattgcatatgtatttttaataattaaacgtgaaaacatctccgaatgaaaccgtttgctacaaaagccaaacacgtcttggtttacggatgctggttccaaagaattaataaacaatatctttgttgaaccatacatttgtttatagattatgttcctttcttaaataattcgagctgtcaaactaagttctaatttaaacttatttcaatccattgttgattaaaattttgatatatttatagaaaatccattttcttaataaaaaggagttgactaggttttttaatgctggcccaagaggccaacagaaaggaaagtccacttttgtgcttattataaatttactgaaacaaatatcaaaatagtaggtataaaacatttcaaaaactctacaccaattgatatacgacatttttttccagttaaaaatgctaattatagccgaatacaatacaaattgtaatccaccaattaatgttatatacatgaattcttcattgtattaaaaaaatgaatcttcactttatctagttgaaaacttaatgcaaactaacgagcaatgggttaaatgaaatgactcatcagacgttgggccatcgtgggcttggagtaaactgaaaatggaatatcaatgttaaacaaatttctcgattactagaataataaacaccaaaaaagtttagtgagtaaaacattttttttttctttctgtctaacttactattttttcgaacagagcatatagcttttactatttttgccagcaaaggatggcctgtctctcataaagttattttacggcctaaaatgtcaacgtattgtaacaggagttgttaatgtaccctaaaccttataggtaaaagaaatgaatgagagagattaaataatcttctccgaagaacattaatatgtgccacgtggcgctatctgctgaaacgcggcacagttaattactgtacttggaaccataaaacaaaaaaagcctgttattaattaaataattttttgaaaaaacattcgacaacaaagcgcgtggagttaaaacgtgggacccacaatgacgtcctttttgttttcctcacctcatttgaaaatatttccaaaacggtgagtaattttgccgtcgtctaacaccgacgtcacccgtaaggcgattggtgacagctacaaaaatgttactatcatcagacttatctttcaatcaaatataatcataatccaatttaatctaccatacctgtcaaaccatcgagtaaaaaacgtgtttgttgtagctaataaaatttttaagactaatactgaaaattgacaaactagaaagatgtttggcagtatgaaaataattttatcaagaagtgacataatctttaatcactcaaatccattgctccattaacgccacgtcagatcgacggtgcttgtttccgaaccaacggacggtagatgacaaattaaaaagttgaccatgctcaagtgtttcgtgccattacgtggcgtcttctgatacgtttgtcttcaacactagccgtacgtttctgttctcctcaggaagaaacatttgtctagacgtggctggttttaattagacgcgctatatgtaatgtaccgtgaaccttgtcgtagacgataactatacgtttctctctgaaacaaagaaaattaaacaactttttttgattacgcgatataaaaaaaggcgaagaaattaagctttctctgtttgtcactaagctctctctctctccttcttcttcgacttttttttttcttcctctcttctctttggttttttggtgttgggttttatctgggttcctgatttcttcaacgaggaaggaaggaagaagaagagaaaagggacaagcgagaattactcttttctccttcaatttccgatgggttgtttcggatgcagtaagaaatcgagcaaacgatccgagactaacaaagatactgtcataaatagaaaaattgtcggtggtactacgagcgttgctaagagtgataagcgagacgatcagactcagcccagttcaggtatcgagtgattttgactaatttcgttattctctcttctccacaagctctcttttggatttgttgatttttttttatcggatacttatgtttaggtttttctgtatctgttacatttgggagagacatttaatggagattttttgtgatttttccccggagaattttgatgcatgtgtactattcaccatataaacgatgttgggtttttgaaatcgagctagttttttttggttttgtctcctccatgaggggacaaagtgtcaaaattgagcctttggtatcttgccgtgtctgtttttggttaagtcacatgataactggtaatcgattttgttactcgttccatgtgttgtagattcaacaaaagtcagtccatatagagatgtaaacaatgaaggaggagttggtaaggaagatcagttatctttggatgtgaagggtttgaatctaaatgaccaagtcacagggaagaaagcacagacttttacttttcaagaacttgcagaagctacgggaaactttagatcggattgttttcttggtgaaggaggtttcggaaaagttttcaagggaactatagagaaattggatcaggtacttgtgacaaagaaaaatcctatctgtttttatcaattggctgtgagatttgtcatagttttgaacggttggtgaaacttggttctgctgctaggttgttgcaatcaagcaacttgatcgtaatggggttcaaggaatcagggaatttgtggttgaggtattgactctaagtcttgctgaccatccgaatcttgtgaagcttattgggttttgtgctgagggtgatcagagactactggtgtacgagtatatgccgcaaggatcccttgaagatcatctacatggtatgttgtaagatcaaattcctatcctttgcctctgtattgtttgtctcgcagctacccccttttctcatctaacttttacattgttgttttgactgtttcaagttctcccttctggtaaaaagcctcttgactggaacacccggatgaaaatagcagctggtgcagcaagaggtttagagtatctgcatgacagaatgacgccccctgtgatttaccgagatcttaaatgttcgaatattttgcttggtgaagactatcaaccgaaactatctgactttgggttggctaaagtaggaccaagcggggataaaacccatgtctcgacaagggttatgggaacgtacggatactgtgctcctgactacgctatgacgggtcagctcacatttaaatccgatatatacagttttggagtagtccttctcgagcttatcaccggaaggaaagcgattgacaatacaaaaacgcgtaaagatcagaatttggttggatgggtatgttttgtctcttggctgtgactcataataatctttactgaaacaagactcatattttcacggtgctttttaacaggcacgaccattgttcaaagacaggaggaacttcccaaaaatggttgatccattgcttcagggacaatacccagttagaggactgtaccaagcactagcaatatcagcaatgtgcgttcaagagcagcctaccatgagaccagtggtatctgatgtagtattggctctcaacttcttagcctcttctaaatatgatccgaatagccctagcagcagcagcgggaagaacccttcttttcacagagacagagatgatgaagagaaaagaccacacctcgtcaaggaaactgaatgtgaagggtcctcataggatatccaataagagagtggtaaaaaatcaaatctaattttggcttcaccaagaaattggggaaaaatataaaaccaactcaggtacatttttaacatctattgtggatgtaaatcttgactcggcttctttgtatgtagaatgtttctgttctgtagaaaaggaaaaaaaaaaaaaaccattttgttttgggacatatatacatatattgaacaaaaacaaatatcgttggtcatatatatattttcccgatcaaaaagtctggtaaattaggattaagtaatgtctaaaaattcataatgatgaatggcaaaagtcgtaaatatgtaatagaaataggactatgatcacgtgatgcaacttatcccgcgtgaacccgttaagatttttgccgttaaataaccaaaacctaatccaagaaggcttcacaaatctcttctctcttatctctctctactggttttgtgattcttggaagagaagctacaagataagacaacaatggcggaaagatcattctctcagctcccgatctcttcttctcacattggcagaaggacaggaaacacccggagagggatatttccggtatcggagtattggatccatgcaattccggtgatcgtttttctctgtttcttcaccctctggattttctcccactcaggttccttatttctccgattctttaatctaagaaaagattttcccgagaaaatgagtctttctgattttggttttggttacagtgagcgtcatgaacgatggagagataatgtcgatacatcgtcttgagaaatccatggccgtgagaaacgagtctcatgtcagtttagcgattcttgcttcctctgctgtttcaccagcctcctcagctctcgtcgccgtcgtctctaccaatcagaatctcacaacttttcacaacgcaactcaatcgcagcaaaatgcaacccagtcggtgaacaaagcaaaacagccacacgcagtctaatctctgaacggagaaaagtttctttcagtttcttactgatttctttcatgaacagataactttcagggattgaatttttcttttctttgtatttgcttcagttgaaacaatagtttttgatttaggattgagaattgtttgtgaacgacgatacacagaatgttttcaacaaattgcatagtcatttgaagaaatctttagtgagtatatatctgaatcttgttaatgctgctgaggatgttcaagctcactgatctctccatctgcgcaatttccgacccaaatatacatcgtttggtttctcctactcggcaatactctgcaacaatccctcctcggtgactgcaccaaacacacaattttaacatcatgttatttcaacaccggtttattatatgatctcagccggttatctctgtcaattcactagccaaaaccaaaccggtatgactatatttgatgcaagttgttaataatgaagcaaagagaagatgtggaccaaccttgtgccatcggaggggatcaggtcgcttgagaacgacgactgaatcgatctttccaggcgaatcgagcctccatcggcacccgggaatccgccttgtcttgtccaagttgtagtatccaatcacttggcgacgtccttcatcatacttagccgagtttaagtaaaacacaaatggtctttggcacggatgcctcgacactggtctcgtgttaaacgcgtaaccaatgtagtcggctttgcggaaccagttgaggaatgttcttgaaggcatctcaagttcgcgaggggatatgatgcctcggattatctggactacgaaaccccatgagaccgagatggaccagaaccggttctggtcgtagcagatggactgctggaatatgctggctgggtcaagaactgctgaagacatcaagtgtcgtagtgcacgtgaccgcttcatctttgggaatatcggctgcaccacatcgatgtggtgcagcgacaccaagggagccactgggtgtgcacctaataaccccaataagtccccataaacatcgtactgcatacatagaaacattaaaattagacgtattcaatccagataaaccgttctaatccgaaccgaaaccaaaccgaagtaattaaacatcgaggaaacgtagaaaatgacacctggtgaaagccaggttctttggtgaggggtacaccaagttcagtcatacaagcttggatgcgatcatcactgccgtagagaccaggataccgttggatgcaacggtcctgcatccgcaagagctcgagggctagagcatagctgatggcgaacccaccgcctccaaatgccattgaatatgagaagaagatgttctgaacgtgagcctccgaggagctaccaacgtagtagaactgagtgtggtcgtactttgaaaggacgtttaccacattgtccaccacaaacactgtgtcgtcgtctcccatcacgaaccaccgtacaccttttttgcctagccgaagcgtctccgtcactactcgagatatcctcaccgctgatctgtcccctactggatgggtgtacctaaaacatgacttcttgatttgaataagagatttcttgtaaaacacgtcagatattgtagagatgagtaagtacctgaaccgtgaggtgtcttgggagattctgatttctggaaggggatcgtttcggtaagttctgactctcttgtcaatccagacaacgccacgagttttaccaggtcgccaccatgatttgatgtactcttttctcgtctcccacagaacagaggacgcggcaatcccgaaaacgatgtgatcaagcgtcgtgttgaacatccttggtcgctgcgggtaaagagcggggacacgtggaggcacatcgtcgtcttcttcctcgggaacaacagaggaagatgagtttgctttgtcgactagggacaggtggctgtaggtagaagaagagggacggcaggtcttgcgtgagccacctcctccggttgtagagatgagaagcaaagggaggaagaagaggaagatgaagagccatggcagaggagatcttaagaagcttaggtgagaggtccgagcagagttgctgtggttttgtgcttggtttctttggtggtgatgatcttctagaagtatgttcttagggttgctgagattggtgttagagctcgaactgtttcccatcgctaatgggaatagaaaagaaatagatcgacactactttgttttgtttgtttgttttcaatcagatttggtgacatctctttttataaatgataacgaagtttcagtagtaacaggctaaatttagctaaagagaaaaggtctcttcctaattttactgcaagagcatgaccatgaaccaatactaaaactgataacaagttctcacattcaccactttcaacatttaatcataaaagcaaatcgaaaatttgtatctttttcatggcaacaaaattggtgcactgaagcagctaaaggaaccactggtgtatccatatcagtgccttgtctgcgaaaattgaacaatacattgtcaaacacaaaagaaactgaaaaacaaaaacaaaaaaaggcagaatatttgagaaaaaaatagtagaataagaaaaaagttacctttcttttcttgaatggccctccccttttattacggccgaagcttcttggcttttcaccatccttatccaagaacttgatatcatcgtaaaagttctcggttagttcatgcaacctgattcagttgaacatgagtgtgtatcatcacataaggaccaattacatatcagacacttcagtttccaaccaaagcaaacacgtacccgctgcttgatttcaagcgcttctctctcttcttatcctctttagtgcgaggtgcccgggtaaagagctcttcttctgccttttgttgcctttcatactgtgccataaacctcttctgctcattgctctcaaccccataatagtctctaatctgttcatattcattcacccatttagttccaacatcaaattaatctctaccacgcatatcaactgcaaattaatttccttccaactcacctcttcaggcctgtcctccagatcgtccaacacatctttcatgtatgtattttcagtggcttgtctaaaaaagtgtttctcttttctggcagcatctctttcttgttttgaagtcttatcttccatagacataggggcaaatttcgggggtcgataaacaccatcatcctacatttacacaggcaaagaggttaataaaaataacacgcaacatatttcttcacaagtgttggaggatagtaaggtttcacctcttggtcatcctctttgtcagcaagtaagtcaggtttaggcttataatttgaaagatcttcagatttttgggcttcacacgacccctttccctcggaatgagctagctctgtcacaggcccaccggctgtggtgagcttctgaatctggtactgaagttttttgtctatgggacgaatctacacaaaagaaaaacaagctaaaactatgactccatgacttgttggcgatatagaaagtggaaaaagacaaagatgcaaaccttttccagaaacatacgtatctctacaaggctccttacaagaggatgaccatcaatagagagtccttttgctttccttagaatataatatacaagatcctggcaataacttagaagtaacagatgcttggcctcaagataacttatcccacccgctgtcggaaaactgtttgcttttacctacgatttgtaaaattaagaaagtcaggatgtcatgaatgacccattgtgtctctgaatggtaacggcagatgcagctatatacaatactttggttaaaaatcctcaaggagaagcaaacagtttgttctcgaagtcgtcaattctacttatacccaattgaaactagacatgttatagacgagaccgagtagatattaataaagtagaatccaacaaaaatatgttatcagattacgtaccaatgcagtcagagcttccactttgctcctaaccacatctagaacattcttcatttctctcaacacggatgctagctgtggagcttctctgagacagttacaataacaaaaacgagaccagtaaaaacatgaggcatatctaaatacacaagttattattttcgtttgattgtgagttgtgacaattaaagtgattcaacgattcattattcaagctgtattctttttttctttatggctaaaacagagaacaatttcatgatgggtaagaataactcacttcttaactattccaacaaggaccggtttggtgatctcctccatgattcttgttcagtacttgacagaagataagtctgtgaaaaaaggaaaacaaacatgaaagttcagagactaacccttgaatttgaataccacattaagatactcagataaactaaaccatagtaactgagaacgaaaagaatttaattcatgttgagattttggaacagagattatggtttggtccaacaacgtttgaatatctaagtaagcagccaaagagtagctaaataaaagtttcatcttcaatccttacgttttcctacaaatactgtctaccaatttactaattcatagaaacaaacattcacgataacccaatgctaaccaaaattgatgaattcccaacagagcaactatctctccgttttgactcgattaattgagctcagtggttgtcggtacaccaaatctagaagcggaaaagacacgaagaagaaagcactcaccggagatagtgaacttgaaggtgacagagagcgacgctaagaaaaaggtcacggcggccacaaagtaaaattaatcgaaagcctctctctactgattttccgacaattaaaacaaaaaaaaaaaggttttaaggagacgcatgattctaacatatttcaggccccatttagctttagggcccaataagggtggctaagtttaattatcgcaagacgcaagcaaataatttagcgcaatctatggttttggtggtttaatcattttggttattcagtttcgacaatatgattcttttcttttataatcaaataatcagattttattttaatttttgctgtgtcgttagtcacaataatcagttgagtttgagaacgaacactgagttctgattccttcagtctcctccatatagcccatataggactcgactaaaccaccaaatctttcatctgccaaaatctacttcatcagtgtcgttgccttgccattaccgtttatgttggttttaagagaaagacaaagctctgaatcaacactgaccaacatgtgtctcaaaaagaaacatcaaccataagttacagaaatgtgcgtacagataccaaccaaacgtttttctactgccgacactactacagtcacaatcattggaccagttccaaagtcttgaaagctatgcgttatttcttactccgaaaaactcaacacctctgcggattgactcgtgcttactgctaggttgccaaaacaagagccaatgggatcacataccatttaccattctcttcatctcggctgatcttctagaatctggttcttcaatcgctctctcggtcagcacatgcttaatgcggcacattgatctcctcacctatatttgtgagaggcaaacaaagttgacattcattaaaaaataatcataatctccctcggtaacaaagaacataaccattccttgaagaaaggattcatgtttcttctcgtagtatctattattttgtcaacaacttaattggatagagagtcaaagccaaattagtatcgattacctttggaatgcgttcagggttaggaaactgcatgttctgagcctgaagcatctgacgctgagtcatcaacatgtttttctctttgagaagaacgtaccacagcttctgaagatcatcccatgacttgagacgcagctctgaagctttccaacctcgacctaacaccagaagtttacaaattttcccccattaacaaaactaaacaatcctaattccaaaaactccatgggaggataacaaagttaagaagaaaaacgaacgattagcaagcttgactacagtcctaagctacagtgaattactttacttcttcactgtacattctatgaacaatcccactagtaaactagtattaagcagatgagtggcagaaaacagagagaagctaccatagacaacaggtttatcttcgtcttggcttctgtcgaactcaaagaactcttcgagtggatttgttggcgtccgaatcgtcgaggcagctgctgctgctgtagtggactccgatcgcgccgatgcagccgccaagaatctcctcccgacaaatcgcgtaagaaacattttaacaacaaacaattcctttgagcttgcagttatataatctgatcatcaacaacaatcagaaagagaaatcgagattggataacaaaatggtaaatggttaatgaaagtcgtacaaaatatttcaggcttccgaagaagtgagagatcgtgtacacagaaaagcacatctcgcagaggaataaataagaactcaccggagatagagagaggagagctatttcacggcgacggtgacggccacagagaatggaaaaccctctctcaacgtttctccgagaataacaggtttacggagacggaaacttttagggcccaatactagctctgttagtattgatactattattgggccaggtttcattttctcttttaaggcctaataagacccaacacttgcaaattattggaagacgaatgctgtttttgttttgtttttcaataaaacaacatctttcaattaaattgggagcaatccacgtcatcgatccgtcaagtattgttaacgatgtataaccattggatcagtaatcaacggttgatatgaaaaatcacacggatcaacgcagttttatatattaagacattagttagccacttcatatccgtcaaattcaattgatcctctctccaaatcatcttaaaagtatcttcttcttctccatctggtttattgttcgatcgtcaattcaattgattgatttggaaatctagcgtttctgttcgttaccattcactgaataatttttcttctgttcttcacagtcacagatctttgggtatcaagtaaaactgtgaagtgatgtcgggaagaggaaagggaggaaaaggattgggaaagggaggagcgaagaggcacaggaaggttctgagggataacattcaaggaatcaccaagcctgccattcgtcgtcttgctcgtagaggtggtgtcaagcgtatcagtggtctcatctacgaagagaccagaggtgtcctcaagatcttcctcgagaatgtcatccgtgacgccgttacttacactgagcacgctagaaggaagacggtgaccgccatggatgttgtctacgctttgaagaggcaaggtcgtactctctacggtttcggaggttaatccgatttgggggattagggtttatgcaagtttggggatttcttcttgtttctgagatctgtgttaaatggtttgaattagtctaaagtaaatctaggagtgttagctactgcttttgttttctattgtgatgtcgttgttagccaatgcggtgtagttgaaaatctttgcaaacttaaagctaagaaaatctaatgaggatgaacaatttactcgatatcttgtctcctggttttttaccatttttaactgtaatcccaaagcttctgggaagattcatgttgaatcgagaaacagagctacatttcaccctatcttcattggtactcgtaagatcaggattcaatcaactaagcaattaatgataattgataaattacagttgaattctgctatgagttcgttttttataatctatagacttggaactttggaagcagtcaatattgcaggaaggggaactaaacagaaaacaactagattactctgtctcacgtgaaggagaatgtatctttactctgatctgagtacacaaaatcaaatcacccaacaatgaaggcttgggtgaaacattcatcaatatttcatccatgaattatattgatttggaagcagtcaatattgcagaaagagagatctatctagcacataacttaggaagcataaaaatgaagggctttgttgaaacattcatctatttcaggctctttgtccgtgaaccaaatgagaagcaagttagaacatttttatcaaaccaaaaattatcgttttagaaaattaaataaccaacgccgaggtaagtaacaacgctaatttcagctaaaactaagagtctaataatataatgcttttgatttatttcttactcctccttttgcttcgtggaaagagtgcgaggtgagtagcggtagccactcgtacaccttcctacaaacttgagcacttcgtctataagaatcactggaagcgaaacagccagtaccagcagccactcgttcaagctcagtggcactatcccaaatacctgagccaggaatggcacgtacagtatcacaaagtggagcccgaatgagacagccatagccaggagtaaccacgggttcacccacggcggcatcgttaccaggctgccgtcttctgagagtgcgttcagggagttgaacatttcaatggccaccaacaccgagagggagagtgtggacgccttgattttcccctgctggaaatagtcgcaagggtttgagtcgaacgagaaagtctgagagcctgctgtgaaaggagacactttgaagccttcccatgaagagcattggccccaatgtgcgagctgtgaatagctcacaaggctgtgaccgtcttggctcaagtctatgcccatgaagctactgtgtgtgtaccatatgatgaatactcccaccgttgctactcccacgtacagaccaatcacctgtaggtaggtatccataatagtcagaaatgccccatacgatgaacaagagagagagagagacaaatcgatttttgcataccatatagcggaagaggatccaggcagtgataagcgagtcatcgctcctacgaggaggctttttcataatatctttgtcaggggggttgaaccccaaagcagtagctggaggaccgtctgttacgagatttacccacagaagctgaaccgggatcatgccttctgggattccaagagcagctgtcaaaaatatcgatgcaacctcgccgatgttggaagagatcatgtaccttttattcatcatagtcatatatataggcttagtatgtataactcaagccatcaatacgaataggcatatatatatatatgtgatagtagaagactcacctgatgaaggccttcatgttgttatagatggacctgccttcacctacagctgcaacaatggtgctgaaattatcatctgccaaaaccatgtcagatgcctcctttgctacctgcaaaatgcccagagctttagaaagctgatagagctatcatcatccggaattgaagatgagagaagagaaacagtacctctgtgccggaaatgcccatagccacaccaatatcagccaacttcagagcaggagcatcattgactccgtctccagtcatggcaaccacttctccatcttctttcagtaacctgacaatctcttgtttgtgttttggttcagcccttgagaacaggagccctccagtctgtcgtagatgattcttctgatcttgaacatccataaattctattcccgtcaagcttcttgaggagatatcttcatctgcttcaaatacgccaatttcacggcagatcgcttccgctgtgctcttgttgtctccagtaatgaccatgacccgaatacctgctgttctgcaatctgcaatggcttgacgcacctctttccttggaggatccttcaatcattaaaaaggtcgagcatcaatatttattaatgaggaactagaaagaaccaaaacaatatcacagtaactcacccttaaaccaacaaatccaacgaatattagattggactcaattgatgaataattggatgggttgagaagttgctggtgagcaggatggtcttcactgccatcataagtggcaaaatctgatggaacatctgagtaagcaaatccgagacatcttaatgcactcaaggacatatcacgtaggctttgtaaaatcagatcccttgagtattggtcaagctctcgttttgaaccatcaagtagctgaatatgtgtactcctttccaatacattttctaccgcaccctgcataatttcaaaattggtctcttaggtgctgaaaaagaggggacaatggttttatcgactaataacatgcaagaaccaaagcagaagccacttgatttcccacgttcgaccccaggagtcaggatatgatcaatgatgacaaacagaccttgaccagtagcagtttgtttcctgagctggaatccaccataactcccattgatttccggtcacggtcaaactcaagggtggcaatccgttgttctagttcactccatagccgacaacaaccttcaataatgttaaaaaaggaaaagtgcaggaggttaggcatctgtaaaactgcataaacataagtaacagatatagttcagaatacatacgtaagacatcgccatcggacgaagcttcattcaatccttcgggaaatcccattttctcaaccaaaacctgttcaaataaacacacacaccaatagaaagaaacatcaactaaggacaacgaatagagttttcttagtcaatttagttaagaagagaaaggtgcaagctagtgtagtagaccgctttaccttcaaagctgcctcagtaggcatgcccctagacacaaattgctgatcagattgctcgacattagcatcgttgcaaatggcagcaatttttgcaatcatctgaagatttgcatccatccgacccattggccaatcttcaatctttccatctcgaggatcaaacgaggtcccctcaacattgaaagatcgaagagtaccgatcctcgaacccatagcaacgagcttagaaacagccatctgattggttgtgagagttccagttttgtcagagcatatcacggtggtgcatccaagagtctccacactgggtagcttcctaaccagagcattcttctgagccatcttccgtgtgccaagagccaaacatgtggtaataactgctggcagaccttcaggaattgcagcaaccgccagtgcaacagcaatctcaaagtaatatgtgcacttctcgaaggagaacttaaagtttctgggccagccatcaacatactcccatgacagaaagtatttgacattgatgagccacactaacgcacaaattaacccaatgatcatagtcagaacttccccaaactcgttaagttttttcttcagaggggtatcttcctcgtgttgtgcagcttcctggatctgtgagtgaacccttccaatctcagtattcatcccagtatctgtaactaaacatatgcagttcccattcacgacagtggttcctgcaaacaccatgcatttctttccttgaatatcagcattctcatccacgtgcttggtggttttgctcactgcctcactctctcctgttaaggacccctgctcgactctcaaagttgaactgatcaaagcaaccacacgcatatcagcaggtaccttatcaccaaccctcagttccacaatatcaccaggaacaagctcctttgcaggcaaactggaaaccttagtcccatcacgcatgacagttgcttgctgagactgaatctctttcaaagcttccaacgccttctcagcattagtttcttgccagatgccaacaatggcattaacaattaagatgagaaaaataacaagcggctcaacaaatgcagtgatacccatctcaccaccttcgtcgccatcaaagaaggccaagacaaaggaaataacagcagccgccaaaagaatacgaaccaatgtatcattaaactgctccaaaatcagcttaaaaatagaagtaccctcaggcttctctaactcattcaaaccatagatctgatgccgcttcaacacctcatcactactcaaacctttctcacgactaacaacgaaatgttcttcacattccgcgacatctttagcccaagcaggaaacgtatccgaatttacaggtgtagaatttaagctttccttcttcacaaggtcttctgatcctttccccatgaattctcactcgttgcaaaacagattcgtcaaattctcccggaaactcgccaaagcttacggttttcgactgcaaattattaaaaaattagatcctctgaatagctgagaaattagaaaaacttcactctaagatactcaattataaaactgtagcaacataatcatcatcatctcaaacaaattacaaaggaataagactggatcgacgaatctatagagagaatctcagtcccagactaaaattcaaagatgagcttaaatttagatctgagacaagagaacgattacatagtaggagcaaatcgcaatcaaggatacaatcaatggagttgaagattgtgaagtagtaacataccaaagcaaatccggagctagagagaaagaaacttcccgctgcaagcaatcgcagggacgttctctgacgtctctctgataactcctcttattaattaaaaaaaccagtgattcaaaaagatgctgtttaagcccaatgggtcactgtttcaagtataagtgctactactcattctaatattgatcgtctttgggcctataaactttacgttgacatatgttgcagaccaaattatcatgataggtcacaaaacgttttggttaaaatgtttataaagtaggttatttttttttttggtaagtgaccgggcggcaaagagccccccgtttttattcaaacttaaaactaaaaattaccgttctgggatctgtcttgggcaaactatcccaaggtcatcctctcgccaaagtaactcaacaacattcggaatagagtaaaaaaagtgcaaaccaaaagctaaagaaaaagcatagtttgctaatctatccgcaagacgattagcctccctatacacgtgaacaattcggactatccagtccttcgataaaaagccatggcacaatcgtaccaggaaagacaacgggtgatgatcacttatccctgtcctcaagaactccacaactatcgcagaatccacctccaacactacctgcggtgctttcctctcccatgcgaaatggagtccgtaataaactccccataattccgccattggtgccgaacatctccctatattcaaagaaaaacctccgcaccaccttccctcatgatctcgtaatactcctcctgcagcagctaaacccggattcccacgcgaatccccatccgtattaactgtcaaccagccaagcaacggtttctcccaccctaccagaatctctacgcgcgagcgtcgacctccctgagtgaccaactgttgattagctgctgaaacctccttcgccaaatccctcacaaagcgtaccctgtcccgacaccttctattctcaccaaaaatattaccgcacctccacttccacccccaccaaactgctagtgcaaacatcgtggaccaaggcccctcttccacgttaacctgctcacagagattctcaaagagccactcaaataatgacttcgtaaagaacgcttgttgtttcctcctaggaacaatcctgctccatattcccgacatcgaagggcagtctctaagaacatgcaagatagtctccactccccctttgcaaacctgacaaacctcagaatcacacaaatgtctcctgtatctctcggcatttgtcatgatcacttgactaattactaatttgatggtgatttaaaaccggacgatggcaaaacggaatgtcaaattgtttagttgtgattttgggtcgtggataacataacagatcaaattgttgggttaacactgacaaatgtcaactattctacgacgcagcttaatataatgtcgtgatttggaataacaaaatggtggatgttatgtagtaactgaatacaagattattaattaatttacaagtgtttattaaaaatcatccacattctccgtgccaatacatgatcggatcaaacaagccgaagcagtgaccataaccgccgcgaaaatcgaaggcacaaacaaatcaaaacgcgatctcttcaccatattagacggcacgcatatactctcccctgcaaaatccatcggaatcttcacgaaaccatctcctcctccgcacgaagacgacaccgtagacacaaaagccatctccggagcaaacgaagcgacggccaccgtgaacattagaagcaccgtccacgtggcagcctgagcgatgaccggccaacggtcagagacactccgtagaaacggctccattagcgatggaagacggtgatacatcttgatcagaagaaatggggattgttttagcgtggatcaaaagaaattaggtgttggtttgcgaggaaacgaaaagattgtgagatcgatgagcaaaaaccagagcttgtttgattggtgcggtttatgtgtttggaaacggaaatgaaaatggaaaggctgcttctttgcacgtttaactaactactcttctttcccatacacacacagagagttgttaattacgaatttgcccttccctttgaactcttctcttcttcttttgcccttccgggtcgtctccgtcccctttgacactcccacgttttcagcaatatcaatttttgtttaatcgacggctgtattagttggttgttaagaaatttcagactcgttcctccataattcagatataggaggagaacataaactatattatatgattatggagtaatgacagtgatttatgctttatgttgttcaccaaaaactattcattaaaattaagcgggttcacctaaatctgatgcttatagcctgcttgtggcacaacgataacgataggtaattcaactactaatcttcaattttatctatttcaatgactccaatcatatcataattagactctgttcgttataagaaggtaagaaagcaacatcattcaaggaaaagtaggccaatttcgcgtatcaaataatataaacacacacatataacatatacttcaatagagacacatttcaatatagtgattaggtaaatgaaattgaaatggaaaaaaaaatcgttaaaaatatataatccaacattgaaattcataaaaggaaggaacaatcttctctacttcctagagttacaaagccacaaaatacgaagttaagcgaataatgcatctaatttcctacaagtactaaaaaccaaaccgaaattgaaatccctaaaaaccctaaccgggtctcttcaagagctagtaaacttggtaaccgccttggtaccttcagagacggcgtgtttagcgagttcaccggggaggacgagtctcacagccgtctggatctcgcgagatgtaatggtcggcttcttgttgtacctagcgagtttcgaagattcctgagctagcttctcgaatatgtcgttgatgaaactgttcataatccccatggctttgcttgaaattccgatatctggatgaacctgcttcagcaccttgaagatgtagatcttgtaggtttcgacgtttttcttagatcgcttcttcttcttgtcaccggcttcctttggtggcaatttcttccccgccttgggtttcttctccgccggagccttttcagcagccttgttctcttccaccggtctctcagcggcggtttttttctcggcgggcttcttctcggctcttggtgccatcgtgaattttctttctgattttctcgggaaaaggaagttgattgaagtagtttagtggtgaatggtgataatagtttagattttatagagaaggaacaaacgtattctattggatagaaatcttcacgaggatcattgacgtgtatatttctcattcgttaaatttatcaatgctcaaattagatctgacggctgagagaaacatcattcatttttacaggttcaagttatagctttgataggcttcaatggtcgtgacaaagaagcccattgggcctgaaatgaagcttgagacgcagcgcataacacatgtcaattggtttctttgattttccctagtataaaaagcgataagaaaactctagctcaccttctcttcttcctctaattgcttttctccgtcactgagtaccttgcctctcgagctcccaatcttaaggtacaattgatcttcactatagtcgttcagaatctgatctgcttatagaaatattcagaagtgtgagatagctgctaattggtctttactttgtttttttctcttgcttcacatcagaaaatttaggatcttagagcttttcatagtgaacttaagaacgcttttcgaattagtcagtcttagctctattttgtctgtgtgtgtattttctggacacgagacctttgtttcaatttctataagtgatttcggtttacattttaaaagcttgatttattcccattgaaataaatattcatgatgagtaaatctgtgcatttgtatcaaatttttagtgctttgcagattttattttaacgcaagctcttgtttgttgtttgacttgtttagtagaggattgagcttaaggcaagatggtaagaaacttaaatatttattttgaatatttgatcaattatctatctttatgaattattgatcaagaaacaaaatttaaagaacatccgggacttgaaaaagtagtggaaatttcacaaaaccgaaaagcaaacggttaattcggttttacaaagaccaaacagaaaattcaataattcggtttggttcggtttaattacaccgaacaaaaaagttggtacattcgtttttatttttccgccattcttgtcgatcttcttcagtcgtaaaaccgccgcgtctctgctgaccctcctcttctcatttcatcgacgggagaaaatcccataccatctgagatttccaacagtgaaattaagatgtcaacaggtattattcttctggtttagctcattgggagaaatgcagataacttgttcgatgtatttactcaatgagcttgattttgttttctagtagtgattttgctgctatcaatctgctttagtgatgatccattttcatattatattgtttgcttgacatgttcatgcactaataggaatctcgattgtataattgtcttgtaaattcagagtttgtgttgttttgttaatagtgagctttattctaagatcagttgatgaagcaagctttcttatttttcctcaggaatatccactgatctccatgtccattttggagctctaaatttctcaaaaacctacaaatctggtaacttttcttgacttttagtttttcttcagatttcactagaccttctgtgtgtgtgattctctttgtttccggctaattactgaagcttgccattgatctcttttttcctactggatttgtccaggtttaagcaatcgaacggtgtctttttcgagagtcgggtatgctcagaacaggaaattgagctgcagtgtttccaacacagagaatgtagctcctaaggatgatgaaagaggaaaggatagacctttggttaagatgtgtggcatcacatcagccagagatgcagctatggcagttgaggctggtgccgattttattgggatgattatttggccacattcaaaacgatctatttctctttctgtcgcaaaggatatctccaaagtggccagggaaggtggggccaaacctgttggtgtttttgttgaagatgatgagaacacgatactgagagcagctgattcctctgaccttgagcttgtgcaggttctctacattcttatcgatttttattttgctctcaccaaagtgattttctcaactttattaacggttgatagttatggtttcttacagcttcatggtaatggttcgcgtgctgctttctcgaggttagtacgcaagaggagagtcatatatgtccttaatgcaaatcaggatggaaagctcttgaatgaagttcctgaagaggattgtcatcttgctgattggattcttgtggatagtgcaacgggtgggaggtaccaagaacaacttttcaatttctttcgcattgtaatgtactccttagaagaaaaatttaagcaatcactctagtacataaaaccatttgtctttcacgaggtgattgaaatatcaagagtgtgataggttcaatcataacaatttgctgcagtggacacggatttaactgggctcaattcaagttgccttccgtcagaagcagaaatgggtggctcttagctgggggaatcaatccaacaaatgtttcagaagctctttctatccttcaacctgatggaattgatgttagtagcggtatttgcggtacagacggtatccagaaggataagtctaagataagctcctttataactgcagttcgctctgtacactactaatggcaagcaatataaaccacggtaatttatcttgtaactatagttttgagcatcaacctgttgtttccaatccatgtcattaagttttgaattgtaactggctgataataataataatgcccttttttttcatcagtagtagatttaaattaaaagcgttgggttgtcaccgtaataatgtcgttgggctctcaagaacaagatccttgtatgaaatgtattctactgatcatatattatttcatttgatcgagagttttaccacaggtttctacaaattaatgcttttttaatctcgaaaaggctttacaccaaaacaaaaagaacataatgaatgggccaagatgaatttatgtaacttgtctgcctggttcactgcagtatgtcctcatgttctttgtccattgagttttggatctgcctcatagtacacgacatctcctgtatcgcttacgaaatggtcttgtttcgcattgcttaaatggtgataataggtttactcgaggcttttagattttatagagaaggaacaaacgtattctattggatagaaatcttcacgaggatcattgacgtgtatatttctcattcgttaaatttatcaatgctcaaattagatctgacggctgagagaaacatcattcatttttacaggttcaagttatagctttgataggcttcaatggtcgtgacaaagaagcccattgggcctgaaatgaagcttgagacgcagcgcataacacatgtcaattggtttctttgattttccctagtataaaaagcgataagaaaaccctagctcaccttctcttcttcctctaattgcttttctccgtcactgagtaccttgcctctcgagctcccaatcttaaggtacaattgatcttcactatagtcgttcagaatctgatctgcttatagaaatattcagaagtgtgagatagctgctaattggtctttactttgtttttttctcttgcttcacatcagaaaatttaggatcttagagcttttcatagtgaacttaagaacgcttttcgaattagtcagtcttagctctattttgtctgtgtgtgtattttctggacacaagacctttgtttcaatttctataagtgatttcggtttacattttaaaagcttgatttattcccattgaaataaatattcatgatgagtaaatctgtgcatttgtatcaaatttttagtgctttgcagattttattttaacgcaagctcttgtttgttgtttgacttgtttagtagaggattgagcttaaggcaagatggtaagaatcagtgttcttaacgatgctctcaagagcatgtacaatgctgagaaacgaggcaagaggcaggtcatgatcaggccttcctccaaagtgattatcaagtttctgattgtcatgcagaagcacggtatgattatcccaccagattttatataatagagattcctaagattctcggatgttgttccttaaattatgtggttaccaatcaaatgcaggttacattggtgagtttgagtatgtcgatgaccacagatctggcaagatcgtcgttgaattgaacggaaggttgaacaagtgtggtgttatcagcccacgttttgatgttggtgtcaaggaaattgaaggttggactgcccgtttgctcccttctagacaggttcgctcttcttataaactttctagttacagtggccttatgaattataagatcaagatttggaaatgtttttgaatcactttgcatactgtcccgaaacatcaatagtagtagctttgtttaatgctcgctaatggtattaatggattgaagctattaaattgtgcagtttggttacatcgtgctgactacatctgctggcattatggaccatgaagaagctagaaggaagaatgttggaggcaaggttctcggcttcttctattgaagttttattttatggggaaacagattttcattgagttatttttaacttttgtcctccattttctctgaaactacctttctctttctttcgaattttgtgataactttgatggatagtgttctgaaatcactctttttggtttggagcccttttttagacttcggatgcactcgtaaaattattctaaaaatctctgatttggctagtctcttaccttctctttaccggctataatctctaagttgcggataatgctctaattagtcatacgagttcatgtatcaaacgacgtcgtaataactcggaacaaaatcattgttgatctacatcatatcatctacattgaggcttaaaacatcatatcaataccttaggatcatttagaattcttagaactgattaactgtagatgaaatcacagcaacggattaatacaatatgcggttataagtaaaaagaaataagaagcaaaaaatactgacaaatcatagttgttatatcatcaagaaacgtggaaaacaaaagaagaagaaaaaaactcttcaagaaccaaatgccaaaggaacatagttgcccaatttctaactctagttttcacccataaaatggatcacaccttattagaaaatggtcttacggatcacacttccttctccagccaaatatggcccccgtctcatctcatctccggcgatgggagctcgaaagtaccttcatgtatttagatatgtaagagataagagaggagagaggaaggtttgatgaggagcatccattgttgatggtcttttcgaccttatcaaaggagaagccaagtgagagagacgtttcattttgggtttatagaccaaaaaagtggtcatttgtgagagtatcttcgaaagcatatgctttgaaccattaactaagctgacctgagtcccattattactacttttgattttcttcttcttttttctcttttgttagtatattaaaatctatttaaattattgaggcgagtaacatgggttgcttcgccacaaatcaaaagtagaaaaaaagtgaggtcctcttttcttcgcctagttgtttctcattggactgcttccaactcttgttggttctgtcaattttacgaggttaccaaatttggttcagttttgtgaatcacttgggaattaggttacgttggtattcttctgcgtttataaaacgtgcctatgatctaagtaactacccaagtcattgtctccagctagtggaaagcgacacgttactgatgttagagttgatatgatttgcatattttcttgttttaaagcacattttgtgtttgtgtttacaattttacatgaaacgaaattaacattccaccaaccatcaattatacaagtgctattaaatacaagatttaggtcagctgtctaatgcaatggaacttagcagcaattttgaaaaaaaaaatatggtactaatagcatattgttgtgataaatattactatctgatcatcacagtcattcaagtggctgtagtttagtggtaagaattccacgttgtggccgtggagacctgggctcgaatcccagcagccacacttgttttggttattttttcatttttattttacatgggcatgtgattagctttctgctaaagccccttaagataaatgacactgatgggcctaagtattttctctcggggggatataactaagcgttatgatatatatttttttgtttttgtcatctaagcgttatgaatatgcaagttagatataataataattaggccaaaattaattacatatttatccatgttaaactaatccttaataacagcaattctttcaacttatccatcacgttgctcgttggattaaattaaaattataacagtctgttgctacttatatttctggataaatcctttacaaaattagagaatatacaatcctgtcagcagatcccatccttaaaaaattagcaaaagaaatataaaatcagcgattaccttagataaaaaaaacatacgatttttgaattcatcctttaattttatctttaaggtaacaaaaaaaggaaaacataatcttaaaatcaccaaattggaaagaaatatggtgacataattgagaaaatatttacaacaaatattctgatgattcgatttgaccaaataatacagcacttttagtagatttatttaaatgtctcaattagtatttgtttatgaaaaaaaaacgaagaacgtgatggattaacaaaaattatctcctcacaaaggaatctttatttggtaggcaaaatataaattatatcgtgggcataaagaaatggataaaatttggattaaaaacgttaaacaagaattatccacaagtaaatcgtaacgcaatcaaaacgccgaatcagtctctctattagtaacggattcaccctaagcctctcctatataaatacgtgtcgcatctctttcacatttcacatcaaaacttactacttcttcttcttcttcctttaccaaatcttttcttctttactctttttcatcgtcgagaaaaaatggagttggatcttacacctaagttgcccaagaaggtttacggaggagatggtggatcttactctgcctggtgcccagaggagttgccgatgctcaaacagggtaacattggagccgctaagcttgctcttgagaagaatggcttcgctgtccctcgttactctgattcctctaaggtcgcttatgttcttcaaggttcgtttttttctataaaagttttctactttattgcgatccatgcgtttttgtataatgggtttgttcgatttcatcactctgcttcttcttttgagggtttttgatcttttctatgttctgatcttctttattgctttaaaagttgtcaactttatggtaattcatgcactttgaccactgtgattaggtttattgtgatgctgattctatgatctgatttttgttgtagaaagtgaaaaatatgatagtcaaatagatcacgactactgtgtgcaagaaaaaaaagtagtctttagctgtttttgttttgcttaatcacgtcttaatcgttgatctgatcaacctcgcgtgtaaggaattgaaagcttgtttatttgactctttttcaaatttctgtttcaggatctggaactgctggaattgttctcccagagaaggaggagaaggtgatcgcaatcaagcaaggtgattcgattgctcttccctttggtgtggtcacatggtggttcaacaacgaggatcctgagcttgttatcctcttccttggtgaaacccacaagggtcacaaagcagggcagttcactgagttctatcttactggcacaaacggtatcttcactggtttctccactgagtttgttggcagagcctgggaccttgatgagaacaccgtgaagaaacttgttggttctcaaaccggtaatggcattgtgaagcttgatgcgggctttaagatgccacagcccaaggaggagaaccgtgctgggtttgtcttgaactgtttggaggctcctcttgatgtagacatcaaggatggaggcagggtcgttgtcttgaacaccaagaaccttcctttggttggagaggttggctttggagctgatcttgttcggatcgatgcacactccatgtgttcgcctggtttctcttgtgactctgctcttcaggtgacttacattgtgggtggaagtggaagagtccaggtggttggtggtgatgggaaaagagttcttgagacccatatcaaagctggttctctcttcattgttccaaggttctttgtggtttctaagattgctgatgctgatggcatgtcttggttctccattgtcaccactcctgagtaagaacttttctctgcactttcctttttgaggtttgaaattgaaagaaactaatatgtttgaaacttttttcttgtgtgtttgtagtccgatcttcacacatttggccgggaatacatcggtgtggaagtctttgtcccctgaggttttgcaggcagcgtttaaggtggctccggaggtggagaagtccttccgatccacgaggacttcatcagccattttcttccctccttccaactgaagaaggagaagaatgagaacaagaaccagcttttatcttttatcgtttgttgctttccctcagagatttttgagggtttttacttttcttgtgattcaaggaagtttcttagtctagttgtttaattctcttcctgccttttccccctggaccggttcttgttctcgttgttttaaaatattaaaaaatcaacctttcctatattttacagtcttccttcttttcaacttttggaaaaattgaatcaaaagaaatttgtcttccttcaaattctcactttcatattaaacttcagaattttgatggttcaaaaagaaattccaattactgtaaacaaaaattccaatcaaacgaacactatattgaaaagtaagttcatgtaacgatgactgataaaacattacaacatgtgattttgatgacatgaaaagtaagaatggtttgataactactattaaaacctttgacaaacaggaacaggtacaccacacgcttctaaaacttgtttagcagatgtcatatatggagcaatcaatgggtttttcaagtactcacaaaaacacgactttttatctttcaattttgtgcaacattttgtcgatggtggggtttcgcctattatatctggtaggcatgctttgagatctgtcacgacgcatgccgctttctcctctgctttggtcggagccattgacgagagaacaaacgcaacgaaaactaatgtagtgaacttcatcttcatgtcttgtaagttgtaaccttaagtttctccttctatctaatttctagtcttgcttagaaaatgcttgaaataatcgattacgagatttgtttaagaatggagtaatgttttgcagtataggctgatgtgtgtgttttaggtatatatatagtgtcgactgtctttaattgttgattactggaattaagctaacaaatttgaaagcactgccttttatagaaactggaaagatttaattataggaaatgaatcaatcagttcacatgtgtatatacagtttggaaatgttcgaaaatacatatagaagtttgatattaacaaatgatttcaatcaatgaaaatcttcaaagatttaatataaataaaatttctttggaaagtaattaaataggaaaaaaaaaataagagatctggaaatttataaatttatttggtttaggttaactgagtatcggtttaaaattgaggtgaccaaggatgttaaaatgggctaaaagtttagggccggtccggatccgttgaaaaatataagctctgggcctgataaaattgaatgagagattttcgggctaaaacaaggctggccctatttgcggttttcagattggggtaaaccgggattaagagtctgggtcgtgaaaacgaaccggaggctaattggatttgttcttccttctccacattccaatttgagggcagtggaggtgtaacaacaatggcgcctctcaaacatctggagaaggaaaatccaatcatcgacgcatgtttccaagatttctgcgcctctcatggaattttaacaagttgtgttctacatcttctcttcttgtatctcgttttctcgtatcgattctatttgatttctcctgtttgcctgcaaaaaaacgactgtggttggcatatgaacatgagaaacacaattgcttagtccaattactgtaagttcactttaaaaagttttgaattctggaatctggatagtgcgctgtttgatatttgatcgtttaagctaaaggtgttcgacgaattagatttttgtagttatagagtcggattcggtttggaatgtttgtgttgatggcttttctcaaaattgcagttgaggatttccttctgcatgatctctacgaacttactgcattttctcaacggcagacaaatgcagatagattgaaagaggtttttagctttttacttaacgttactgtcgatttttgaggtttaattgtgtgtgtgcgctcaaaggtatgtgacatatgttttccttcggatgcttcagggtatcactctcatcctctctttgatagaacgtcagtgtcggccattggtgaatggtttaaaactgttggaggatctacaccgtaataaacatactctgtcgactggagacaaagagacggactcattgcttcaaggtggattccgtgagggtcagcttacagaacttgtcggaccttcctcttctgggaaaacacaagtatgtattttctgttaggcatttcactattcatgtttttgtcttgtcttctgtgtgaaaattattcatagataatcgttttaaatctttaggaattgtagattgtttcattcaaacaaagagactgttcctagaaaaaaagtgttgtctttgcttaccctttttttgtgctctctctttacattgtgtgatttcttatgaatgactagttttgcatgcaagctgctgcaagtgtagcagagaatcatcttggcagagtcttgtatttagacacagggaactctttttctgcccgacgcattgctcaatttatctgctccagttcagatgctactttagggcaggtttatttatttcttgtaccctagcctatgacccagttctttagtcaatcaccaattatttatgtttttaatcttatggacaagaaacgtataagtgcagaaagtcatgagcagaatattatgccacacggtctatgacatatatacactgtttgatacgctgcaagatctagagattactttgaggttgcaggtattaagctagctaaaagatgcaatctcctcaatgtcactttaatgtctatattcttagtgttaaccatgagttatctatttcttttcacttgcagatgaatgtgaatgagtcccgactacgattgttagttgttgattcaatctcttctctgattactccaatccttggaggcagtggctcacagggtacatacccttgtatgtctatcactttttcttcacctcaatggttaacagttgtgcgggtgattatgaagaatgactcagaaattggtgtgtgcaggacgcgctttgatggtggcaattggatatttgcttaagaagctggctcatgaacatagcatcgctatactggtattaaagaagtttcaggccattaagcgtgtccttgtgctttaaagtcaaaaccttttttttgtgtctccttgtgtattgaaggtgacaaatcacacggtgggtgctggaggagaaggtggtaaaaccaaaccagctcttggggaaacatggaaaagcatcccacacgtgagactttcgctatcacgtgaccataagaacagcaactgcaccatctccatcttaaaacacacatccttggtacgttgctaaccaaacaaaatttctgtatctcttagtccaacgtcatttcctttggttttacagtttctgtgtgtgattattttctttgtagccttcaggccaagctgcgaagaccttgactcgcaaggagaatcaacaatgtccataagcctccttggctatatattccacgcccatcgtttggatgtgcaagaagagaaccacataaatgaatgatcagatggatttcttgtttcggttttacatgtagaattatactgcagcaatgaaaattaaaatttgttgaacaaatgagtggtgtgtatataaggatcacatgaatatagaatcacattttaaaactttgcgcgcacaccaaaaaataaaataaaaataaagctttctagtttattccgagtttgcatatttaagctgaaacagagcaaaggaagaagacgaagagaatccgatgcgtagaagactatcttccgtgctaatcaacaatcagtgcatcgcgtcccaacgccattaccacacatctcgacctgagaaacccacaaagaaagccagcagccatgaaccaactcacaaattcaccaggaagccatgggaggaagtgccatttctcaccgatctcaaagaaatcgaagacccagaggaagctctttctctcttccaccaataccaggaaatgggtttccgacacgactacccatcttactcttctctcatctacaagcttgcaaagtcccgtaacttcgacgccgtcgaccaaattctccgccttgttcgctatcgaaacgtccggtgcagagaatccctcttcatgggattgattcagcattacgggaaagccggttcggtcgacaaagccatcgatgttttccacaaaatcacctcctttgattgtgttcgcacgattcagtctctcaacactctcatcaacgttctggtcgataacggcgagttggaaaaggccaaaagctttttcgacggggcaaaggatatgcgtttgcgtcccaattcggtgtctttcaatattttgatcaaaggatttcttgataaatgcgattgggaagctgcatgtaaggtgttcgacgaaatgcttgagatggaggtgcaaccgagtgttgtgacatacaatagcctgattggtttcttatgccgaaatgacgatatgggtaaggcgaagagcttgcttgaagatatgattaagaaaagaatacgtccgaatgctgtgacatttgggttgttaatgaaaggtttatgttgtaagggagagtacaatgaagcaaagaagttgatgttcgatatggagtatcgtgggtgtaaaccgggtctcgttaactacggaattttgatgagtgatcttgggaagagagggagaattgatgaggcaaagcttctactcggcgagatgaagaaaagacggataaaaccagatgttgtgatctataacattctggtaaaccatctttgcactgagtgtagagtccctgaggcttatagagtgctgacggaaatgcagatgaaagggtgtaaaccaaatgcagctacataccgtatgatgattgatgggttttgtcgtatcgaggattttgattcagggttgaatgttttgaatgcaatgcttgcaagcagacactgtcccacacctgcaacgtttgtatgtatggttgctgggctgattaaaggcggtaacttggaccatgcttgctttgtgttagaggtgatgggaaagaaaaacttaagttttgggtctggtgcttggcaaaatctactttctgatctctgcatcaaggatggaggagtatattgtgaggctttgtcagaagtaatttccatctaagcaatgacctttttaaaggtaagattctcatccttgtttattcatgtctgttaaaattaacagggtggacgaatttattttcttcttaatctttggttaattcacagtttcacacaatggaacttctaaattgatacattcaagatcttgtggtgaagttatagctgaagtgttctggctttttttttcttctttcttttctctatgtttcttctctaaaccgaaccacccatataatggaaaagttgtcagtatgtcacctactctgtttcatcaactacatcttcttatatcaccaatatagctcattttatatataaatgctcctctagaatcaacgtatataaacacacgagaattagaaacaattcaactccaattcaaattaacaatcttagtctctgatctttctacttgtcaatggcaggctgcaaagtactcttcttcctgattttagctctcgccattacttttgtctcagctgctcggcttcttgatgaagaagaagatattgggttggtccctttgcctaccacgagtcctggtcctttaccaacagttggtttaggcccctttcccactgctaattcaggccctgcaactggtatcgcttcaggtacaggttcagcctcagggggtttaggttccttgggtaccaatactggccccgggcctctatcgaccactggttctagtcttttaccagttgctagttcgggtaccttgcctgttactggccccggtcctctaccaaccagttctggtctcttaccgggtgctagttcgggtaacttgcctggttcaggttcagggcctttgcctactgttggttcaggtgctgcagctacgggtctgggcgcaggtgcagggtcagtgattggtggttcagttcctgacaacactttggttttcttcatgcacgatatactcggtggctcaaacccgacagcgagggctgtgactggagtcgtcgcaaacgcagccctcagtggccaaattccattcgctaagcccaatggtgcaaacctccctgttagtaacggcgttccatcagacaataacaacaatggaatcctgaacaataacaacgtcccacttctcgtcgggcttggcggaaccacttccaacattctacagaacaatggaaacaacatgttgaacggtcttcccgtggctaacggcggccagctcccatcgggttcgtctcttcagatgctcatgtttgggacattgacggtgatggacaacgaactaaccgaaggacacgaactcgggtctggtctgctgggtaaagcccaaggcttctacgtggcaagtgcccttgatgggaccagccagactatggctttcacggctatgtttgagagcggtggatatgaagatagcatcagtttcttcggtgtgcatagaacagctgcatcggaatctcatcttggggtaatgggcggtactggtaagtatgtgaatgcgagaggcttcgcaattgtcaagacttttacgggttcctccgggacccagcagcagcagccgcaccagttcacagatgggctcgagactgttctggagtgcaccgtttatctttcttactagtttcttttccctcttctcttatcttttttgtctaccaagaaaacgtgaaaacctattaatttgacaaccaatcccttgttattccaacttttactcttaagaacaaaaacagagaaaaaagttagttaccactgtgactgatcatttaacaaactatacctctaaattaagaaagacaatgatgtatacatgcatgtgttttatccatacaacctgtaaatttcagtctaaatttaacacaaacaatttgttgtcccaaaatcaaagacttagaaaacaaaatgagagacataaacggatgaccagcgtgtacattttgacgaacttggaacggctccaacaaaaaaaaacagtcgccgaaacaagaaaccgaagatggtaaataaataccccaacaccttaagacccatttcttcaaacccaagaaacaatggtgctcttgaaacccaccaccttatcaaaatcctctaaggtcgggccgcaacagcaacagggcttctccgagtctctaatcggcgatagtgtggaggcagctgacgccttcatatgccaatgggttactccacacctctgcgactcttcttcttcttcatgcagcctctcttccctcttctccgctcaaaaccgcctagaaggcagacgcttcctcgaggttctcggcaagttacaatacgccattcagagcaccgttgctatgaatccggactccgctaagcttgctaaaggacaggatttgatgcggaaagctatgaagcatttggagaaggagttttaccgggttttgaaatcgaatcgccgctttctgagtccagaatccgtctctggttggtcttctgaatccaacataccttcgagatcaagtggaaccgcttcggattcttcatcagatggagagctttactctgaatcctcatcggaattaggtaaagacataggaggaggagggaattctgatgctattgttgatttgaagatgatagcaaattgcatgatctcctctggttacgagaaggattgtgttaaaatctacaagaagtttcgcaaaaagatcatcgtcgacacattgtctcatctagggttcgagaagctaacctctacacagatgcagaaactggaatgggagattctggagaagaagatcaaaatatgggtgattgttgcgagagtagcaatcaccactctgttcaacggagaacgaatcctttccgatcacattttctcctcctccgtcgctgaatcttgcttcgttgacataacgctacagagcgcgttaaacctcttcatcttctcactaaccgtagcgaaatccagaaaaactgcagagaagatcttccctacgcttgacgtttaccagacgatcttgcaactgactcccaaaatcgatcagatttttagctacgattcaaccgctgccgttagattacaggcgaatgaatctctagagaagctatcggaatcggtgaatgcaatgatgacggagtttcaatcgtcgattacgaaggaatcgtcgaaatcggcgatttctggcggcggagttcatcagctcacgaggtatgtgatgaacttcatcgtcttcctcgcagactacagcgattctctcgccaccattctcaaggagtcatcgttacctttaccggaggattacttcagtagcagcggcgaagagaatccaggatccggtgatcgttctccgatggcggcgagactcgcgtggttgattctcgtcttgctctgtaaaatcgacgccaaatctcggctctacaacgactcggctctatcgtatctcttcctagcgaacaacctccattacgttgtgaccaaggtccgtacatcgaatctcagactcgtactcggagacgattgggtagcgaatcacgaggttaaagtgaatcaatacctcgagaaatacgaaaaaatggcctggggggatgtgatagcgtcgctccccggtgattcaacggcggggacggaggcggaggagtctctgagacggttcaacgaggcgttcgaagaggcttacaagaagcacaagacatgggtcgtacccgacccgaacctgagagacgagatccaagcgtccatagcgagaaaactaatgcccgggtatacgggtttctataagaaacacccggtcgggtcatgcaatattgtcagatttacccctgaagatctaaataattacataaccgacctatatgttggtttaggaagatccgtgcccgtatccaaaactaagaagtatatggttagcccaagccatacgacggatttgaagtaatagctccatgtaaaaagccctcatacgtgtaactctgtgaaatcaacgaatcataggccggtcctaggctaaaagcccatatatcaattttgggcttcaaattatagaccatagatataaaagtctacatttcatttgccatattcagaatcagtgtgtacttgtgcttgcttttgttctctattgatctgatcttcttgtacgtgtgttgttcacactcacgcctaaatcacattcttctttataaatctttttgtttaaccttttcttcgcaaacccataacgtgtagggtttagtttccttgtagtttttagtttattttaggattcagtttggttcggatttatgcgtttttgtgactaatagttttaaattttgtttggcaatcgaatggagaaacagtcatgcacaatagtaaagcaaatgacttgttttatatttttcgttactttgataatgttattatggttagctatggcctatgcatgcaggcggatttgaattgagtatatatttgttgaaacaaacatatttttacaaaaatgaaagaaaaaaagtactccattgacttttttgtaaaattaaatagataaatcatatgatagatgaccgacaaaataatatggctcgttgctaaaaaaggccatgattcgtcgcaggaaaataaaaagaattgtggttggaagttaagtagttagatgagcaagtctttaatgatgatggatttattttagtattctgtatgcaaacgtaggagacgtataccagttttcccacgatgtatctgccatttccttaaatttttcagtggcaacatgcaatgttaacttcaaattctattgaaaaaaaaggttaacatctcaacatactacttctttttgtccatattttgcctgcataaaaaatattaccatcacatatctctctgtcttgcaacaaattaaccaatatacatttggccaacgatctagggtttgaaagaaatgtttttaacacacggacacgtaacttgaatgccgtttatcattataaagaaaacaaacaatatacaaggacacttaatcactaagccacaatgaaagagacatttgattaataatgcattcacacgtaaatgattgtgaaccagtgtcatctctccatttgctaccaatcgaatcgaaaattttggtttatttggataatcttaagaaaagtcaaacttataaaatgaaatgaccagctaactaaaaacaccggcaaacattaactcctgtaattatcaacttagaaagaaaaaaacattaactcctccattattagaactaacctcaaaacaacaactcttaatgctttcacaaagtgtttccaatcttctcgaccatttttataaagcaaattgacacgcagtaaacgcgtgatcgtcattgacaacatataatgcgtccaaataaatttaaatgatgtataaaaaatcatagtctttgtagaattaaaagagatggttatgaatttgaatcgatcaattaaataagagaaaaaagtaaaggacgtagtcgcacgcggatagtgtgagtaagcgttacgttgatggctttgtagtaaaagagagatacgtaattaagttggtggaggttgagatgagagctttcatcacaacactctcacttatatccaaaaaagttcattatttcataaacctgtatattgcttcttcatactagctcactttctcaccaaatctctttattgctctttcacctacaacctcaaattttctatatagcatataataaaacatattaattaattttgatacccaatatatctaaactttaaaacttaatttggtccaacaaacgtcaatcgatacaatcatgtgttcttctagcttatggattctatttgacgacatcatgaagagtttgtacaaatcaattaatttggatattacataaactaaaaatatgttgtttttttttacggatgatcttttaataactgaagatgaaaattaattttagttagaaatgtcttgaataataattaatgtcacagaaaagtcagaacgtaccaaagatttccgcgtgtattaaacttaataaatagacacaagccaagtcttagcagtgtactactactaacacacatccacatcaatgtgtcatctttgttgtatgacacaagttagtatgacaatcagtgtttgagtagtgatggtttaaatggaatgtttgagaatccaatacaattggcggtctgctaatggccagaatatctgccaaagttattttttatctactgcttataaatcgtacaacaatctatttagttctctttagttttgaccttgaagtccatgaatcttaaggacctcttctccacatcattcaaattcacatatcggaaacacagtactgcttgaatgcccctcccatacaatatgtctatccactgatccacaataactcgatggtgcatgtgtgtgtgtgtgtgtgtgtgtgtgtgtgaacttcctggctgtaataaatttaataaatacttaaatagacaggcgaagtcctcgtccacttttctacacctagcatcaatcatcaatgtgccatcttattgtttcaatttttcttaccataactttgtccttgcatgtaacttttccaattaaatacaagtctgtcttttattaacccccgagaatttactaaatgatattgacataatctattggacggaatgagttgtcaaaaaacgagagctgtcttttcctgctccactgtcctcttatatatcccacaacaatctttgctacattttcatgcatttttaatcactcctctttctaactccaataaaaacacaataatggatcttcttgttatgctcctctctcttctcgtctcttatctcatcttcaagatctggaaacgcatagactccaagagagaccaaaactgctacatcttggactaccaatgtcacaaaccttccgacgatcgtatggtgaacactcaattcagcggtgatatcatccttcgaaacaaacaccttcggctcaacgagtacaagttcctcctcaaagccatcgttagttccggtatcggagagcaaacttacgcaccaaggctcttctttgagggccgtgaacagcgtcctacgctacaggatgggctctcggagatggaagagttttacatagacaccatcgagaaagtccttaagagaaacaaaatttcaccttcggagattgacatcctcgtagtcaacgtctcaatgctcaattcaacgccttcactatctgcaagaatcattaaccattacaaaatgagagaagacataaaagtcttcaacttgacggcgatgggatgtagcgcgagtgttatctccatagatattgtcaaaaacatcttcaaaacatacaagaacaagcttgctcttgtcgtgacctcagagtcacttagtcctaactggtacagcggaaacaaccggtccatgattcttgccaactgtttgttccgctctggtggctgcgctgttctcttgacgaacaagcgtagtctgagcaggagagccatgttcaagctaaggtgtttggtaaggacgcaccatggagccagagacgattcattcaacgcctgtgtccaaaaagaagacgagctaggacatatcggtgtccacttagacaagactcttccaaaagcagcgactcgtgctttcatagacaacctcaaagtcatcactcccaagattcttccggtaacagagcttttaaggtttatgttgtgtcttcttctcaagaagcttcgtagcagccctagcaaaggctcgacgaacgtgactcaggcagctccaaaggcaggggttaaagcagggattaacttcaagaccggtattgaccatttctgcattcacactggaggtaaagcggttatcgacgcgatcggttacagcctcgacttaaacgagtacgatcttgaaccggcgaggatgacgttacaccggtttggaaacacgtcagcgagtagcttgtggtatgttttggggtatatggaggcaaagaagaggctgaagagaggagatagagtgttcatgatcagctttggggcaggtttcaagtgcaatagttgcgtttgggaagttgtgagagatcttaacgttggagaagctgtagggaatgtgtggaatcattgcattaatcaatacccaccaaaatcgattttgaatccgtttttcgagaagtatggttggattcatgaagaagaagatcctgatactttcaagatgcccgaaggatttatgtgaatgttttcttgggaatcattgtaaacatacatatacagttacttcaaactgcaaatcccacaaaaggtgactatatagtttattttcctctttctttcttttattttatttaatgtggattctgaattgctacattttactctctctttctttctttttctttttttctaattggatgggaaagaaaatatgaatgacaaagatactgcgatatactagttttctctcatttttttaaataaataattctttgggtgtaataatctatttattgtatcctttggtaaataataataccccaaaaattttaatgttacgcttgatgtgacatatttagttactaactaaagcttgtcacatatttatttttgttagcttgtcacgttacatgttcatatgccacttttagttgttgttcaaacagaacattatcatttgttatctttttttttatcgcaactccttgtaatctgttgttctattcttcattacggtgtattctcttaagcaagttattagggtttaaaaacaaaaaaaaatcagggttttcttttagaaatctataataattgagaattagataataataattgagtgttcatgattatgaaaactgtcttaatgtgctcgagagctattgcctatatatgtgtatacatgtcattttaaattgtattatgaaattggaataatgtgtcagcattcgattggtgaaaggaaaataaaaaaggaaaagagagttggattggtaggatgtgcattaaattcgcattgatttcaccacccgattcaggtcccatatattccaccaacatatatttcacggatcagcttaattaatcaaatattcagccgccacaattatctaaactaaaccaatggtgattattaattgcgaaatagtaacatttatattatgtcatttttaacgtattcagatctagaattagcaaaattaaaattgttttcttcaatggatgcttactacttgtagatcattttctttattttttttcacaagattttcagatgtttgaataggaaaatattcgagttaaaaaaaaagggaacttttattgtttggatttcactatcataatctaattctaacggtccacaacaattttgacccaaaagaaaagggtccacaataattaatccgtaattccaaaaattatctttgaaaattgctttcacacaatatattaaactcgtcattctagaataaaccacatttaaagcagcagagcagtcaaatagagatgatgcaccatgtccttttgattgtaacaaaatttacttggattggctatatatttattatagcatggattggtcaatatgaaatccatgtgtggctgaagctttgagaattagaagaagactagtggttagagaaataagagaatagtgacagaagatttttagagaagagcagagacctgatgatgtataccattaccaaataacataaagcagcatatttaagtggttagaatgtattaatgttgcctagctacttgtaggcttctttatttgcatgaagctcttctgtttgtcactcacttttatttatcttaaacttaattcgtcttttctttgttaagaaaatgaatttatatttattgcgccgaaccaatcttccatttattatttgaggtggccgagaagtttacattattatttgggtcgaagacttctgttacctacaacgcagagtcatatttaaagaataataatttactacttaccttagcttcaaagatcttggactgccaaaatattttcttggcctcgagaaagccttcttttctaaagtctcttgctcacaaaaacagtaagattttaaatatagctgatgaattagatgtggttaagtcagtgttaagcttctaaatattataaggagaacactgtggattaagttaagactctttttaattgaataatatataaacatttgattttgtttctaacgcctaacctagttgctatcatgaagaaaaaaaactatcagatgtgtttggtatcttattatttgcatggaatggcatcgtttgtcataatacaaaaaaaattgaaaaaataaagagtaacaactaaaaaagaaagcgaaagcgcacacgaggtcgaaaggtcaagagagtggaaagcaattgcaaaattgaacgattaaaaactttattattgtcatactgatacatcaaattttacttttaatttccaaacctgcacttatagaaacgatcatacatcaaagctaagaaacgaatctacttgctatttttaaaaataatgaagtagagattaaaaagaagaaaacattttataagattgaagagtgtcatgatcactacctttcaagaaagttgcacaaatatttatgttttagattcgttttcgtttattggctgatggattcacatacaaaagtgattgacgttgctttacatgtgcctctcatgtttcttattaaactttattaatcttgtttcttccactttgtcttctttctttctacttgttgatcttaacaagaagcaccaactttttttttttatgtcattacattttcttgtatatattcaaagtatcatccacaagagctgtctctgtaatattttacattgctgcctggtatgatcaatcattcttcttttttttcttttgctgcttcgtagatgagatatcgaacaaaacccataagttttctgctaatatccaattcgtgggtattgttttttgttttttccgaaagatttggattgttttcttgattacatcgatggaaatgaatatatttcggtcaaactttgttgttattcaaaaagcttaatgttttcaaagattgtgtgcatcactaagaccagaccagactcataatgtgcagtttataatctttttttttctgccttgtagaaagagagtgattgatcgtttcatcggattcttttgaaagagaggttttgtgactgtatcaaagatggaaggggaagaagacactgtggcgggttctagcataccaaagaagaaaatgatgaaacagctgacaggaaaacgcgacgacactctgcttcattcagcagtgagacacggaaacaaagacagagttgttgagattcttacgaaaaccagagagtctgagttgaatcagctgttggggaaacagaaccagtcaggcgaaaccgcactctatgttgcagcagagtatggtgatgtagagattgtcaaggagatgatcaactgctatgatcttgctctcgttgagatcaaagcaaggaacggatttgatgctttccacattgctgcaaagcaaggagatctcggtacgtgtaaaaccctttgaaaattgccactaaaaccagttgattgcgtcttaagcattagttcttttggacttttacagatgtgttgaaggttttagcagaggctcattcggagttagcgatgacggtggatctatcaaacactacggcactgcacacagcggcaacacaaggacacactgaagtggtaaactttcttttggaactgggaagcagccttgctggaattgccaagagcaatggtaagacggccctgcactctgcatcaaggaacgggcatgtcaaagtcattaaggctctcttggcatccgaacctgcgatcgcaataaggatggacaagaagggccaaacagcccttcacatggcggttaaaggaacaaatgttgaggtcgtggaggaacttatcaaagcagataggtcttctatcaatatagccgacacaaagggaaacacagcgttgcacattgcagcccgaaaaggcagatctcagattgtcaagttgctattagccaacaacatgacagacacaaaagctgttaaccgatcaggcgaaaccgcacttgacacagcagagaaaattggaaatccagaagtggctcttattttacagaaacatggtgttcccagcgccaagaccattaagccatccgggcctaaccccgctcgggaactgaaacaaaccgtaagcgatatcaagcatgaggttcacaatcagcttgagcacacacgcctgaccagaaaacgtgttcaaggaatcgccaaacagcttaacaaaatgcacactgaaggtcttaacaatgcaatcaactcgactactgttgtagctgttcttattgccacggtcgcttttgcagcaattttcactgtcccggggcagtatgtagaagacacaagtaaaattccagatgggcattccctcggggaggcgaatattgcatcgacgactccgttcataattttcttcatctttgattcgatcgcactcttcatctccttagcggtcgtggtggttcagacatcagtggtggtaatagagagcaaggccaagaaacagatgatggctgtgataaacaaactcatgtggcttgcctgtgttctcatctctgttgcctttttggctttgtcgtttgttgttgttggtgaagaagagaagtggctagccatttgggtgactgctatcggggcaactataatgattacgacgttagggacgatgtgctactggataatacagcacaagatcgaagctgccaatttaagaaacattagaagatcctccatcaacagtatatctggatcctgggggattccccagcttacggattctgatattctccagaacgagtgtaagaaaatgtatgcaatctgacttgacgatactcaatccgttttcacatttatgtacacggcaagaacttgatgtacctttttctgatacggttgattcaatgagttgatgcgggtgaagcactggtatggaggagttacctgagatgcttcgaacaggagaaatcgaataaggattagagcagaaaggaagagagtaacattaatgtaacaccgattctaaatgggggaagaaatgtgcattggtttaacctatagcatgaagaatttcagctatatatgatcaacaacaaaagttaccaggagttaaataaaccaaaaagctaaattccgagaaaaatacatgttggatactggttcctgttctatgaatttcctaaccaatggatactttggtaggaaagttacattataaatactgaagaaggcatagtttacactcaatgttgagaatcttgagaaatggatggtcttttttccagcatctcgtaatagagaacaaaattttcctgcaaagaaatgattttggggtattcttcagaggccaaatgaagaaagatacgatgagcagaatttggatgtactcaccttttgaacgatctcaaatgagtttggatcaaaacagtgatatgatcctctttcatacgcatttgttttcacgagaggttccccgattctaatgaaccacaacctgtgttctttgtggtagaaccaacccctattgtaactgcaaaacaataagagttatgcagctttatccttcagtgcattgcaatctgataccaaaccaggaaattaagacagaaacccattttcaagtcatggagaagaaagatggaatcaaaagttgatgttttgctttcatattccctttctttttcaaatgtgaagacaaattcatcttcaatctatattccaagtttaatatatgacaactgtgaacaaaaaactccgaagaagcattttcatatttacaatactagagaaacaaaaatatattatgatgaaaaggacttacagttcattagccgcatagagttgcgcctcatctttcggcatgctgcacgacaaaaattgttatggttcctttgacaagagagtgaatcaacaagtactttcaattccaaagacatatacctatagaatacgtaaaacaatgtttctaccaataattttgcaaagagcccttgctgcatccaccaaaaaaaaattaaaagttaaaaacagctaatgaaaagaaaacacaaacccagatggacaaatgaatgatggtactgatgagagactagagtaaattacatgtagaggtggagggttttttgcgtagtaacactgcggtacactgaattctggatcaactttagagggttcattggaccaaggcgagccaaaagtcttatgaagattttctgttgagttcaaatttaaccccagtgttgtcagatcaataccaagtgccaaagaagtcaagtcagggtcgctcatctttatcacactgagcaaaccgagtaagccaaaccgatcaggatttgactgtgtcgattgcattgattttaatcctacatctctgaaaggttggctagcagctgacatctgctgcaagcgatactgggctgagttctgttggtgctgatattgctggatgagctgctggtcataacccatcccagtgatagaatttgcagaattcatagatcttaatccaatacccggagctccaccagtctgaaaccaatcaaatataccttagaaagaacaagaacgttggtttcatgaaataaaaccttaaatgatctccgcctgttttaaaatattacagactacatcatacctgtgagtggtaaggcggatgcgaagatgagaagatgtcagacccatgtaaggaaacaccactactactcacagcttgagcatgttgttgctgttgttgaggacggtgtgatgtatatgctccacctaagttaaacccaccagaccttcccatctgcaaggagccgcactagaggataaggtaaatgttttgaggaaaactttcaatggaagagaattaaacccaatgacattttttgacaagctactcacagataattgttgagattgcatcattaaaactgagttctcatggagttgttctttatgatgcaaatccattggataatcagcactactacctgtataaaaccgatcaatcttgtcatgactgatgactataccttaatctaaaatctatttatacgaacaacaaataatttgaatgcagacaccatgaacgtgttggaaaatttaatagacagactctgtactagtattatgatgagatattaagagagtaatgtcacattggatcatgcagatcattagtaattcagctgggtgtgattacaaaatcactctcaaatctctcaacaccaaatattatgcgaatgtggaaggtagatggttccttttggggtatgaatgtcaaattccataatgcacacaaatatgacccaaattgagacaatttctatccagttggaccattttaaaaaagttgcagatcagaagggtgacctttgtatcctggcaatgctggaaaatcttcattttggatgctgaactcttggttttgctgaactatagggctgattccaaggccttgtttcaatcgagaccctaagaagtttcagaaaacagcggagtatagttttgcttcaaaccaataaaagaaagaagatagaattaaagggtttttcttacttacccaattgtccttgactgcccgcagagctggggcggcttgtgagctgaggaaaatcattattaatatcaaacggagaagtgtcgttggagttcatatcattcagcaaacccatagagcttagactgttcattgcttgaacatgattttgggaaagtcctccagctgaagggtaagaatttcccagcatcgaaagaacctgcggagatcctgaagagaaaggaaagaatataagagtgtaaagatatcataaacgatgtgacgaaacgagaaatttggggaaaacatgaggccatttggttactggagttcgactgattaggaaattcaaacaaaatcatgagttattcgattaatgatttctaaatactagtagaaatccggtgttgttcatttaatgataaaggatttaacatcaatactaacggaattgtaaatcaactaaaaccatacaaatgcataacctatttcaacaaagagcagaaaaggatataaatcatgaagtaccttgtggcaagaccccacccatcatgcgattttgtccaatatttccggatccgctatttactgccaaatttagccgcgaaccaagactcggaatcgacaatcctccaccagagctcaaagtcctacccattgtgcctccaccaaccatattccccatagaactcgtcattcgagaacctacatttcccaatattggagaaactcccaatcctggaacagtaaaccaattaccaatggtggtagaggtaggaagagttcaggaatggaaccaccctattagtgtaactactgaattaaggttttccaacagtatttatacctcccctattagtgagtcctgagtgtccatgggagctaccatgagacatctgcaaataagaatccaaaagaaaacttttaagcagagccaaagcaagggttcatatttgcattatttttaggataccaacacataagcataactgcacctgagagagtgcaaccggaatattgctggatgcaaatcttccattcgaaatacttccattttgttgttggacaccagcagatggaacaccatttagacttgaatttctcgatccaagacttcccgccaagttgggaacattaaagtttccatgaatattatgaaggccctgaatagatcctataaaaagaaaaaaaccaatataagttcagaagaattacgaaagaaatagcgccggagacgtctacccaccagcatgatgaaaaactggagacgctgccccagactgaccggagaaagaagaagtaaacgtcctccctgaaccgtctgacaaattcgaggtagacccgtttattgaggactgaggatatcattgaaataaccacaagtcagaacgactgataaacattatttatcctagaagctacattgacaatactgcaacacactgatataaagatatgtggaagaagtacattaagtaaacttgacatttgcagagattaatcaactccagaagcaaaagttcataagcaaaccaagcaggaacccttcagtgagctcaggaatgtgagattgcagtcgtgacctgaaaagaaggattatatggtgagacagtaaatacatggaaaggaacaaactttggattcatcacagaactataaacagtaaaacttcaacgtatctgaatcatacattacaaacaatcaaaaccctttcaacaaccgatcaagggttcaagagaaagtttaaccattgcgaaatcggaaaataaacaaaaaccctaaagcactcagatttataatcagcagtcaaacgaaattagaacctgataagaatatggacccaaaggatgaacaaagaaactcaatctcgaagctccaaggaacgaaattctcgaagatggagaagaaatcggaataaaaaaatctgatctttttgtactactgaccgtttttagtcttatgtgtttaggaccccgtcctcggaggcgaacaaattaaagggaccttttttttctctacatagtaattttatttactttcagggtttactagtaattaaccatgttattaaggtaaattatcaataattatagtgactaataaaattaggttgactatatccgaatgagatagtttcttaattgatcatcataccatatgagacaagttgcaatctggtttaaagatcttgcggggaccaaaaatacttatcaagtaaccaaaactagtaagctgtcactgcagattttgcacatatatactataagtatgtgggttatgaagacataaaggcaaacaaacaaaagaaagagatcaaaatgttgcatctgtcttattcagtatgacatcttacaagaagaaggatgatgctgtgttgttcaatataagttacatcatattcaatgatttgggaaaggtaacccaaagagtgcggttttgtcgaatgttcttcaagattccgaggatgtatatttgagaatagctgcgtcgatcctctccttgtctctagttgcaaatgattctaagagaactccgtttttgtagaagtggaagagaggaaccgcctgtaagattgtagtatatcaaactctttactacgctgttcagttaatttttgagtgttgttagtaccaaaattctaaagagggattaccttgatacggagcctttctgcgacttcagattgttcatcatattcatctaccacctgcaaatagcagcattagagctattaatggattttttctctacttctttattgtttatacatcaaagatgagagatcagaaactcacattatgcttaaggaagataacaggagcttcttggtcaccagattgcttgcacagttttgagaagccctgctctatgtatttacaactcccacatgcagtgcgataaaaatcaaccacaaccaaagaattagtttctttcgacttttcaagaacgctaagcaattcatcatctgtcttgaactcagtgacacactccacaggacatagatcatcattttcatcagataactccactaggttttcctgacttaagctttttgctatcccacgctgaagcgtacaacccatagtgatgtttatagaagactcggctcttggaaacgacaacctgactccgttgttgtgccagacccatctatggttttcaacagtgtttatgcctcccctactagtgagtcctgagtatccatgatagctacagtgagatatctgcaaattagaatcaaaaatcaaaattttgaagcagaaccaaagcaggggggtcatctttgcattgaaataatcctagaagttacataggtaatagtgatataaaggatatgtggcagtacattaagaagacttgacatttgcagatatttaaactaactccacaagcaatagctcatcagcaaaccaagcaggaacactttcagtgaactcaggggtgaaagatagcactcgtagttggttgagtggcctgaaacgaagaattcaatggtgaggcatgaaaataaccaaaacagagatatgacatgtaaagggaacaactttgaatccgagtacaacacagagttctaaacggtacaagatcaacgcatctgaagcataaatttcaagcaatgaccccaaaatctaaaccctttcggcaactagatggggattaagacaaaacatggaatgaaccttctaatgtcagcaaatcagattaaggattcaactgaaagatcaaccatccccaaatcggcaaaaaccctaaagcaatcagaattgtaatctactcacccgtcaatactatggacccaaaggatcgaactttcgaaataaaagttgcgttcttttgaaagtacaaaccgtttttctgtagatgcgcttgaaccgtcctacttgggacggaaatcggaacccagacgaacttggtatcgactttgtcagccatgacattgaaagaacctgttgacctattttcaaccacaaatcaaaatttcgtatcttagttagattagatgggcccatgcaacaaatggcgctactacgacccttattattttgaataattacatttatgtagaggcagtaaataatttgtggagaatatatatatttagattttatttgataatgaatctaataagacttctattttcagaaaataaatattgagtttggatataaagataactaaatcttatctcctcaattaaatttaagataaatctaaataatatttcagagattaatgtaaatattttaaaattaagatattttacatccttctcactttctcagtattcatgtttcataattttgatctcatcaaaagataaaaattataaaaagtcagtttcactgtaattaaactcatcatcaaaccaagtttgttttaaccaatttcattattgagtttgatactgtccttacaatcaagatccgtaagagaaataatcaatatgtacacatcgcaaattcaaaagacataacacagaatcaagtgatcattaactaataaaaaatcacacagagaaaaaataaaataaatctttgagctcccaacgaggtggtgatatatagcggtgatgttgtttagacatgatcatctgctttagcagtctgatttcccgatgtcccattaggtttttcagcagtagtacctttagacaacaaccaaaaaatgtgttagcaatttattaataactttactaatctattgagaatgtataataagttacgttgttcagtacttttagccttttttgctttgtgcctgagacagcaaactaataaaaggcatataacaacgacgatcacaatgaaacccacaactgctgcgatgatgatcccgatcaaggctccaagtccaacagtcaatgctcctattttaaagctcttaagtttctttttcgcacctgcaattttgtccaagtttgtttattatatcaaaattaatgtacctacaagagtacatggtccaaacataataacatgaataagctcaccagccagtgatcctattttcttatctttttctttcttcttcgaatctgcaatttaagtttgtatactgtatcaaaactaatgtactgaaaaggcttaataataactggtcgtaacataataaattaagcgatctttctttatagtttaggaaacctttttttttacttttgcttggagagctctttgaacttgatttattcacaacagctcccgagcgaacgactctggttagaagacgacgaccttttactacatcttcaagaacgaccattgaagaatcttgatcactcgtagtcataatataggattcatcgtcttgtctaaaacagagagaaagcagaacaatatgtttatagttagttgcagctttaagaacgtaacacaagtgaaaaagtagggttttgaggtgttcttactttgagacagcatctctcgtggaaaaagaatatccagaagctaaagagagggacacgagtacgaggaggacgatgaggagaagattagaagccattgaagtcgtcttcttgtgttttgtcaatgtaggaaatgtacgtataaacatgagaaaagactttgctatatataggaatttctctatttgcatatctctctaaatgctcacctttttttattaccaactgataattgtataactcagatagttgttggatgtgctttatggaccgattggtaggctgtctttttttttttttctgattatatcgtttgactagaaaaactcctctaattttaaaaatgtaatggaaatattttattttttaatatatcaagtagctagtaacagatttccaggaaaaaaggcaggaagtttcaattttctacaacaataattcaaaaaaaaatcttataatttacacaaactatttttttagagtttgacaataccaatacgtttggggcattaagatcctatatctatatctatctatctatatatatatatatatatatatatgtatatccaattcctgattaaattgattgctgcatttaagggtattggattaagatttttgaagagtttgatcttttaaaaaaaacttttgttattcaattgatgattcatagttatcttctcttttttttttttttttacatcatagttatcttctcaaatctgatgttattgaataaatcaacttcaattttagtaaatatgtttataaaagtttttgaaatgtgaaactttatgtacatctttagttaacaaaaactgacacctatcaatcttctttctaaaatccacccttcttggatatagaattcttaaaaacaaatatcaaaatcttgttttactggatatataattatttctaaccaacacgtaataatttaaaatcccccattatttcaattgttgaataagttctatcttttttaaaatgtaaaattttaaagatatcaaagtatttagttacaagcttttgaaattgtgtgtaatgtaacgacgacaacaacagagattaaagatcatcatatcacttatagcaaaaacaaaatcttgacaaggaaaaaaaaaatcaagagaatttaattattgtttcaaacatttttgtttgatcaattattgtttcaaacattggtgtcaccatttgaaagctttcctgctggagcactcatggtcatggcaactgttttcgtcttcccgtccattccatagcccatctctttagctcccaattgtcctattaaattacatacactcttcatatattaataagattctttagttatcctaattaatctcgataatcactacgatatttaattatttacatacgtccgttgcatgttctaactggggttagtgtttaaatttcctggacagatcctacctataattaggcccaattatatataattcggcccaactatatggttcgattaaaccaggaaaaacaaatcttaacgaaatcaatgttccgacaaaactctgcaattaatccagctggtttgcgagtgaaatggtgattgaatttatttgtttggtttggttggaattataatgttgcatcatattacctggataggattggacaatagctgcgttcataaccttttgtcttctgacgcagcaaaaccagattccaatggcgacaagaataagaaagaagagaccaacggctaagtctataatcgtcacgaaaccgttgtttccaccgttgcctccaccaacagtagtttcacaattaagagtgatcctaccaaacttatctgcattgtctagactttgtcgtgcttgttcgtcgtgcaagtcttcccaggtgggagatgatgatgaatcacaccccggttctcctaattcgtgaacgtaggttaatttataatcaaatgaattcatttcagtaatatacacggatataccacatataataaggtacaagtgcatatatttttgttgtagatgtatatctaagtgtgataagaataataccattgatggatccaacaatagctatcaaagtgaagagaagtagaacaacaagggtacggagcgagaacattgttgggtctagaaaagatgattgatcagtctttttacgttaaccggagtgtgtgtccatatgtatacagtatatatatatataaaaagtttaaagtaatgtgtgctataatgggctgcaagtcatcaacttaccctattttatccattttaaagtttgatccaactatgattttatacatatttaaacttttgtgttataaataacgctctgtagaactagtccaatatacagtactcttttcggttagaagttttgaaaaggcaagatgagattttgatttatgaagtagtccaatatatatgcacctactttgtgaagttttcatgtttagtctttaggttgcatgtaaatatgtattgtttgttgagtgcctaataaatgatatatactcattgaacaagttgtagaagctcacgactgcgaaattacaatttatacctgaacaacactatagatggagaagttgtgtgttgttctttaacaaatgcatatatatggtggtgtgtagaataatgggatgcaagttatcaaccttgcctattttatttctaactacacaattagaattttttatgataatcttatagctttcattactgactccgtccaaaactaatattttttattactatggttcattttatttttgaaaaaaaactagtgaatgaatgaattaaatgtaagtgaaagagataaaaaaacaaatgagtgaaatataagtgaaagagatataaaaaaatataagaataattttgtattgctcattcttcagcataaaaagagagagatatttttctttaaaatttgcctatttttagtagtatattaaacataaatagatattagcaaaatatagataattgctttattttacatcttatctttctaaatgggcaactatatacttttcatatatatatttttaaaaatcaacataaattttttatttttcactagtattatatttgtcgatcaacttgggaaatgaggaagataatactttttgcaaacaagttttctgactttccatttaaaggtcagattcaatgtgaaaagcaactagctataataccatttaaccaatgatgtgtcaccacgtgtcaatattggcgtggcatagccagtcccatgtgccacgtcacgtggcagatcccatcgacgttggaatctattttgcttctccgaaagcaaatattcgcacatttaatgtacatctacacttaataaaagcttatttaaattaaaaatcaccccaaaaatttaatatatttacagtttcagtcccttaagtaatagacatcaaaacgtgcgattttacaaaacggaaaaatgataaggacttactttagagaaagagagacagataaggacttaaatgcaatatcttatcagatcgtgttgccgtcactttcctggaaagatacaagccattatactctaaaagaatataaacaaaaacaaatatattattcaacattggaatatatatactgtatgtaaaggcttccttagagaagtagaagaagagaagtatctggagagagagaggcgtgcgatttccgcatcgaagaaacagtacggagttttatccgctccgattctggtgagtttttttttttgccgatctcgttgtccgtgttcttcgctttctcggaatttgagtgtttttggattcttcgtatattatatgttgctttgacactgatctctgatttgatttatgcggctactcgatttttgaaatttgatcgttgttttattcgaagattcgtcgtttgttttcaatctctgttttctcatagtgtaacttgaagctgacaattagatttgaatgattttgatctctttgacagtggaagataatggggaaaggaggtgaagattgcgggaataagcaaactaatagttctgaattggtcaagtctgatacttttcctgcttggggtaaagatgtgtcggaatgcgaagagaagtttggtgttagtcgtgagaaaggtttgagcactgatgaggtgttgaaacggcatcagatctatggtttgaatgaattagagaagcctgagggtacttctatttttaagctgattttggaacagtttaatgatacattggttcgtattcttttggcggctgctgttatttcctttgtcttagccttctttgatggcgacgaaggtggtgagatgggtatcaccgcatttgttgagccgcttgttatttttctcatcttgattgttaatgccattgttggcatctggcaagaaactaatgctgagaaggcgttggaagctttgaaagagattcagtctcagcaagctaccgtcatgcgtgatgggactaaggtttccagtttgcctgcaaaggagcttgttcctggtgatattgtggaactgagggttggtgataaggtgcctgctgatatgcgtgtggttgctttgatcagttcaactttgagagtcgagcaggggtccttaacaggagagagtgaggcagtgagcaaaaccaccaagcacgtggatgagaatgctgatattcaaggaaagaaatgcatggtgtttgcaggaaccactgtcgtgaatgggaactgcatatgtttagttacagatactgggatgaatactgagattggaagggttcactcacagatccaggaagctgcacaacacgaggaagatacccctctgaagaaaaaacttaacgagtttggggaagttctgactatgatcattgggttaatttgtgcgttagtgtggctcatcaatgtcaaatactttctgtcatgggagtatgttgatggctggcccagaaactttaagttctccttcgagaagtgcacatattactttgagattgctgttgcactggcggttgctgcaattccagaaggtctgccagcagttattaccacatgtttggctcttggcactaggaagatggctcagaagaatgctctggttaggaagctacccagtgtggagactcttggatgcaccaccgtgatatgctctgacaaaactggaactcttacaaccaatcagatggctgtttcaaagctcgttgctatgggttcgaggatcggaactcttcgatctttcaatgttgaggggacctcgtttgatcctcgagatggaaagattgaagattggccaacgggtcggatggatgcaaatcttcagatgattgcaaaaattgctgccatttgcaacgatgctaatgttgagaaatctgatcagcaatttgtgtctaggggcatgcctactgaggcagctttgaaggtaaagcggtctactacactagcttgcacatttcttttcttaactaaattgacttagaaaactctgttcgttgtccttgattgatttctttttctattggtgtgtgtgtttatttgaacaggttttggttgagaaaatgggatttcccgaaggattgaatgaagcttcatccgatggcaatgtcttacgttcgtattctacactatatctgttacttatgtttatacagttttacagatgctaacctcctgcccttttccttttttaacattattgaaggttgttgtcggctatggagtgaactagaacaacggattgccacccttgagtttgaccgtgaccggaaatcaatgggagttatggtggattccagctcaggaaagaaactgctactggtcaaggtctgtttttttttatcgttgatcatatgctgcctcctgaggtcgaacctgggaaatcaagtgacttctgctttggttcttgcatgttattagtcgagaaaaccactgtcccctctttttcagcacctaagagaccaattttgaaattatgcagggtgccgtagaaaatgtattggaaaggagtacccatattcagctacttgatggttccactcgagagcttgaccaatactcaagggatcttattttacaaagcctacatgatatgtccttgagtgcattaagatgtctcggatttgcatactcagatgttccatcagattttgccacttatgatggcagtgaagaccatcctgctcatcagcaacttctcaacccatccaattattcatcaattgagtccaatctagtatttgttggatttgttggtttaagggtgagtcacggtcaccgtgatatttttttcgttctttctggttcctcattaataattattcatgctctaccttttcaatgattgaaggatcctccaaggaaagaggtgcgtcaagccattgcagactgcagaacagcaggtattcgggtcatggttatcaccggagacaacaagagcacagcggaagcaatctgccgtgaaattggcgtatttgaagcagatgaagatatctcctcgagaagcttgacaggaaaagaatttatggatgttaaagatcagaagaatcatctaagacagacaggagggctcctgttctcaagggctgaaccaaaacacaaacaagagattgtcaggttactgaaagaagatggagaagtggttgccatgactggagatggagtcaatgatgctcctgccctgaagttggctgatattggtgtggctatgggcatttccgggacagaggtagttgtttctcttctcccttctgaaaggacgggatgattatagctctatcagctttctaaagctcttggaatttttcaggtagcaaaggaggcatctgacttggtgttggcagatgataatttcagcaccattgttgcagctgttggtgaaggcaggtccatctataacaacatgaaggccttcatcaggtgagtcttcttatgttacatatgtatgcctcttcctatgggtggcttgagttatacatacaaaccttatatatctgactatgatgaataaaaggtacatgatctcttccaacatcggtgaggttgcatcgatattcttgacagctgctcttggaatcccagaaggcatgatacccgttcaacttctgtgggtgaatctcgtaacagatggtcctccagctactgctttgggattcaacccccctgacaaggatattatgaaaaagcctcctcgtaggagcgatgactctcttatcactgcgtggatcctcttccgctatatggtgtgcaaaaatcattttgtttctcctttttatcctttggggcttttctaactgactattatgggtacctacctacaggtgattggtttgtatgtgggagtagcaacggtgggagtattcatcatatggtacacacacaacagctttatgggcatagacctgagccaagacggtcacagccttgtgagctattcacagctcgcacattggggccaatgctcttcatgggaaggcttcaaagtgtctcctttcacagcaggctctcagactttctcgttcgactcaaacccttgcgactattttcagcagggtaaaatcaaggcatccacactctccctctcggtgttggtggccattgaaatgttcaactctctgaatgcactctcagaagatggcagcctggtgacgatgccaccctgggttaacccgtggctgctcctggcaatggctgtctcatttggactccactttgtgatattgtacgtcccattcttggctcaggtgtttggtattgtgccactgagcttgaacgagtggctgctagtgctggctgtgtcgctgccggtaattttgatagacgaagtgctcaagtttgtaggaaggtgcacgagtggctaccgctactcacctcgcactccctcagctaagcaaaaggaggagtaagaaaataattcaaaaggcattattattagactcttagttttagctgaaattaactttgttgctttactcatccttgctatatttaattctccaaacgataatttttggtttgaaaaagaaaagtttctaactttggttcatggacacagcccgtgatagaaagatgaatgtttcaaccaaaccttgattctttatgtaaacttttatggtcgaccaaattggtttttaagactgatggtaatttattttgggcacaaccttaagagatcagagattcaatctctttatcctgtgagagaaatacgtattctctgcttgcactcctggacacatttctgcaatattaatgactgctaagtctataccttaaaaacacctctcaaaatgaacccatatcaaatttgactgtagtttagcaatgctagcgtcgttgctaaaagcctaatcaaagcttgagagaaattaccgctgcctcatatgaatgatctcataagatggtgaactagatttgattgctttcaacaaccatttgtttagtgtctatcctaagagatgaggagacaaagaaatcaagcaaatggataattctcattagattttcttagcacaaagcttgcaaaagataattaactactacatcacattggctaataacaacgaaaaacgagaaacaaaaactaactcctgaatttacttttgactaattcaaaccatttaacacggatctcagaaacaagaagaaatccccaaacttgcataaaccctaatcccccaaatcggattaacctccgaaaccgtagagagtacgaccttgcctcttcaaagcgtagacaacatccatggcggtcaccgtcttcctcctggcgtgctcagtgtaggtaacggcgtcacggataacattctcgaggaagatcttgaggacacctctggtctcttcgtagatgagaccactgatacgcttgacaccacctctacgagcaagacgacgaatagcaggcttggtgattccttgaatgttatccctcagaaccttcctgtgcctcttcgctcctccctttcccaatccttttcctccctttcctcttcctgacatctctttacttgatacacaaagatctgtgaaaaataacagaaggaaactattcagaaaccctagatttccagatcaatcaattgaattgagaatcgaaacatttaaactcttcgaaaatgtgacaaatcgagaaaaactttgaagaaattaagctaacattaaattgaaatctacgcctaagcaaggcagaaatatatgaattacctgtagatttatggaatgaaagttcttcaaaaatgtgattgtaaaaagtatgttacttcgagtacaaagtggtgggattaacttgtatctttctttctgttgtattatcgtagcttgtatcaactttcctctcttgaggctttgaggccttaatgaatgaaagttgtgttttgacaaaaaaaaaaaaaaaaaaaaaaaaagtggtgggattaacattttataaaggaagtgactacccaggacatatattttcggccgtaacgattcatcttctttcaacggtccaagattgcgatccgcgtgaaatctgtaagaagaatatggatcgttggttcttaaagatcaacggtagtagatggctttcgacttttcgtcattctctgtgtaaactccattaaacaactaaaaaaagcctccaacataacagataacccaagacttttttctaatctaaaggcccatatgtgagtagtaggcccaaattgacccaaaaaagggagcaaaaagctcacgtggcagcaagtaccctacacacgaaggtgcatgttgtcgaccacgtgttgagctcaccgtaaagagagatcctatgtgaggtttgatgatgagcatttccaaggatttcatcggatcgaaatcagaatcataagactgggaaaaaatggcagctaatatgatgagaccggcgtttgcttacactgttgtgtacgtgaaggacgtagctaaatctgtagaattctactctagagcttttggtcacaacgtccgtcgtcttgacgaatcccacaggtttgtattatgaattgttactattctctacgttggattgtcttaggtgttgttggatacgatcataggaatgtaaacgacagaatcgtattaggtcatgaaacaaaactctcgggtttgagattctattggtgcgatgtcctataatcaggtccgatccgctggctaacatgctaagcaaacacaccaaatatatatgtttgatgaatgaaagaaactgatacatacaggtggggggagctagagagcgggcaaaccacgatagcgttcacaccgcttcaccagcatgagaccgacgacctaaccgggaaggttcaggctacgcagtcagcacgtgaaagagcacccatcgaagtctgcttctgttaccctgatgttgatgccgctttcaaggtagaaatcaattattatatacttatgtctatatttgcctgttactcttcaattcgtacgtgttgataaaccagtgagatgctgcgttgtgcagagagcggtggagaacggtgcggaggcagtgagcaagccggaagataaagaatgggggcagaaggttggatacgtgcgagacattgacggcattgttgtacgcatcggaagccacgttaagtgaattcaaaataaagactcgtaaaatatgatcattaactagtctatatacatatgaataaatattacaagatactttggtacctttgttaattatggttgatgtcttgatgaatatatttacttaaagcaacatgtaaagtaaaaagatatacaaagtgtccagcctagtccccacactcccctctctcaattcgttttttctttgttagtatcgttacacaaagtaggaaacgatgttatgatcaaaatcataatagttggatttttctcctatcctagttatcttaaacatttatcaaatgattccgcgacccaacaaaataacaaacgaaagagagtgtaaagttccttttaccttttttctttttatcttttgtcgtagtcgtagtttcgtatgtttgtgagtactttggctttccaaattaatacgactggctgtctatcaaagtagctaaaccaataatgtaaagatctgtcgtatgtggtctttgaaacccaaatcaattgtttgttttataacaataattgattcttgatttttgtcaaatagaacttatcaacaataattgatgagactcgattatccgctgaaaatatttttataattattttaggaggaaggtatcatatatatactacttttcattgtttgccggctaaataattttaggaattgctgacacttagtataaaacattgaacataagataagaaacttgtttaatatttaaaattctttacttcctatttcttaatataatacagaaatatttgtatctttttaacaaccaaataaatctttaaccaaaacatagactagtactcttaaagcaaaacatagactaatctcatacaaggactaatcccaaaatcgcttggggatataatttctgaagggtctctgtcaaaccttaagaaaagatatttaaaagtagcactgggtcctgatataatatacataatgtttacattacagtattacacacacacatattagaatgggctgaagaccaaaatagttaagagaacatgacaaagtacagcaaaccttattaaatcctgacgactaaagtggtcaataagctctagcttctcatccatcaccacttcctaaatgtttctctctctatatctcttgcaagctttctcgcagaagtgataccatattttattattttgtatagaaaaaatgatatatttacatcgcatatatttcatcatcgtcctcttcacactaattttccatgggcgtcttggtttttccgacaacaataaacttcacgaggccgaaggtactactataaagattcttcctctagtcctgtctctcgtctgtatatgtgtgtgcatctctatgatttgcaaatcaaagcactttttttatctttgatgatgatggttgtttggtatggtttgaaattgggaagtgagggcattaaaggagatagggaagaagctagggaagaaagattgggacttcaacaaagatccatgtagtggtgaaggcacttggattgtaacaacttacacaaccaaagggtttgagagtaatatcacttgtgattgctcctttcttcctcaaaactcttcttgccacgtcattagaatgtaagtttcttcttcttcatcctccttccctttcttatcttcctctttaattttacccatttatggaaattacaaatatctttagcgtgtcggtgccaagtcacgaatattggatttcacagtctgtaaaacaagtgtacgtaatacaagtatggagaatttcacagtttttatttttcggtttgtttgtgctaaaaataatttcacaggttagaattcctttttattttcatggaatatgtttagcattaattagtttaagctaaaagaggggaattttagggtaacagagtagtggctagtttaatgatggtgacaatgaaggggaaaaccactaaattccttggtgaaggttggttgcaatattgactgcacaactcacactttaatgacaaccactaactatatgcctacaacgtcacgttctcttttatatagtactaaaacttattctactgtacttatataatcccttgttgatagttttactatcttactatttcttttttatgacagcaccatcttactaattaacgttttgtattaaaggtaaatagtaaacgataatttgaagcatcggttttaagataactaataaagtaatgagtgtaactaagagttaggtggatgtaaattcacatgtgaagtaagattaaaaagctttaagtttgatttgtctctttgtgacgacaagtttatacttgccaggctggtcgttgacccgttgaccaaagtaaacgattcaatagataatagcgcgtttactttcgctctattccataactagactttatataaatcgccagataaaaaactatgatttacataattcaaaaaacatttagtgttagtaaaaattagttatatatttgtgtctctttagactgtttgatcattttttaaaatcataattctttttaaaaaattgtcatcaaaatcgtaacaagtttatgatccaaaataatataagaacaaccatgatctgtaattctgtattatcaaacagtaacactactgtaaatttgtttcattttgagatgatgaaaaatcagaaattatttttctagtacaaatttcagttttaagaagaataaaacaaatttcataccgatgcgacaattactttaccagtccattaaatattgttttaatttgtttccctagcttatgcttaagtatattacaatatttgtccccgttgttcttgagaagtttatcttccaccccaaaacttctagttctgtaaaagaagacctaatcagaatcaaactgtcaaaaagtaacaattttaatagtggcaatttggttggcagagctctgaagtcgcagaacttaacaggcattgtccctccagaattctctaagcttcgtcaccttaaagttttgtaagtgatcaatcagaaagacttgagctttttcattctttctcaaagttttaactttagaaattggttctcaacgcatacaacaattttggtgcagagacctaagccgtaactctctgactggttccattccaaaggaatgggcttctatgcgcttggaagatttgtaagtatctcttctactttgcttctctaatgaaatcaaatccaatcaaaatcttatctttgttggttttgatgtacattacacagatctttcatggggaaccgattgtctggtccgtttccgaaagtcctgacccgccttacaatgctcagaaacttgtatgttgttgttaactcctttactcttgttttggttcatgaattctattagagccttatgtttggattataactgtagagtttcctagtagatttatgtatatgtgtgttgatcatctgaaattatgcaggagcctagaaggaaatcagttttcaggaccaatccctcctgatattggacagttggttcatttggagaaactgtaactttcttttatctatctcttttgtggctatctattgtatctatagacattgaacaatctggtgatggtctagtcactaacaaactagcatcactagaaatctcaagtcttttggtttcttagttaatatcttatatcctcttctctgtttttgcttcagtcatctcccttcaaatgctttcactggtccattgactgaaaaacttggattgctcaagaacctgactgatatgtaagagaatttagtctgacatgttttgatatgacaaacataaaatttagtctttgttggagaattctttaattattgtatttgtggggtgtcaggaggataagtgataataatttcactggaccaataccagatttcatcagcaattggacaagaatactgaaactgtacgatctattctttctccataagagtactcgcatgttcccaagaaaagacatatgaaccaaaaaaatgttttgcaggcagatgcatggttgcggtttggatggtccgataccttccagtatttctagcttaacaagcttgaccgacctgtaagcctttaaaaaacttcttttcaaatcatctccttgtcaaacaatgacacacgagacattatcatataatttttttttctttggtgggttgtgattgataggagaattagcgacttaggaggcaaaccgtcttccttccccccactgaagaatttggaatctatcaagacgctgtgagttaatatacaatatgtatgttgtgtttgcgatacaggcttgctagaaaacgtttttaaccaatctcaaatgcaggatactgagaaaatgcaaaataattggcccaattccaaaatatattggggacttgaagaagctcaaaacactgtaagtcatgtatatacattgagcaaagaagagctttaaaaatgctttatatttccatgagatgaactctgtatggtatttatgtttactgtgtactgtgtagtgacctcagttttaatctcctaagtggtgagattccttcatcgtttgaaaatatgaagaaagccgatttcatgtaagtatgtatggtatttagttatatttttcccaatcgtgaaagtttttctgagtcttttctatcagttatttgacaggaaacaaattgacaggaggggttccaaactactttgtcgaaagaaataaaaatgtgtacgaatacatgcctctgttaacttttaaacgtaccaactttaatagatttaataaactgtatttgtttttcttgatgtgcagagatgtttcttttaataacttcaccgatgaaagttcaattcctagccatgactgtaaccgagttacttcgtaagtttattcattgtactcttatatttcagaacactatgttcataccctggctgaaacaacaattttgtgcttctattttctagaaatttggtggaaagcttcgccttggggaacaaatcgtaagaaaccagctctctgtacaaaaacgactcatcatagaaaactgatttatgctcatgacttcgtagtggtcttttaaatcttgtcctttcagttatgattagtgaactgaaccgaaaacggtctgtattttccctctgtctttgatgttacagacacaagggttcaacctgttttcttcaacgcatgccttgtgttcatcctaagagatatcgtaagcaacaataaagcttgtcttgttttcatcatattctagtactagctattaaaacttaaataaatgtgaagcaaatccttgttcttgattaaaaaattgaaaccttcttgtagatttatataaattgtacataaattgcggaggaggtgaagtaaaagtggataaagaaataacatatcaggctgatgacgaacccaaaggtgcttctatgtacgtccttggcgctaacaagcgctgggcgttgagcagcaccgggaacttcatggacaatgatgacgatgctgatgagtatactgtgcagaacacatccaggttatcagttaatgcttcctctcccagctttggactttataggacagctcgagtctctcctttatcgttgacttactacggaatctgtcttggaaatgggaactacactgtgaatctccactttgctgagatcatctttaccgatgacaatacattatacagtctcggcaaacgtttgtttgatatttatgttcaggtacgtctatgcagtcaatattcttttacttactctgtagaaaaatataaatcagaacataatatattcttgcatgtttatctgctcacaggatcagttggtgattaaaaactttaacattcaagaagctgctcgaggatcaggtaagccaatcattaaatcgtttctggtaaatgtaacggaccatactctgaagattggtttgcgatgggctggcaaagggacaacaggcattccgattagaggggtatatggtcctatgatttcagctatatctgtggaacccagtaagtttttgtttttactcaaaagtgtttgctcttttatataaatcatttgtaacctctttgtcagattgatgaccgtattttcttgtggcagatttcaaacctccggtatattatgacacaaaggatatcatactaaaagtgggggtacctgtcgctgcagcaacacttcttttgtttatcatagtgggtgtattctggaaaaaaaggcgtgacaaaaatgatattgacaaaggtataaggtttagttttcttatgatgttgtaatgtttttgaatcttatgtaacttcttatgtattctggtgcctaaatgtcaaattttttatgaatgaacagagctaaggggtctagatcttcaaactggaacttttactctacggcagataaaagcagccactgataatttcgatgtaacaagaaagattggtgaaggtggatttggctctgtttacaaggtaattcacttgaattctgcgacattgttagctctatacgaaattgtttacagaagatgtgtacacattttggaagaatattgagaaagtggtccttctcttggtgcagggtgaattatctgaggggaaattaattgcagttaaacaactgtctgcaaaatcgaggcagggaaatcgcgagtttgtaaatgagataggaatgatctcagctcttcaacatccgaatcttgtgaagctatatggatgttgtgttgaaggaaaccaattgatattggtgtatgagtacttggagaacaactgtctatctcgagcgttatttggtatgttgtttctctcgaatttgcatctgcggaattatccggtggaattactgctcagaatctttgtgtgggtgatcttcttttgtaggaaaggatgagagttctagactgaaactagactggtcaacaaggaagaagatttttttggggatagccaagggactgacatttctccatgaagaatctaggataaagattgtacacagagatataaaggcaagcaatgtgttactcgataaggatctcaacgctaaaatttctgactttggtttggcaaagctgaatgatgatggaaacacacacatcagcactcgtattgcaggaactatgtaaggctctttctctttttactcataagctcaagaagagaattcttaagaatacaataacagaagtttgatgttttcatttgcattgcagaggttatatggctcctgaatatgcaatgcgtggttacttgactgaaaaagcggatgtttatagcttcggcgtcgttgcactcgaaatcgttagtggaaagagtaacacaaactttaggccaaccgaggactttgtttaccttcttgattgggtaaacaatctcataccattcatccaattaataagtgtgattgagttatataataaactaaagtatcaaacttattgcgtcaaatacatgtaggcttacgttttgcaagagagaggaagcttactagagctggttgatccaacgttagcctcagattactcagaagaggaagccatgttgatgctgaacgtggcattgatgtgcactaacgcatcaccgactctaaggcctacaatgtcgcaggtggtgagtctcatagaggggaagacagcgatgcaagagttgctgtcggatccgagcttctcaacggttaacccgaagcttaaagccttgaggaaccatttttggcaaaacgagctgagcagatcgcttagcttctccacaagcgggcctcgtactgcctctgctaactcactcgttgatgcagaggagaaaaccggacttttggattaagttcttaaaattccaaatttttagtgaaattcgcgagagtaatgaagttttcaccaatgaaaagagtttgcttttaagtgtatatatagttggaagttctttagctcaaaatagtgttatatgaactaaagtgatctcaaaatcagacgaaagactaatatatatatataaaggcggtagtgtttgccgcagccgctgccgctgccgcaaccgccagcggtaatgaaacgaacaagctcaaatataaaaaagattcagacaaaaataatgcttggcactatctctgttcctcatttttgtgttcgctacttgcttctctttatctgcagatcaaaccttgtttaaacgtgagctaaatcagataaaataacttgaatatagcatagatctctctagacataattatgtgtcaatatactaaggacatttcgaaggacacaatcaaaccaactttgataaaaagtttgagtcgcacaaatgcaacaaaagatatatatgtcccttgattaacatcgaagggaaaagaagtaaaccaaaatgaaattagaccctatgattccagttatttcttgacaaggattagataccaatcactatgtttttggaactctagctaaagctctagttcaattattccaactggaatatgtaatgtttctgttcacgtgtgaagtatttgtgagtgtgtgtgtaatttacattttacagggacaaagattaagaagtaagcttttgcacagaagatatataaaaaaggcttaataggggaaaagctggaggggaggggagggggggacggtgccattaattgacaaggaatcagattcccacaccactaatgttctttacttttctttcctgtccttatcatttcttccacgttttttctctattgtatactatactattaccaattattaattgatgaatatgaatattattatcattttgtagctacaaccctagaaaaggggtcatttgtgatcgaagaaaaaagagagtcattcttgggtactaatatatatgatgagaaccttttgtatagaaaaatatgtgaagactgaagagagttttttttttttttttgtatgtttaacgaaaagagaagaatcttttctataaattatgaagtagttaataatcagaatattggcgtgagcggcatacgtgatttacaattgtgtagcatcaatatcaaaaaggctctacaaaagttatggatcgttcaataaccctctcgttattatatgttagttatacgttacctttttttggataaaatctaatttatgatacctgcaacagcaagtcagtagtatatatatacatattacttcaagaaattttctggaactgaatttggaaccagagagttacatctatatccggatttaaagaaaaaaacaccatgcggaaattcaattatagaatcgacaataatatcaaaatttttagtcttgcgtatgtatttgcgatcctttgcaaggctaatcatgccactttctaaatgttgttttaattcatattttcagttaattttgatcaaggtatacgttaaacatttatggtaaaaaaaaaagtattgaaccaacaaatatttcttgaaacaacactatttagttttatacgacgtacaattagcatattattgtgactgcgaattcatcaagtgtgtacatgatgatatcagcagtatgatatcacacatctaatacacaatttccaaggaaaagtcggaaatatctcaaatgaacatttatccaatctaaagggccaaaggagaagaagaacgataagagtgtacatgatggttttggtatatgaaaaggtagtcgtgatgggttcatgcatgaacgtccttttttttttgtttattgagaaatctagtttttttagattattcgcggtggagagttttgccccactcgaagcagtgtgttataataatgtagcaagtaggctatctttggcggtccctttctgaaaaagaggtttagcaatttataaacgaaacgagtgatcaatgaagagataagagagaaaagaaacattaaagtagagaaaatgtagagacaaactgcaaaatggagagctcttttaacaagtagtacgttttgttacacaatgttttggaccaataaataaaagttgtaatcggaaacgagcgactcttttgtttcttctctctttaaaaaccaaaattcattatttactaaaggtctagaagaattaagaccggtgatgttggattttcttcgtttccataaaataaaaatattaggaaaaatcgttagataaattataaatgttcatccattcgtctaatatgaatagttgtaatttttttaataaatttgtgcattcctaatattaactacacattcatgatttcttatgtaaacacacgttaaacacacctccacacacctctcttaaggtgaagcgaatatccttaattggttcaaacttcaaaggtagaatagaattaccaaacttttttttttaagttatagaaactactatctatgatgacatgctgttaaatctgacactgatgctactgaatgcagaaaagagagagattaatttacaccattgcataatagacaagatcccaccaaaagtgtaatagagaatgatgatgatgtgctttatatatggcatatggggcttgccatctgaattatattataaagaataaatatgataagaaattatttctttttataagcttaatttgctccaataataacacatccatcttttctattagacactaattcgttttttttttacagaaatgtatctagagagaggcacgtacgtgagagaaagaggaagagagggatataagttgagtgtttggtggtggtgagcttccataaggaataaacggcagtttgggcttaagatttcagagatgatttagattttgtgattaaagatttctgaatttcaatgaaaattatgacagtggttaattaacgtttagaatgttaaatttactttagattttgagattagtttatatgatttagattaaaaaaacaaaagtcgatgatgaaaatgtgaaaacaacaatgttattataggatgaacacgtaaattttctaaaaattttaaaagttctgattttttttttcttaacttataaaacattgtaaaatattgttctatttttttgtttggtcaaggaaaatattaatggagagataatgttatattactgaaatcatatttatgttgcaaaaaaatatattatgtttcttcacctatatcttatggagagataattttatatgttagatagttttttcttacaacttcggtataatttcatagtacttttcttcgtctatatatatacaattagtccatagacgcataggagaggaaccttataggcgaagaaacgtccccacacaaaccctaaaaatgggaatcgcaaataaaaaataaaccgtaaatgaagtatagacgcgtatacacatgaagagatggtatagaattattatatagcaagcataaaaagaaccgaaattccttttcttttttctcgttaaagaagcatttatttccctttaatttgtctttgttctccatctctcttctcactttcctttttgattttgtgctctcttcgcgtttctctttggtcgtcttgcttcctctctttcgttttgcctttctttttttttgattcccccaccaagtttttttgctggagttctttccattaaagatccatcaaactttattaaagaaggaagaagaaagagataaaaaaaaagggtagaaggaacaatggctttcccatctaattggtcacaggttcacttctttgatcttccattactaaatgttctctcctctttctctctttttgtaatttctctcttaaattcttcattgatgttttgattcgttttagtaataattttgattcatttccaaaagatattcctattcccatcttcttttctaatccgctttctttaatattccaacatctatatatatggtatttcttcctttataaatacgtattgataatttgttacactagttgtgaattgagtttcttggttctttcattaattttgatttggttttgtagcctacgaattcgaatcatcagcatcatcttcaacaccagcttaacgaaaatggaagtataataagtggccacggactagtactctctcaccaacttccacctctccaagcaaaccctaaccctaaccaccaccatgtcgctacctctgctggtcttccgtcaaggatgggtggatcgatggcggagagagcaaggcaggccaacattcctccactagcgggacccctaaagtgtcctcgatgcgactccagcaacactaagttctgttactacaacaactataacctcactcagcctcgtcacttctgcaaaggttgccgtcgctactggacacaagggggcgccctgagaaacgtccctgtaggtggaggctgccggaggaataacaagaagggcaaaaatggaaatttaaaatcttcttcttcttcgtccaaacagtcttcctcggtcaacgctcaaagtcctagctcaggacagctaaggacaaatcatcagttccctttttcaccaactctttacaatctcactcaactcggaggtattggtttgaacttagccgctactaatggcaacaaccaagctcaccagatcggttccagtttgatgatgagcgatctagggtttctccatggacgaaatacttcaactccgatgacgggaaacattcatgaaaacaacaacaataataacaatgaaaacaacctaatggcatccgttggatctttgagcccctttgctctcttcgatccaacgacggggctatacgctttccagaacgacggtaatatcgggaacaacgttgggatatctggttcttctacttccatggttgattctagggtttatcagacgcctccggtgaagatggaagaacaacctaatttggctaacttgtctagaccggtctccggtttgacgtctcctgggaatcaaacaaatcagtacttttggcctggttcggatttctcgggtccttctaatgatctcttgtgagatttttgtgtgttttgtcggatcattaacgtatgttacgacttacgacgtggagattgattaaaaggactaccaacggtcaggattaactgcatgcatagtctgtgctcaagacgatgatcgtggagaagtacaaggacaaactaaaaggtatcttaattagagattgtggttttacaacttaaattcgatacttatttatataatcaggtgtgtcatataatttgtttgtattgcgtgatttcatggttgatctgatttctcaagttgctatatatgcctcaatacatgtgtgtaacagtccaatttgtatactctttagactgaattttatcgaatatataatatttttcagtttgttctagtcatactcaatttccgtttataatttgccttaccaaaccaagtggtgcattactaattatttatcgtttatttactgttcttatgtctatatataaattaaagccaaggatagttgataaagtaaaagggttgttgctgacaaaggaacttgatcatagaattccgcgtctctctgaatgctgcgtttttaaactcccaaaatataaaaaattctcatatttttaggagcttctttttcttttacagtcatcttgtacgaatctgtgtgtcagtgtgtctgtgtgaatgcatgatcctctataaattttccttaattatgtatgcaaacatgtttatgtttacacgtagacattattaaatcaagaataaaactttctgcatggattgaagcatacttacgtatcttttcttaagactatttaagcaaacagtatacttgctaagcagatctatgaaatgtttatatacacagtaaacaaaacaagccaaaaccaacctattttatagattatattgtcgcaactatatattttattatttgcattgcacagtttggtttacttctgattactaattttctgcagtgagtatgacgagtatctattggttttaatccctcagtgagtacgtagtagagctaatgtgacaactgacaactttggcgtctgattgattatgtgcaatttaacaaatttatatggaagaaaacgtagctttagttgtgttggtagtttgcaatgaaaacaataattttccaatgatataacataatacgttaggaaaaggtggaatgaatataatggagaaaacgttaaagaaaagattgacacggaaaacaatgcaggcatagatttgtatatccttgcccccaagtactttttgtgttagtcccactttttaacggtagggttaaaatcatttgaaatgcttttttgactgtactttgtttttactttttctttcttacttacgactttctgttttctctttttacctgactaaataatgctaatgctacatgatatgtgatcgcataagttgataacatcttaccaaacaatattagcttgataaaaaaaatatgattctatggcaattcgaaaatggtctatttgcatgtgggagaaaaacgtcaattagtgaaaataatggtgatggtgttgatttcaaacacatcgttaaaataaagaaaaatttgcttatattggagagttgaaggaattatggagatttaatgagatggaagtatcagttgagatcactgttgttaattcgtgttgtagtcagtgtgatcgtgagtgttgaaggccgatgttgcagaaaattttactagtattgaagttttatcattatgtggagttaatgtatatgatattcttgtccaattcattgactttataaaataaaataaaatcttgattcataataactaaattatactatatatgtacaatgttaagttctatatctcattatttattttttaaatataattgaaaattaagaaaatgataccaaatacgttaaattctaatcaacccacatatctccggcaatggaggttcttacagcaaagacagaccggatcttacaccctcttctgtgagggaattggagcttgcatgttccagaagaacgagctgtgccatctgtctacttgtgccccatccatacggtaaattgatgcattgacatcaatactctcaactaataaagcactagagtgtctcatctagatgattaggcgcttcatcaatctttcttagcatttgcgtttttcttttctgtttacatattatagtatagagttttctttttctcttcgttctaaatgatcaatgcactccagttattaattgaagtaattggcttataccaaagtctattggatttggctttatgttctgtaatacaaaaccgggattttctctttgcgggagataatgcatgatccgcaaattgcagaagatggattcacatataaaggagcagcgatacaatcatactatcatggttcataaacgggcacaagacctctcaatgaccaatctgaagctaagtagttctgcatctcacgccaaaccacggtttacgccttgcagagccaatcttgaaaattgtacatacatttaactctaaggatccacttgtatgatgtatctatgcagaatgtacaatagacaaacgctaattaagcggttggatatagacggacgttaattgattgatgatgttgacccaacgccactaaaatggacttgtttcttcacaacaaaacaatagtagttattaaaatacgttgtggaagtagtcagaatctagacagtcaaaataagccaaccaaaaacggtagaaactaaaaatggacagctaacaaaggtaagaaacaagttaagtcaacattgtgaaaagcaagtgtaacataaagacaagaagttacataaaacataaagatccaaatttaataaaaaccaagttccctgaaatggaaggaaccagtacagaaaaacaaagagaggccaacagaatttggtgaaacaaaaaaaaaaaaaaagagagagagagagaggaagtgaattaaatggtagggaaagtgaataacttcttgaaccactactgctacacgtactcattatctcataccaattaccaaacatctttcaattccttcatttacttctctattcacatacagttagtagttggaagaaacttacacattcaaagaaccaacctttgacttctaatttatgacacaattggacatctaagtagttgccaaaactttttttatttcctgtttatatcaacatagtacatgattcagagttgatgagagatcgatctctgtctccatgaacacaccaatttgttcttgtgtgtatgctcatagggattgttttctatacacaagatttccacattcttccttctaaagagatcactactattgaaacatcatcgtgataccgtcttcgttcaccttgtggtatctctagcaattcatggaaatccatacctacaatacacaaataaaacatcaattcagataacaaatatttactgaaatcgtttttttcgaatgtatgaatgttcaccataccagctttcttagcagctctaaacaaaagctcttgcacaaggtgttgagctggatccccttcaggttgtaatgtgatgaagagctcaacctctgaaacagcttcttcgtttgtgaagtattggtagagaccatccgatgatagtattagaaaccggtccttggaccctaatctgtggtggtagagagacggtaagcagttgatgtatggagacttcccaacgtaatcaatttggaacatctcaagaagtgcattgttccatttaggctgcaaaataacataaccaaactgtcatcagactgaagatcacacatactcaaacatcataactaaagtcagatgaatatttcatacctgcttaaggaaaccagcaccaaacgctcttgtgacctttaaggagcctttaacccgttcattcgttaccgcggtaacatcatcgggatgctcgtttctgattctctcaacttcctaagaaaccacaagaacataacaataagtaaaaaccaccaagattcactgagcaacgtataccattgttttgtttagtgtttacttacttcttctatatttgtgctgtgatcaacagtgagctgaaaagccgataaattcgggactaaagatgattgatctccttcacaaccttccaaatcattcatcatcgtttcctcgttaatccgttccaaatcctgtctaatcttagctaaccagtaatccggttctgatttctgaccaagcacagctctactatcaccaacattcatcacataaatatcttcacctttcattaacatgaccaaaacacaagaacccatcaaagctagttcaggattttcgtcgagcatcttatctgcagtatctaaatacgcttcctctgttttcctcagagcttgtgacagagcctctaatacttccgaatgattcgttaaccgatccgacccacttctccgactaatctgttcctttaatcgacggtcaagatcttgactttcacgatcccattcacatctccaccatcgctcacaagtctcatccttttcctgatttgaacaagattcgtctccgttagacctttctaaatcctgagatttggattcgacatttgaatcgtcccataacaatcctttgagctctcgatgaacgacaggatagagatgagagagaagataatccggcgcatctggaccgttgaatccgtcgtatattccgacgaagagccacccgtgctcctccgatacaaccacgtgtactcgatcctcaccggcttttccctgagcccactgaagattctggttttcgagtgaaacgtcgtcgtctaagctaacttcgctgctaaagttcaagctattcactgtgagattctcgttgtgcaaattccggctcttttctgacctaattccccagttatcggaatctttaacggatttgatcggagcaacgatcgagttttgccctcttgacatcgttttcgagattgctctacggaggatccgaaccaaagatcgttttcttgacccgacccgtaaagctaaaccatgagagaagctacgttggaactgatgatgatgatctgagtttggcttatcaagcggacctgagaataacccgacccgatcaagaggacccgacatgaatcctctttcgatcggacctgaaaggaaccctctttcgatcggacccgagcctaaaacgatcggaccggagcttttggggatcggttgaagagggattgacgaaaatgaagtcgtgctttcgaatgcggcggcgcggtcgatgtgaccgtagggatcgtagagagaagttgagagaggagtagctgtgttggcgctaacggaagcgccggagattgtacggaacgttgtcgtcgttgtgtcttcctctgaatggacttttgaggaactgattagagtcgggtctggtcggacgtagcagaaggagtgacctaaaccttcgtctaaaggatccggaagaagaacggagatgtcttttggccggagacgttctcctccaccgcctgtgaaacatatactcagttttgttactccgttacccatcaaaaacgttattaatttcagttttttcttagattcgcaaagtcaatagaggatttgggagaactcaaagctgagattgattgttcatcaatggaagaaaatccaaagagagggcaaagagaagaagaagtaaaagagagagagagagagagttgacttatgtgcaaagagaaaatgatttttctaaccaattgttattaattaccagagaaaggaataaaagaaaagaaactgtaagagatattattcgggttttgtctgatttaaatctgcgagaagaaaaattggtgtcaaacagaaaataaatactagtagatgaaaagtgtgacgtcaaaaacaagtaaatgacttttggttcgcatagatttgttgtaagaacgcgagagaggcgttgactaaaagagtctttaactcaggggtttctatttaaatggggaaagatgctataaggaccactctcaactaagtgcgtgaattgcacgcgactctgctggttagtaccgtatgagaggagtcgaagacatgcgtgtgtgagaaggatcaatatacgttctttaatttatagagatgtaatctatacgttagtaaaaactatctaatcctgttagagaatggatattccaaaatattgaattgtggaatctaattgatcatcaacgttgtgaaaaccttatgatgagttatcgtatgtatgacatatgatgattactataatcatatactaaacggagcttctaatgtgagaacaggggcaaagaagttactagtgcaaataattcaaaaggaaaacatggtgtcaaacgacatgaccggtcattgaaaatacccggtacacgcctcagatcgagcgtgggcttacgcgtgaactccaatagcaaataaagacttgcttataaacttagctgcggaaaactaggaaaggctaattaaagaagttgttgatatgttgatatagatcttattatgggctaagacaaaaaaaactctattaaaagtcaaaagagtgtgccacaaattctcatttgttttcgtttcggccgtcgccgttggatctcgtgtaaggatcaaatgggctatgagcctaccacgtgtcatattatcactgaaggcctcgttttcttcaatctctcgacaactttcataattccctttctcccccaccactctctccctctcttacctcattcatattataaaatttggacttttattcttttgttaacaatgtgttaatgggggggttttctagttcatttttatgagtttggtggcaatattcatttactttggttggggcagttgtgatcattactattcttaatcacgccaatccaactaaagtctttgacttcctttttcttattacgttttgtttaagattaatatgataggaacatactgcttattagaatatcagaaaagtaacaatctaatatacatataaatcgtttggtagcggccacttgctaacgaaatgatataaatcttctctctttctcatttgccttttgaatatatttggttgtctaagttttccttctagtcggttaaatatgaagcgtgattagggttttaatcttccaagtcaaccttagcttccaagtcaattctggcttgcatagtactatttatatataactagatatacaacattctgttatcatttgacagaattaatatttacagaaaacctaagcagccaaaaagatggcctacctcccatacaaagagtgtcaacaatttgccacaaacacaagtagcctaacaactaacgtaactactcatccctcttgggttgttcacatactttaccagcgcaattttagaaaccgttaatatatttaaatttggttacgcacaagatatttgatatgacgacaatttactggatcacaacttttgcttcttctttaaaaagaaaagaaagaatcagcaacaatttactggatcatatttgcatagaaaatatcaaatataatgaaaaaatcattaatcatataaagaaacaaagcggatggagtacttaaattattcaatatttacaacagaacattattttaaataataaatctatgaaatctaccttataaacgtgcactaacaaaagaaatgatacgtacgtatattcgtagcaataaatataagggaaactattttattaaattctgaattacaagttgaaaagtactagatattgaatttagtttagaaaaatacaagtgtttcaatgaggaaaaaacaaattattcatgtatatttctcgtggcgtgtgagcgttatatatatagatgaaacagacattttgacagttttctacaagtagaccgggccatagttggcgggtaaagactaaagtagaaccacataggagaacgaaaagtctcagtttcatcgtccttgttcatggtcttcctcgtttttcttccagacaccttccgttgcatcaacccctattgaggtttttgttgttcttgttccttatgttcttcggtttgtataataccaaacaatttggttgtctcagtcacttccttcttcttgttcttgaatattgatcaggtcagtttctaccgtataactttttaacggcttttatatattcttcttttgcttaggtttatcaaaattatggaacaagaaagattatttgtttctttgacttgattatatttgattggattttgaagatttcagactgctactaagtctctcgtctgactaaatttgtgttttttttaatacgtcgctgttatcatcctctgtctttcaaattgatcaaaaacgtaatttaatttgtagatcataagattcgaaatgggcaagcatttgaaaaacgagagttcaagtccaaaccatggcaaatacaatcacaaactaggatggttagctggaatgcttcatgtgcttgacttccaccattggagaactaagaaccgaccaatctgtaagctccatctcataaaatattgtaaagtaattttcaattttaaaagattgttgaatggttcattactctgttttcttaggttggaagaccccaagaacccattccttgatgcgtgaaactgaggaacaagaaccgtttcttgattctaagattaatgattcaaagatgcttagtgttgttgcagataataagccaacgagaccagaaacaaaactgaagaagacgatgacaacaaagcaagtaaccgagtacgtggattttcttgaaatcttgaggaaggaagatgtttttgtcaagataatgaaagatcaagtccagatcaagtctaatccaagggttttacccaagtcaggctcgtttcctatctcaggatcttcacgtcctgctaggattcaacacaagcagaaggagaattggtatgccccaaagcagaacggtgccgttttgactttgaaggttccaagagacacttctcaagagtgcaaaccaatctctccttctcatggctcagctgatgatgatcatggattcaatcacgctatcataaacggatttagagaaatcaagaagttgctcaaaaatacactcaaagaccgaaatcgcacaaagaagaagaagaagaagaaggttttggatgttgcgaaagatgattatgtggggagatattctcaactcttgaagcagatttctagaagagaaggtggtgacttgcgttcgaagagcttaaaactttcatatgaagagaaaaagagcgattcgagagataataaaccgcaattcttcagacggatttcgtccttgtccagccttgaagttcttggttcatttctgaccgacctccctcgagacagttctacttccaatcaggaaactaggatatctgaagaccaagatactaactttggagccaaaaaatctgtattgtcatccgaatctccggtaagagcagagaaggaagagaagtatgaggtgcaagaggagagaagccaagaaaatcacctagacagctcaaaccaaagaatcctgcaacaagaaccagattcagttcctagtaccaataaaaccgcagaaaagacagagactttactaccacaaggtaagctcttgaacaaattaagctcttcactgtttgatgagagaaaggtactcaattctatggttgcttgttctacaggtttaggtctaagttctttagaaatttacaaacatgaagaagaagatgaagatgcctacttctgttacgtaaagaaggttttaaaagtttcaggcttcctcgaaaacaaagacaacgaagaaaagtggtactcagaggaacaaccactgaatccatcactgctttacgaactcgatatacaagaagaagaaacagtgaacgacaaagagcttctattcgatttggttaacgaggcaatcgtcgagactcaaaaccattcacaaatatacttccccaaaacatttccatatggcaaacgttatcttgatgaggtatggggaagagtggagtggagcctctctggtttaggagctgagaacagagatcgttcattggatgatattgtgggaagagatcttcttacaaagagtgatggatggatgaatctccaaggtgaatctgaatggcttactcttgagcttgaagatttgatttttgatgatgttttagatgaactgctttgtgtttattagtaagttaacaaatagaaaacctgtttttttctgatatacatgtatataaatatgtgtttgatacaaatttaagatttcttgtaaaataatgtaccttaacagtcccaatttttttgatgaaatacactaattaatcagagttaattgttatttaactaaatagagatttagtcttctaatgggccgttattagtttattgggccgagcctattacgttaaacccttagccactgactcggttccgtctccgaccaccaccgcggcgactccccgatcgatcaatttcctcagcgggacattttcctttgtctcctcattctctcaggtcgccggagattcgtcggcaacaagttgatgtggctaatccgggcgattgttcctgttcgatatttgggatcttacaagagacctcaaaagccgccatggatgagaaatccagtggtattctactcagacttttcggagaagaaagggaaagttgctcctttgcaggtgaattcatcatctattcacttaacccacaaataaaaaaactctcttttacttcactttctcactgaatttctgatttgtcttgttgttgtggtgcaggagactagaatgagagataggtttactttgtacgcacgaggcggtgaaggtggtagtggttgttctagcgtccgccggagccgtgccgatcgctatggcaaacctgatggtactattctgatattgttaccgattgataattaggttgaatcattcccaaatccatagttatcgtttaggtttggtatacttagaattggaatactgtttgagtgattgattgattcaaaaaatgttttatgtttatgtaatgtaattgagcttagtttaggtggtaatggtgggagaggaggtgatgtgattttagaatgcacacacgcagtttgggatttcagtggattacaacctcatattgtaagtgtatctgtcactcttttcgtgttctcggggaacatgtctcatgagaatttctctgaactggttatatcaatgagttttgcagaaaggtgggaaagctggacacggaacttccaaaaacaggataggaaacagaggagaagacaaggttttattatgttctcattagttgttcctgtgcttctttcttttattgttcgggaattaagatgttgtttcgcgcttgtttgtgttaccataggtcctgctagtgcctattgggacagtgattcatcttcaggagggtgagattccatctcaggttgaaaatgagtctcccaaagatttggatccatgggaccttcctggctcactggttgaggatcctgcatccgaggagaattctgatgttcatcaggaaactatgtctgagtctgatcaagatgatactgagcaggagagtttaacgagacagttaggcatgccaaaggaagctgattttgaagacgacgatgaagagattgatcaaatcaggtataatgttgccgaattgacacaacaaggtcagagagtaatcattgctcgtggcggtgaaggtggtttgggtaatgtttccgctacacgttatgtaagaggcagtaagtttgctaaatccacaatccgtcaaaccaatttgaggagcatggaagacgatgctgaagaggatgatgaaaggtcgagtattaaagccggtttgctcggttctgaggctgttctgatattagaactcaagagcatcgccgacgttggccttgttgggatgccaaacgcagggaaaagcactcttcttggtgcattatcccgagctaaaccccgtgtaggtcactacgcgttcacgacactccgtcccaatttaggaaacgtaaactacgatgatttctccatgacagtagcggatattccaggtcttataaaaggagctcatcagaacagagggctaggccataactttctccgccacatcgaacggaccaaagtcttggcttacgttgtggatttagcatcggggctagacggttgcgaaggactgacgccgtggcaacaactgagagatctggtgatggagcttgagttccacgaagaagggttatccgataggtcatctttgattgtggcgaataagatcgatgaggaaggtgcggaagagagattgaaagaacttaagaggagagtgaaaggagtgaagatatttccggtttgcgcggttcttgaagaaggcgtggctgagctgaaagatggtctgaaaatgcttgtcgacggtaatggtgagccatcggagagattaaaattggagaatatatgtgttgactagtttattccagtagatggacaaattgaattgtcttggagaagtggctcaactattgtccaatgaaatagtttaacgatttattgtagtcaattttcttttttatatgattatgcaaaatgcgaggagtattttagtcaaaacgtgaaaatatgtatagccttttaaattatggttttcgttagagaggagacatatacacatacaaacgcaaaagaatacatatactatttatgatttaggttacaaataaaaacattacacagcaggaacaagtcaagcaagcttaatagttactcttactcattacgcaacacaatgccaagtctttattccaacatacacaaagatctcttagcataaaacacatttttttcccattttccttggtttgagaccatgctgataatttcttcaacagttacagcttgacccgcagctgcagtttgatccacagctacagttatcacactccttgttgtagttcttctcgcaactttgtcataccaaaaaaacaacagaagtataagatttcaaaaatttatcttaaggaatatgtaaccacatgtatattagatatatatgcatgataagttaatgaagagagaatctagggtttacctgcacgaatcaccacatttgcaggaggagccacatccacagttagaacctgccatttctcttacttctctttgattgattttgtagttttctttttcttcttctgatgctttatgtgatttcaactaagggaatggccagtatatatagaagaatataaaatatcggttttatatccaccatacatttcctatatatatatattatcttttgtcaacctccctatatatattttatattttcctgtaagttttagtttcgtatatgatagggttagcaaagtttttgtatatgagatatacatatagctttcttgttggactatataatccctctagatatagattttctaatttcggcagattttgagtaaatatccaaaaaaatctcactatcttgacaagattacaaaataatcttttaatttaactatttaagacaacatgtataaaacctatatcttaactaaaaactctatattattgcaactatataatctaaatgtctattatcttaaataaataaaaatgccactaccactttttgatattataggccaagttattgatcagtaaaacgaggccggcacgtaggaactaggaagtcaaaaaataatatttttgtgatggaacgtaaattcaccaattcaggaccttgaaggggcaagaagccaactaaaacaccagccccaaccctagtgcaaattaccattctatataatgaccccatctacgatttattccttctatttccctttacgtaaagtagcgacgttcgtgaattcctaagaagttagactaacaggtttgtgtggttcttaaatttttgggtaaaaattaggaaaaaagtttatattcctacccaaactttcggcaccagagacaaattaggtttgttcagaaaatcagtcgctcatcgacagacttaacaccacaaaatcatcagaatttctttgggacaaaatggaaaatgttcttcacggctccacctaccaaaatttcgatatcaagctcaaaagcatacacaaactataactaattccatagttacgtaatcttaacttcgaattcaacaacacatgcatgcatcgactgaatcttcaacaaatgcaatcaaacacacaaaattgctaccaaaaaaatatgattttttttttatgatttcaattttcatccggcacttagtccaaaactttttttgtgtgtcaacattttttaaaaaaatctttaaacggatatctgatctaagagcatgttcataggtgatacttacaaaatatttttaagaaattttttagtattatttataatgtttgtttaataaatatatataagattttttgcttttatcaaatgtgaccaatcagaagaaaccacgtcagatgatactgatatgacaaatatgatactgatcaaacatattctaattgctttactaatataaaaataatttttggacttgtgatactctaaaaatatcacccatatacatggtctaatatatggatcgtaaaaaactcatatataatattaataagtagtagaagagcgtagaccatgtcctgggtcgtcgtccaaatgaccacaagaagatttcaaaacagaggaaaatatttctcattaaataagttttcctgacgcataagataacattattacaagattcagaaaaagaaaggtgaaaggataatgtttctcctactatataagatgtgtacatctgaaaaaatatgaatatatttgtaacgtttgactgttattacatgattaatacgatataaatattaacattttttttcaaaataaaagtaatatagtaaggaaatgaaaagaggcatgaagcatgcctctttttttggtcggctgccgtttacaattgccaattgcgatagttactcttcttgcgtgtacgacttttgtttttttttacatattcgccaataatttgacgttttctattagtttgtttgatactctgttgtcttgctaaaactcaataaaacattaaattactttcttgaatgaagctggaacaaatctaacataaatagaaaatgatgggcaagttgatgttattcgtaaatttatttagattatattatataaaaagcaatccaattatatatctcatatatacaatttcttatcttactttgtcaatgtcatatacgtaactaaaacttgcggaaatagaaaatgccacgtgtatggtggacataatccgaatctctctctttcttctataaatagtggccattcccattggttgaaatcacaaaagcatcataagaagaagaagaaactacaatagttaatcaatcaaagagaagtaagagaaatggcagattctaactgtggatgtggctcctcctgcaaatgtggtgactcttgcaggtaaacccctagattctctcttctttacatttatatgcatatatgtagactatgtagttcgagcttcatggtacaaaattcaataaactcttcttatgacttcgtttacaattgtgtttgtgaatagacacaaaagattagttttgtttactttagattcaaaacacttcgggcctatcctgtatatatgctgatcagatgcatgtggttgattaatctttaatctcatcatattaattactaattttttgtttgtttgattaatttgtgtgtggtaaagttgcgagaagaactacaacaaggagtgcgacaactgtagctgtggatcaaactgcagctgtgggtcaaactgtaactgttgatgaaattattatggtctaaaatcatatatatggcagaaaaattggggaaaatatgtgttttatgctaagagatgtgtgtgtgttgttggaataaagacgtgaccgttgtgttgcgtatcaactctcttaagctttgacttttcccagctttgtattttcctatgtatggtaatggtgtgattgtgtaatgttttcatatgtaacgtaaaaaaaatatttatgtgacattgacttttgtgactactaagatttgtatatgtctcctccgttttttatttaggatttaagttcaatcagctaaattaatcataaacaatttaagtaaatattcatatgagaagaagtcaaccatattcttatcgggccttatatgttaatgttaaaaggttacgggccagtaaggtcccaaaaaagaagaagagatgagatccattattgctctcatgaggcaacgagaatatttcgttcaggcaattcgtcgaacaacttgcgtggcctcacctgcgttgaatcaaactaacttccaagcttcgagctttctcactaccctaatatcttcgaagaaatctccggaagagacatgtatcggatcggaggaagaagaagaggagcccaacaagtgtttgtctttgagaatcgagaagcttccgaagggcgtaactgttgggtctgctttacagagctggatgggtgatgggtttccagttcatggtggagatgtttatcacgccattaatcgattgaggaaactcggacgaaacaaacgtgcccttgaggttcgaattcttacttgcttctctcttttgaacgaagaatcagttttatgggtctgaatagtttagaaaaagttagatacttttttggtacaggattgttgtatcaatgtgattttgccagtttgaattc

SEQ ID NO: 984 - DNA, 74328 bp, Arabidopsis thaliana
gaattcagctgagatgcacggagatctcgggaagctagggagatcaacagttctaaagaagttcaagaacggggaaatcaaggtacttgtgacaaacgagctctctgcccggggtctggatgttgcggaatgtgatctggtggtgaatcttgagcttccaactgatgcggttcactatgctcatcgagctgggagaacagggaggctgggaaggaaagggacggtggtaacagtgtgcgaggaatcacaagtgtttatagtgaagaagatggagaagcagcttggtttgcctttcttgtattgtgagtttgttgatggagagcttgttgtcactgaggaagataaagctattataaggtgaaaatctaaagatgtaattttcagatactattattactattgaaaattcagagtcttgtccctttttcttatatattgtaaacatatttttaccagacgaagaacatctaaaaccagtgtcgaatttactccagttttgaccgactctgactattacgaaaacccataggctccatgaaacagcaggcccctgaggcatttcaccgaacaacttgtgggctatatcattgaaccggtttcgaccgtataactcagctaaaccaattccagtatagctttgactgaaccggtttaatcgataagtttaaggtattcttttgtcacacagagtgagtttgaagaagaagaacgattcagcttgagatggtgaggatgatgatacggagattgagttctcaagcttcgagatttgttcagcctcgtctcctggagacaggtactctgagaattgctttgattaattgcccaaatgagctacttttttgctgcgaacgcggcttctctactttcagcgatagaaatctctcttatagagacaaattgagcagtgggcttgtcggtattaaggcagatgatgctgttgatctgttccgagacatgattcagtctcgtcctcttcccactgttatagatttcaatagattgtttagtgccattgccaaaacgaaacagtatgagctagtgttagctctctgcaagcaaatggaatcgaagggaattgcacatagcatctacactttgagtattatgatcaattgtttctgtcgctgtcgtaaactttcttacgctttttctactatggggaagatcatgaaacttgggtatgagcctgatacagtcatctttaacactctactcaatggcttatgtctcgagtgtagagtttctgaagctctggaattagttgatcgaatggtagaaatgggacataaacccactctcataacgcttaacactctggtcaatggcctttgtctcaacggtaaagtctctgatgctgtggttttgattgatcgaatggttgagactggctttcaacccaatgaagtaacttatggaccggttttaaatgtaatgtgtaagtccggccaaactgcccttgccatggagttgctcagaaagatggaagaaagaaatatcaagctcgatgcagtcaaatacagtatcatcattgatggtctttgcaaagatgggagcctcgacaatgcattcaaccttttcaatgaaatggaaatcaaagggttcaaagctgatattattacctacaacactctcattggaggcttttgtaatgctggtagatgggatgatggtgccaagttattgagggatatgatcaagaggaaaatcagccccaacgttgtcacattcagtgttttgattgatagttttgtgaaagagggaaaactacgagaggccgatcaactgctcaaggagatgatgcaacgaggtatagctcctaatactattacatataattccttgatagatgggttttgcaaggagaaccgcctagaggaggccatccagatggtggatctgatgattagcaagggatgcgatcctgatatcatgacgtttaatatcctcataaatggatattgtaaggctaatcggattgacgatggtttggaactcttccgcgaaatgtctctgagaggagtgattgctaatacagttacttataacactcttgtccaagggttttgtcaatcgggaaaacttgaggttgccaaaaaactcttccaagagatggtttctcggcgtgttcgtcctgatattgtgtcctacaaaatattgctggatgggttgtgtgacaatggagaactagagaaagcattggaaatatttggaaaaatagagaagagtaagatggagcttgatattggtatatatatgatcattatccatgggatgtgcaatgctagtaaggtggatgatgcttgggatttattctgtagcctccctctcaaaggagtgaagcttgatgctagggcatacaacataatgatttcagaattatgtaggaaagactcactgtctaaagcagacatactgttcagaaaaatgacagaggaaggacatgctccagatgagttgacatacaacatacttatcagggcacatcttggtgatgatgatgcaaccacagcagctgaacttattgaagaaatgaagagtagtgggttcccagcagatgtttccactgttaagatggttattaatatgctttctagtggtgaattggacaaaagctttctagatatgctttctacaactcgggcttcattgaaatgaatatttcttgtgtagctatgatttgttgcttttcaggcatcaacaaggtcaaatgggctcaatttttgtcctaaacacattgaatccattgaacaagcctttttattcagtgaaagaaaactaaaaattcaatcaaatcaactttccattttattcatcgaagtaagagatcagttcgatacatgtggaatataaagcacaactatatcatcatatgtatgtatatttctttcttttagatttgagtaattagaaatggtaactccaaacaaaagaagtaaattcaaagcttattctggtaaccccatggattattgtttgcccatttccactgatctctgcacatctcatccactccatattttgccctttaataaaccaaatcagattgtttaataacattatttatctcctaaaccaatcatgttaatggtgaaagagttaaacttacttccagccaagttctttctcagccttctctgttgaagcataaactgctgttgcatctcctgaccttctcggacagagcttaatcgggattttctgcacatgttgtttttgtttcaccattttagacaaacaatcacaaactatttacccttctgaattcattttctgctattaccttgccggaagctttttcaaaagctgcaaccatttctaacacagacgttccttgaccagtccctagattgtaagcagtacaacctggtattccaacataacacaggtctgagaaataatctatcaaatcaaactaaaaacttctaacagttaaatgtctgagaaagttaccaatctttggatcagcaaatagcttcctgagcgcagcgatatggccatctgctaaatccatcacatggatgtagtctcttaccgcactaccatcctcggtgggatagtcatgtccatagacattgagttccggtaaacgtccaacggccacttgttggatgtaaggcatgaggttattggggatgccttttggatcctcaccaatactgccactctcatgtgctcctacaggattgaagtacctcagcagaataattctccattccggttctgccttttgaatatctctagctatttcttcaagaaagagctgcacaaaggaaagtttggtaaatccatcatgacttttcaacaattgagcattgttattatctttgttaggcttaagaaaggcttcttagctcaggtaacatttggaaaaattacaaggtattaatcacaatagagccaactttcacgattataaatctacaaccaagagtttctaaagtctgagagacttggataaaggaggaaaagcgagagagacattacggtccaaaggcatattgagtaaaatttaccttagtacgaccataaggattcatagcctttaattcaaagtcttccatgcatggaatcttttcaggttgtccataaacagtggcagaagatgaaaacaccatctgtatattccaacaacacatcaatttgtatccccaccattgtaaaaccgaacaaggaaatataaggaaaaaaaagtaaaacatttctgaagtttaagaattatatctaaccattttgcagttgtactttgccatggtctcatatagattgattgttccaaccaagttattgtcaaagtagcggcgagggttttcaacactctcacccacagctttaagacccgcaaaatgaatcacagcatcaaatctattacctcacaagaaaacgaaatcaagccaagggtcagagatccagagaagctatgattagccaacttaaaaggtgagaatctaacatacctctgcttggagaatagtttctcaatgtcccctttgtttcttagatcaccctgcaaacaatcaacaccaaaaaaatcttaatcgattatctccttacaaattcaatcccaaagatgatattgtaaaagaaagtcttcaggttatagagattggtctaaagttcttcaggttttgttgtgatccttgtttttcaaagagagaacacaccaattcaaaaatgaatacaatcacagagcaataatttcagctcacaagactagacaaagaagcagtagttagttaccagattgaagtcgagcttcttggagagatcaggaccaacaagctccctaactctatcaacagcttcgataacagagttatcaaaattatcgatgatcgaaaccttaaaaccatctttgagaagttgaacaacagtatgcgtcccgataaagccagcaccaccagtaacaagaatgttctgctccacagaagaacccatttcaaagaagaagaaaggttatcaagaagaacccacttggcaaaatcgattctttgaaaactagatcaccaccaccaacagaagaacaaatgaagaagattgatgggaggaattgaaaaagagttgggtccttatttaaagatatttgtagctttgtttacaagttgataagaaggcacgcaaagcgaaaaataggaaaaatgagtgggctctttcatgtttttgttggtttctataaatacggcagtgatgatcatgacaacgatgatgatgatgatgatccgtttaagtgtattatagctttgattcgtcgattttcagttacgcattgatggtgaaacttttctcggcggattttaataattaaaagggaaataatgtaagattaagtcttcttttttttttacgcaatgacatttttaacctatttttgtaaataaatgactagtgatgaccaaaatctacgaggattatgggaatacagagagataaattttctatgggttggataacacgctaaaaactggatagtaacgttgtccaatcaacttttttgtgttttttcgttaaagttgtccacttaatatttatcttttaacgatacctaagattgtgacagagacagcagagacctaccgataacgttatgatcaaattgatgacgtgtatctacaactttatttaggtatccaatttgggtaaatgttgaaatgttttggtactagagttagctaataggattttgttttgagaaggaatatatgtttcgtatgtttttttttataacaaaatatgtctttatgtagataaattttgaaatatattcataacatgaattttgcatcaatttgcaagtagaaatggcaaattcttcgatttgtcacaaattgcgggtaaaatcttttacttaagataatgtgtgatgtagatgatttttaaatccggataacataagtaagaatacaagaatttataaatgcaaagccatttcacatgggttttgttagcttgtcatttttgcttaagatcaaagaaacccaaaaacccgtaactatcaaccaaaagaaaaacaagtgtggtcatttattgtgcttaaccctcaaacttatcaatcaatctaccaaacgttttcacgatgcagtttggtgttactgcaaacatcaaaaaaagtcttggtaccgatctttattgattaaagttcagatgctaaacactttaacaggaacggatgtaataaaagtactagtattcagacagagctagcaaagataaaaaagtgagccattttacttacccggtactggctcctataggtgtatgtattgtagtcttgtagccatagcaaaggactacgaaaagtctttgagtggtacctttagaaactgttacggccaagaataagatagataagtcttacgacgttacggattttataagaattgtgatcttagtatcttacaactatttctgcagtcgtcagttgaatttgggactgaggtagaactcaggatcttggaaaaacctggtgagtgtatcagcctttttagaagagagatctgtgtttgctaaaatgtcttctttggatgctttagcgattgcttcaattgaaccaatagcctggtacagctgtaaccgatgagaacataagcaagcaagtagaattcatggtgcagtgacatgattcacaataaggtttgaagtttgaagttggaattgtattttaatagtatcaaaagtgcaagtttaccacttgaacctgctcataagtaaacattaccgtgttcgcatcatgtttgttaatattgggtatggatgtgacaaatctgatgaagatgtttgtatcctgcacagttcgctttctcttcacatgaaagaaaacgaaagaagctttagagattgtcaaaaacaaatgttgagacagatcattataacaaatgagaacctacctcaaccttgagcttagaggccaccttctgttgcttgcacactgaagctcaagtttcaaatcttatcagtcaatcactaaaaaaaccgtagagtatattaactaacacaaaacaaatgaatcttatacctccacgagagtgagcaatcttaacaatcttctcaaatcccatctcagcatcagtgacttgtacaaacgcaggtttcccaaactccatctcatatctacgaaaaagatttatcgagcttcatttccgacaacacagataagcaaaatgatgcaaagtgaaaaaagaagagtagaagaccactcactggaagtaagatcgcataaaagaatcactctgctctttagttgaaagtgtagcaacaacataaagttgcgcaaattgccctttcagcctctttactctaaaaaagtttaagtcaaagaaatcagaagacatataggagtttgcgatagagagagagcttgaaactttattatatagacctgctgaagatggaagcaacattggaaaaatcccatttagtcacaaaaacaaaagcaatagaaacacctccacaattgaagatgagatcctatcacagcataaagtgaattctttaagctaaattttagataatccaattctccaaaagaatctaaacagagaaagaaggcacatacaggggggatagagacaaagttaaggcggaaagagtttgcgctaagaaacgcagatatgaaattgatcagtgaaggttcttgttcaactttccatgcattgctcattatacaaacaccagcaacatttcctgtcagagattatcgtaaattaatccaatcgcagattctcagtaacatgaatctactaaacattagactcatcattcaaatttcgcagtaatcaaatcaaaacacatatcgcctaatttgagaacttatcgacatttctacataagaaattgagcagatacagagtcgaattcaagtttcctagatttgatttgaatcacagctataaaatcgacaccaaaattttgcaaatcctagactctaacgattgagtagatcggatattttgataacagagaagagtggttacctagattcacgagaggtgacgaaacttgatgatctgttgagacactgtagcttgatcccgccgtcgccattgacgaacctcctagagttatagaaattcgaaaatcttggcggatgaggatgacgaataattatcaaatttgaataattaattgttttcgtcccacatcgctctccgactttggttctcctaaccggttcatgagtatatataaaccggttttgaattctccatacgctccacattacgtttgaggtcgaagatatgctactgatcagattcacttgatggtctttcaaactataatttcttactttcctatggatatcaggatcatagggtgcaagcctaaaccatgcatgacataacaataagagagaatttgttagcctgtaagtaatataatcctataatctacttcattcctcacaggagaggtgattctacatatttccagattcttgcttttgttgggaaaatgttttcatatattaaaaagatcaggaagtattacattagaaatcatgtattgatgttgtagacttggtataagtcttcgaatgataccactttcaagaatacaaaaaaatagtggattcattcattccttccttcctcaatattctcattctactctgttggtgcaagacatgattgtagatttcatctcttctttgctcaaggatgcttcaacaataagctgcagataaacagtaaaggaaaaaaactgaatcatccaagattaaaataaaacagatgttataagttagatctttctctttctttcttttacctcttgtactctgtttccagctcgagcaagcagtttgtattggttctcaaacattggagccatgtaaacctacaaagagagagaaagcaaaccagagctcttagcttccgatcaaaacataaaacgttcacattttttcgctaaggaagccgcaacagtattcaactctttagcggtctgttagatgttttcgtgttttgatatatacattttaggtgattaaactgtgtacctgaaacgttggagcaagacccggactcaagaagaaacgactttttgagactgattggattccttcaaccatttccagctctttgatcagagattccacgtcaggccactgcagaagaaaggtttcagaaacctgtaataatggtttcatcacataaaatcacagaaggtctttaatacctcagcgtcgagctctgctgcttgtaatcgtccccccaactgatcattatcaccaccaactacagattctaaagcttcagtaagaggatcaggctgcataaagacatcaaacgggtctaggtatatatcaaaatgagttaccaattgctacaagataaacttttgagagatctttctcaccgtaatttcttttaatgacaagaagatacgttcaagagcaaaatctagctggtgcactttcgcttccacaatctgataacaacaaaaagaaaggtttgtcaaacagttgtattccttagcagtgtttacgatagttcgagatattacctgaccaatcttgaaatatgaagcagggtctaaagttgcatcccatgaaacttctgactggtgaaccaatgcagggacaccttctagctgtttcaacccaactttttagttttacacaacattctagattccgttcttgccagtcaataaagcaagaaggttcaaagatattttaacttctgtaagttagtagttagtacctcacagaaaataccaaaataggtaattttcttgatgcagcatttcacaacatccccaacacgaagcttagccataagagttcgttttttctcaacttcctcttcattttctctcggcctcattgaaaatataagcttccttgaatttcgatttgccataacaacattcactttgattttctgcattgagttaaattgtttagaaaggaaaaacaagcatttccatgtatggaaattaaagtcataggttttttagacatacctgaccaacaaaagatgacaggaacttctgcttctctctgtcatataccataagaagatcttccagcttcatatcagaagaaacttctccgttgatcgttgtagcgacttcagaatctaagcttgaatctggagatggagatttactcgtgacatcttgacctccaattaccccaaggttttgtcgatacggtgatggatctacaccttttcttcttaaccatgattcaaatgcgagaaacttccattttgctgcaaggttccggtagggtaaaaatccaatcaaagatccataggaaacctgaacaaagattataaatggtataaaaaaataattagtaaaacaaaatgagatgaaaccagaagtgagtacagatctaacttacagcaaatcctctagtgcttgaacttattagctcaacatctgctcgtaattctgttttaactagagactctgccttattccaatcattttcctataaaaatcacacaaaacgagtttatcatacgcctcttatcttattaaggaacaaatagtaagagagtgttagttctcaacctccaaggacgatctggtaggagggcccttgagctcaacagagacctgacggccttcatggttcacgactgacggttttcctatgttcggaactgatggctcagcggaagacgggtctaatctataataaaagtaaccagtcaggcaaaacagaaaataggagtcaagaaagcaaaattcctcaaagtcaagatactaaaccagaattcacctttgtggtttcccttgtaaagaagcttcgacgatggtttgagaaattggtttcgaaggaattctctcgagtggatcactgttaatagttttctcctcagaggacatctcgctattgagctgcatttcttgataaaacaacaaacatatgaatcagcacaaagttagactatttaaaaatattcttagtttgtctctataccagttggaattgaattattttctatctccgatgattccaaaactccgctatctgcaacttccttttctatgttctcaagctctggccttgcttctggcttctgaattgagttgtttactatctcagatgattccactcctccgctatctccaacttcctcttctacattgacaggctggagcctcgcttctggcttctccaaaagagtatactgtgaatatgttccaccttcctgttctccttcctccatagttaaatcatcagaaagaggcttgtcttcctcttctgcaactacgctcactggttccggttttctcaacaatgtcatatcactaaacctctcattttccctctcatttctcattttcaatgtcagattcggtttcaaccgcaacttagactcctcatcatcaccattactagtataaaacgaactcggctttctcaatataacattaggcaatctctgcacctttggagcagcaacagcctccaccaatggcttcttcaaaacagggcttggcttcttcatcactggcctttcgaacttgactccatctttcagaacaggctttaccaatttcaatccatccagtgaactagtagatttcttcttgttatcctttgaccaatccaatggaatctcttcaacttcaggaattttacctttgttcttgtagaaagatttctcaatgtcaataaaagaagcttctggatccacttttctagctactatctgtataaatttcaccattaacatcatcagcacaacagagagaaatcgaaatacataaaattcaaagaaccgttttttacgaaatctctcaccttagccaaagtcaatttcgggtcttcgccgagtaaacggccaaagttgagctccatttgatcccattcgttgagcttaggctcttctcttttcgaagcagaaactaaaaacttcttctgtttagctaacaaattctctcggtttcttctcactctaaccctagaaggaaacgacaggaattttccggcgagagaagcggagggtgcggcggcggaagcggaagaggataaggcgagaacgtccattttccgattaagccgaaagatgataatttatacgaatgagaatcatgggtccaatcaaaatcacgactttattttatctcgagtgagactgttgcttgagctctgtctcttactctccccctatgtgaactacagagaggaagaaatggctatggcggaggaaggagctttatcagtttagctcaatatttcgcttcctggttgaaccagtaaggtgaagacacgtggttgatgaaggagcaactacaaaaaaaagattgcattttaacgtcttgccgttgtttcgttttagagatgaactacacgtcgttttttgaaatttgctttaacgtcaaatcttttcatacacgcgtaagattgggctatcatgggcctaaaattggcccaatagaaggatgggaaagaaactcaaagaagaaaactctaccaaataatccatgtttttttatgtatgcagaagtttattatatctgtatatatagataaacactgatatatctaaatatctaatgcactgaggctatttcattgtttcagtttacttaacattgttatttattttgatatcgattagggtttggattttgtgggttcgtcataaaagggactagagtttttttttattgaaaaaggaaacggactagctagagttatagttttgcatatcggctctacctaaagttttaaataagttgaattcacgcatgcatcaaataactcgtgcactttaacgaacattaattggttaatccactgattgtcaaatatcgactatgaattagtccattttattcttctcgttccatacaataaatcgatgttagtacagtggcaaaagtgtagtttagcaaggacgaacacatgtgagacgagaaaagggacaaagagctgaaagtataaataggcgttacgttctatagcggttttcatgctgagaacatcatacaattgtcgttcgatataatctgtggcttgcatagtttacggctcctcgtttggatttttgaggaatttatataattataaataatgactatttgtattttcacatacttcagtagatagattctcgaatctcgagattaccaatatcatgcacatcatcatatgatgcatacacgtgatgtaataaagttattttaatatgtattcagccaaaagttgcaccaaaaagagaatccatcgaatccacgaaaactaggttctactaattagttatctattaaattatttcacaaaactaataaccatatagcattcaacacgagtacacatctataacggggggaaaaaaacttttatggaaaacatttaaaataaatatgtataagttagttaatatatgtgccaaaacatggaacctaacgcccacagtttttccccatctataaaatatatgtactttcagcctttcacttcaattccctagctcaacaaacaacaaactatgaatcaaaacatatatctctttatttcataatcatttccataaattacaccctcaaaggttttccacttcttaaatccctttttatcaaatggatgtctttatatcggaagagtatatcaaccgccggagattggagaaaaaagctgccaccgttgccggaaaaagcatgaggtttggctcagcttcaagcaagacaccagagaagagaaatagttaccctcggatatcggaatctccgccagataatgagttccgggtcactggcgggggtgtttatgatagctttgcctttgtgttccactgcttctcgccgtaaaaaaaacaaagcgtttgtgtttagcgatcaaaatgcatgcgcaatagtatatgcatgggaactttattagttgtagctctcgtttttctaacatttacttgaaaaaataattcttcttaacactgtttttctgaatgatggatagaatttcatgtttaccaaataagtggataggcccaatagcaaacaaacgaataaataaaaattattatcggcccaaatccaataagaacgtgagcaacatgattttagtgacacgtgaatttacttaaatgaaaagaaaagcctggcacttaaaatatatttatattttccaataatctcaaaaaaaaactctctgattcgaaaagtgaaatttgattttgacaaaaaaaaaatgagctacgacagagtcccaccggaatcgtatcctcctccaggttcgttcgtaatcacttctccttcttatgattctcttctcttcgattctaaattctgattctcttattttgatctattctaaaagtactaagatcctgtttttgatcggacgaattaggataccaatctcactatccacctccgggttatccatcagcaccgccaccgccgggatatccttctcctccgtcgcatcacgaaggatatcctccacctcagccttacggaggatatccaccaccgtcttcacgtccttacgaaggcggttatcaaggctacttcgccggaggaggttatcctcatcagcatcacggaccaccacctcctcctccgccgcaaaattacgaccactgccatcatgatcatcaccattaccaagattctgactctggttgcttctctttcatccgtggctggttcgtttctttctctaccacttgccgccttttaattttcgtttactttcattgttgtgagtgcactgattcgattctctgtgttttttttggtcaatcttgttagcttttatgttggatcactgattaatgctcagggttcattgaactagtgttttggtttatggaatttgggaatactatgatcctgatcagaaccagattcctttgagttgatttatggataagccataatgtgaaactcaagagttccgttgtgaaccctgacttgacttctttatcattttgtttggtggccaattatcgaaattttagagcaagagattcgtattaatccttagatttagttctctgagtgctttgctgatcttctaaggaaggttcttgtctttttatgatgagtttagagctatccatgtatagacacatttttatgtttatctgttggacaggatcttttacttttcaatggatctagtgactctcttaagaactacctaatggcttttattttacattcttaaccccataatatttagtataaagtttgtagataaaatgttatatcatctgcagcttttcttttagtaagagatttgtgattgacctcaagtagcctaatcatgttgcttacaaattgcgattacggaatccttttttttgtgggttgcgaattgcagtcttgctgctctttgctgttgctgtttgttggaggaatgctgcttctgagaatgccgccagtctctgtggatctcgtcgtttactgtcagcattatgtgtctaatcgaagacatatgccataacactctatgtcttgtgtactatcgtgtgtcaatgtctgttaatgtttacctctttgtttgagagtgcactcatccagagcatggattagacaagtaggtttcttgtggatgtcattgtaatttgtattatttggaaaacgtgattggtattttacctaaatttatgttttcaatggctgaattacggtgataataaaatgcgacatttgtatttgttccaagtttgataaaaggcaaaaactagtacaaagaaaagtttgaaaacacatgaaggtgcaaagagactaaagaatcctaacatatggtggtgcatcttttctagtcccaaccactgttcggtagaggtaaagtttatcaaccttctctctttcatcttcttcattctgttccatcccattattctcattctcgttgatgatctctacgttaagccgtggcgaattctgcgcgagcctcttgcagccaccgagtgttacttcacaagacgacatccaaagggatcgcattgtttcgtacctacccacgtcagcaagaagcgcagcgttcccaaaaggactgtcccttatctccagcttcctcatttttttgcatccattcaacacatagagcattcctttgtcagtgtcccccgcaaaagctatcgaaagcatctcgagctgttccgcgtacataccgatgtagagaaagacttgatcggttaagagaccggagacagagagccgtcttagacccttgcaagcttgtacgattgcaccaaagccctcgtccagtgattgaaatgtaatgtggtcaggtttgtgtggctcgagaatgcatagcctgaaccggatgaagtttggacagtttttggccacggctatgagcgctgcgtttgtcatctgtttgcagaagtacagaatcgaatgaagtttagggcaacctgcggaaatggcgactagtccaacctcagtcacagatgcgttgttatcttcttcaccatgtacatcagagggaaaaactctaagctcttgtaactctttacatgtggcagcgacaaccgcaagtcctttgtcaccaatactatccaatatctgtaggaaccataaaaaccatttgttgtcaggttagcaagttagtttattttcttcaggacagtgaaaagagaaagtgagaacaaacttacccataatcgttgaagtctcttgcaaagctgaataagcttaatgaggtggttgccttggatttcagctgcatagctgaggttcaaagagataaggttttggcaaattgggtagaacgctgggaggcagagtggagcaacctctaaaaagccagacaagctccttaacgatgtgtatttcttaatggcagtcatgagttttgcaaaagattcaggatctggctcattctcataagaccctactcctaagtccactagctgcggcgcacaactcattaaccttgcgagtgcgtcaagcggtactgcacggtttaacttcaagctcttcaggtttggtgacctagcaacaagcctttctaaagcagcaacattggtctctcctttaaggcaagcgaaattcaacgacataagagtagtgcagctatctggaaaacagttcagccattgacctctatgatcatcaatctcattctcttgcaagtccagctcacgaagatgcctaataagaaagacaacaacacattttaaaaacaacataaaacctagagaaacgccagtaaaagaaaggcctttacctgcaattagcggcaatggaagctaagccatcagtggtaaacccttcacagctaacaagaaccaaagacttgaaatttgcaaaagaacgtgaaagaaggtccaagctttcatctgttacaaccatccgcttcaacctcagctcctcaagtcccacacggcttctagccaaagcttcaatccaaggatgcacgaaacctccccattcatgaggaaccaagttgaagtctgcaaaatgaggcttcccttttaaagttaaggatttgagacatggaaacctcctgatcaacctctccgggttaatcgcgtagcagtttccgatgaacacttccttcctactaaacctctcgatcttgtgccatgatttgcagaccagagatatcgagttcctgtctttgtgagaagctacgaagtcaaacacgtgctctataacctcgtctgggaaataattcatcttcctctattgattgtcgaacagaggaattgacttcaagcttagctcagtgaagaaagcttcgtggtccagtgagatccacaacactaccaggttcgaaatcggaggctcacaaaatggagaagcttagaagagctcaagaaaatccaccgaaacctgaagaatctgcaacaaagcgagattcaaattatacaaactaatttagaaacaacagatcctgaaactcgataaactaaacacagagattaagattcagatctacaagaaagtaaatgagctagatctagaaagagtttcgagaccttgagcttatgaagctactaagatcgtcgtcggaaccaaactcgctgatgattcgattgaagaaaaacgttggaaaatgatgaatctggataaaactctggagttagcttcaagtccaatgatgatgagatgatcaaagatttggatgagtgagagagagaagagaagagagagatcacgcaagccaaaaaaaaccagaaactctgtaatggaacaatttaatcaagaggagagaagctttaacctagctgaccaaaaaactaaccatggttaagttaaagcttgttgggtgttggatgatccaacggaggagaatggttcaatggatagcataaaaaggaatcttgaccgttgaggagtggtatggttaattggttatggcatgtgttgctcaccactggtttacgagacctttcgccaaagagaaagggtgaagtgatgcattagtgtcagagcaagggacatgtacaatgcccttgtctttttatgttattactaaattgccatgtaaaagctttcatggccaataggaaaatataatatgttccatactgaattaatttattattggttttaatcgtttttgattacgtataatcaatctttcacggttgttagaaagtgcaacaatgtgaaaagtattcgtgaaaatgatatttgatgtgtattaatatttattggttaatctaatataatacggtatttttaattcgttaaaaagtacaataagaagaaactaaataatatccaacgtactgtcgtatcgtactgcatcaaatacgtatgttgttattcccacatcatgttattttttttgtcaaaaatttgttatccccattttagacacttatttcgttaatttatagtcaaataaactcgtaattttagttaactgtggaataaacgaaaagaagagaagcaaatttgtcgttgggacgatgacaccttttacggaattagaagttgatgagattttttttatttttttatgttttcataaccaaacaaatccaaaagctaatcaaactcccatctttttcaaaagaaggtagttatgggtagggttccatctcgattaattcgtaactctattgaaaacaaacaagtttactattcaaacaataaaaagatttttaagtagtacattttgtttcgatttgtcatatactgtatatttaagacaaattctaaaaatcatcgtttaattgtgttttactgcctaaattcagaatttataatatttatattagtttttttttatatatatctactagataaataaaccaaaaaaaaatcattaagaaaaaaagaatataaaaggagcaaaaaggtggcataatcaaactcaataatagacccacttgcagattattacatggagaaaaggggaagaacgaagagtacacaaacaaaatcattgttactactcgttgagactcgaaagattagagtcatttctctagcacaccattaatttagtagttttgaaaataaatggcactaattattggtcaagtacttactatcacatactatcaactaataatctttcataatcctctaaacatttccctaattgctactcgtatgtagaaacaagtttaagtcctttgttgtatcttcatactctctggaaaatcaacacttgtcttggtaaaagtaaattattttttaatccaaaaaagttatatagtgatgatttcacctctctcttgacccatcatatgctacaatggctgccatgtgaatgccaccttttagtaatcatctccattttcaccatcgatagccccaaatatttcaccattatcttggtttcagttgactcggataatgcctgaattattggattttactgtgcaaccaacccccatctctcaccttagttaaattatctggtaaagtaagtccaagatttgattatttacttaaaaatacatattcaagcatttctctcctttccaaataaaaattttgggttaccttttaagacaaagtgagaaacctaacagtaagaaaataaaatattcaggggtatcaaagcttagaatatcgaaaatgataatcatctggtctctatcatcggtaaaagtttttgtaattttcttctagaactcttatcttcttctattttctttttccagcttttggttggttcatgagattctttttccttttatcctatgaatccaaaggcccaaaaagcagagagagagagactcataatgacgcatgtctctcttattcaataatctcccacatacaaacaccagtagttacacaataccaaccacacacatccatatcatatcaataacatcatatacacatatcgatctgtcgacatacattacacattttaagtatgtatgtatttgtatctcccaatatgagattcggaaaggaaccctttttcagttctcattgtcactccctggtggtccagtttttttttcattaagaacataagagttatgatgatattctcctgacaaaattctgtaactcctataattgaactatacgaatctatgtgtagaatataaaatggtgctatatactactacaggttatacgataaaaaccatgtggggagattcacttcaacatacactgctgagacaagaagatctaaatgttttcagcaacccctttagataaaaggggtcactactcacaatactctcacaagccacatagaatcactcaaagaacgagctcattaaacataacaatcgaacgactatgctaccagcatttcatcctaagagttgtatttctctcctaactaccagttgaagacagaacattgaggatgagaactaaaagtttcgacctttactcatccgcagcatgaaaagcaaagaacatagcgagtagattctagtgtactcatacaatctctttaactggtttaggttaacccaagcccatctcattaaccttcaaggacttgccaaaggaacacaagaacatgaactagtttttccaaagacttactataagctgcatcattatctctaaagctcacacagaatgaccaatccactaccagttttttctaaatgtaaagtcacaagcaacgatctttaaagctcacacagaatggaagttacgcatcaagcgactaaagatcagaaagcataagaggcacaatggattgaattgcaagaacatcatagatatatataaagcccactttggtccaagcgtttgaaacatcaatagatataactaataatcactgaacagtgacaaactctcttttagaatcaaaggaactaattctcagttatcttaatcactaacctcttacaagctaaggtctttaagcatcactatcactgctttcatcatcctcgtcgttgacatggcggttactgaattcattggggatgaaaactccaggctggctcgatcttctcctagtcctcgacggaaggatattatccaaatcaacctcagccaaaggatcatcggagaaatcgctttcgtcgtcttcatcaaaaccttcgtcatcttcatcatcatcactgtcgtcttcatcatcactttcttccacttcgatcatttttccctttcccttatcctctcgcgaaatccctttacctttcctatcaacaacttcttcttcttcttcttcttcctcgtcgtcttcctcttcatcttcttcatcctcttgctcctcttcagctccaacatcgccgattacgccactctcaacctcttcagctgctttctccgataaaaccgatgattctgctccaatcgtttcctcggtggaagaattcagattctcgatttggccacttccattagtttctccgtctttggactcagaatcagcagaattcaatgaaggattaagcttctgagccttgtttgtcacattatcctggtcttgacaaaacagatccgattttcgcttcacaggaaacgaagaatcctgttgattctcaacatccgccatagatgaatcaatcttcttacttcagagactcgcgattttggtttgaggacgacgattcagagttagggctttgaagctgaatcaaaacactcgagccaatttagtttgtaaccctagaagtttttgtagggttttaccgtctctgttttttattatttggatctctgaacacatttggcccagtattagcccatttacctatcttctcaaaatatttggttcttaacaaattcaagcctaaccattagtacaattttaattttgatctgtacattttcaaaaaccggactcgaaccaagatcaaattcaacaattgtggcaattttaatggtcgagtctccagtgtgtatgtggcagtaggagaacgtgccgggggatattaaaccggctcaatgctacagtcgtaccggtttgtttttttactcgttggtatataattaaaaccggttatccaatttgacaggcagagagaagaagatttgattgaagtacagatccatcggagaagaagacagagagattgaagatcaatgacttcgagatattgggtggtgtctcttccagtgaaagactctgcttcttcgttatggaatcgattacaagagcagatctctaagcattcctttgatactccagtttatcgggtactctgatttttgctcgatttggtcttattgcaaaatttagcacagatcttatactatctcttgctactttcgtgtctacgattctaattacgatctaattccgtgagttttggtttcaatttcgcagtttaacattcctaatcttcgtgttggaaccttagattctctactcgctctcggcgatgatctgcttaaggtaaaattcatttgatcactgagtggattttatgtttttgattttaaaattcctctcttgattgagaaatttttgagatttgtagtcgaacagctttgtggaaggagtttcgcaaaagatcaggagacagatcgaagaattggagaggatttctggtgttgagagcaacgctcttacagttgatggagttcctgttgattcttatctcaccaggtatttgtgattttccgtctcagaaggagttaattgctaatttggtggtgatcgaattgttaaagaacgaaacttttgttgattggtggactcaaggtttgtgtgggatgaagctaagtacccaacaatgtcacctctgaaggaggttgtggacaatattcagtctcaggttgcaaaaattgaggatgatctcaaggtattgtagcttaaaccttttgttttattgtaaaaaaaaaggaagcttcacctttaagcagaaagattagctgcatgagaccgatggtataaaatttgcaattcgagtttcttacgatgatcaaatgaattgctttggttcaaatggtggtgttaacgactctgattgcacattttattcaggttcgtgttgctgaatataacaatatccgtggtcaactcaatgccattaaccgaaagcaaagtggaaggtaattcttttcttctcatatttatactataagagcacactagaaactgtgggcggtttagcaacaacaaattttgaagtttgttttctcatctatctgatttttgcttgaagcatgatttaccacgtgaacgttttagaataatacaaagttattttccagaatattgctgttggtctttatcgatatctcagctttgtttagtatctttgtggcattgtggctgatcgtcctcctttttgtctcagcttagctgttcgtgacctctcaaacttggttaagccagaagatattgtcgagtccgaacatctcgtaactctccttgcagttgttccgaagtattcccaaaaagactggctagcatgttatgagactttgaccgattatgtggtaaatttgttgacttgctaggtttattgaatagaccagtggtaacactactggtttgacgtaccgtgattttaatcaatttatcctaacttgtttcaggttcctaggtcctcgaagaaattgtttgaggataatgagtatgccctttacaccgtcactctctttactcgtgtcgcagataatttcaggattgctgctcgtgagaaaggattccaagtgagtattctgttcaagttcctgatattacctctagagttacgtagaagttaaaaatgattacatgctagtaggagtgaaatttcctacgaactgattgtattcatggtgcaagttcagaaatttggtttagattcaaagatttgttcatcatatattgtacaccatcctcttctaggtccgtgattttgaacaaagtgttgaagcacaagagactcgtaaacaagagctagcaaagttggttcaggatcaggaaagtttgagaagctctcttttgcagtggtgctacaccagttatggagaggtaggtatctacacattgctctgaatagatattctcttgtaatacaatacctgaatctgttttgatcttcggtctacatctgtaggttttcagctcctggatgcatttctgtgctgtgcgtacattcgctgagagcattatgagatacggtttacctccggcgttcttggtaaattaggactccaagctatgctattttagagaattcctctaccctactatctcccttaccaaattactttctcttgtctttccaggcatgtgtcttatctccggctgtgaaaagtgaaaagaaagtacgctccattcttgaacgcttgtgtgattctaccaacaggtatgttaaaactctctacctatctatcgctctaggtgtaggatacatggaagctgtttaacatcaaccttcatattgatctggcgaagaaaaatgtactgatagttatgaccttaataacgaaagaaattgcagaagtttgaggagaaagtcaggaaccaagtaaaaccaaacttgtattagcatgcaatgcgttcttgaggctaaatctattaatcagaactaagtcgctttagttagattcatctattgatgtagtgtagttcgatgagatttcaaattgagcgttttgggtctcattgtatgaaaacaatgcagtttatactggaaaagcgaggaggatgcaggagccatggctggtttagctggtgactcagagacacatccttatgtctccttcactatcaaccttgcttaaaaatatgatgagagatgcttttgatgccacttctcctctggtcttctcatctgttatatttgtttgtggtctatagatttcacatttatttttcgtaacatattttgattttcataaataaggtggaactcaagagagatgttgctgtaattttatttggccggagtcttttagattccggcgagtttcagacacttgtggaagacagaagggttatacagttgttaaagcctttttgtcattttgtgacatggttgatttatttatatcatcactctgtttcgtttttgtctgaaaaatgtttttggcttctattggtattttcaaaccgatgttggaatgatctggagattagcatttagcaatcatgcaaactggtaacatttgtggctgagtgaagatgttaaattgggcagctgatgttttatacttttaactaaaaattgatattcttactactttagtttcttgtaagttgtaacatattacagtatctatcttttacatagtagagtttttctaatctcactttaccctcttacaatatttaagccactgcattttctaattttggtttcttaaaacgatttttcttttgttgttttaacctgcctaacgactataatcgttttctctaaattagtcatggttgcacacttgtattttatatgaacaaaatattcatacacataagaataacagtaacaacgtagtatatgttgaagttcatgtgatgaagagtaaaacagactccaagaaggaacaatgaggctctaaaagcgaaccacaaaagattacaacatcaatagtgtagaaacctaacaagtattggttcattaaaacatagaaaggtacagatcccaacaatggctagaaccaaggaaatatcaggatggagccgcattgatctgcctgaaatcttcccattaagctggcctgagcttggaccaggcgcttctggttctggaacaggagatgtcgctgtctctattggccagtctttggtcggagaagggaaaaatgaagacatatctggtgcattgatatacggtaaaacagcaggagaagctaagattgtggattcactgcaaaccagagtccattgaaccgatacaacgatcaagagaaacgcggaaactgagacgctagaaaacagagccatgggtgtttctttttcttctgttctgcacaagaaagatattttaccaagtaagtataaataatagaacagagaagaagacagattcttttgttcccatgtgtgagtgtgcgtgtcttactaagaaacaaagaattgcaatgaatatgttcacggaccagagtatgtgtccttaattgtttcacatgcttatttttggtttcttcctcttaagtcatgtgatttcatttacctctttttcacttccaccactaagggggtaacaagtagaaaccttaatgatcttgaagcataattctgaagtaaatgagaagcggtggagacttcggcaactagcaagattgatgatatggcaatgagctttttttttttttgtgatttcaagcataagaattacataagaggaagcttgcaaatagaaagaatcaaacagaacaaggtagtgaaacatcagcattaacaaatctttagcttttctttctcaaaacaaacgtacaagaggctcgtggcgggagcatgtaatctgcaagcttgttgatcttcttctgcagactcaaatgacttgtgaaggtcttgcaataatttaccagctcgctgtgttttcgagctttcagagagtaaaagaatttgatgatgatgaggctacaacagtctaagatgagcggtgtcatttaaccgctttacctgccacccggttttccacgaatgctgtaatacggtcacagaggaatcctccacacagatcttatgtgtcattaccgggctgcatccaaggataccggtaagaagacactttataggtaaagagtgagtgaaaactccaatgcaggttgagagttgagaagaagaactcttgatgtttatatcacctaggtgttgttcatcattgtgattactaaatatctcttcactaccctcgtgatcaccagttgcattcatcacctgaaaccggctcttcccagatttcttccttgtaagaattgggcgatgaatagaagtagctaacgagaaccctctggaatttgtgtgctgtgtagatggaagaagttctgacctgagcttctccgaaagtcctgagactgtcccattcagaaactgaaccatccgaaactctacttgtctgagtgattcaccagatggagctgagaaatcaggttggcatctttctattaaacttagagtttcaggtgtgtaaatctctgaccgatgacagctttcccagtcccctaaactcatctcaaccacagcatccgagacttgcaaatgctcctcaggaaaattcatttcctgcaacaagtatcaatgcagcattcaatccagaaatcatcctacaagcatcctaactagttccatcgcagtcttaagagattcttactatatttgtttgttcttattactaatccatcacgcaacattattgaaccatgaacaacactatagagtcttaaagttgtttttcttagaatcatcaggctgattcgatctaacaagattatagaatgatttaggttggtttcgtttcatgagcttcctagctactatactaatacctaattttgaagaattggattccaatttcacagccttagatctagaattgagaaatcgaagagtagagactgtacctggcaaacagaaacagccatggatctagctcgatccagaggcgaagagaagacggaggtgaatcgaacaccttcagagtttaaaaatacggctagagctctcgcctgacgtttcccgttgggtgtgagagtagccacgtggcatctacctccaatcagatcaggcctgagattgagatcacactcgccgtggctgatgaaatagacttccgtcacggcggagcgatcgtgttccgcggcggaggagatacgagagaaaagaggcggagaagaaggaggaggtggcgcgaggacgttgtaaggatcccagactttaatggaaggtccgattcgaggagttccaagagaagagagctgaggagagagtggagaagcagaggcgtgacaaggaagcatctcaggctcttgctcgagaactttcttgaccaagagattatccagctcgattcttctgttattcaattcgctctctgcttcatcttcttcttcttctacttcttcaccttcgctctctgcttcatcttcttcttcttcttcttcatcgagtaattgcgaagactgtgatgaccccatcgcctttctcttgagtactcggaaaatgcagtgtcggagcttaacgcgaaagacttagttagaaatttttcagatctgatgatgggtgtgaaacctccaggtcagttagagggttcagaatcttaacgacccggcccaaaccataatttatgttttttactacttaattattaaaacgaaaattcaattaaaatgtatgcaactaagaaatacaaatctattcaaaatgaagtatctaatattttgtatctattaatatacaaaatatatatatcataaatcacgataaacataaatatatatttactaatcttgatagtcattaatacaaactgattatctaattaataatataaaattgaataccttcaatattgattatatataaaaattacttaatatttttttatttcacacatagtgcagatatgtgaaatagtttctctcaattatattaattagccaataagcttatttatacaagaatgttacttgcatagcaagcaagttctttagatttatgataatactaaatctacctatttaataacaagaatatattttacaatatgaattttactttcaagtcgatctcgtaatcccctaaatctcctaataaaaaaatctagtatttataaaagtgggatggagagtagagaggattcattcatatcaaaagagaagaaatcaactatgaaaaaagaaaaacaagcgattgcatcacaaagaaatagaagaagagtaattaaaaatagaggaaacgggaagcgattgattgcatcattatcacaacgaaagagaagaagaatacctagaggaagaggaaacgagaaggcagtgtttgcaccatcatcactaccaaacgatgttgtagaggaaatcttcttacgacttccggtgaaagcaataatccaactaaagtctctctcaaaacaatggagatcgacgatcgagtctcgcagttttgaagagagacacttgaagatcgtcgagcgatcacgcgtggattttccacaggtcatggtcatgtctgaagaatattccttgaaaggaagtaaaggtaatcagcctcgtccagatacagacattggttttagtacaatctgtttggaatcggcttctattctgtcctccactcttatcactttccctcaaggatttcaacaccggatctatgcttctgaaagctgtgacggacttttctgcatccattccctaaaaacacaagccatatatgtagttaacccggccactcggtggtttcgacaacttcctccggctaggtttcagattttgatgcaaaagttataccccactcaagacacttggattgacataaaaccagtagtctgttatacagcattcgtgaaggccaatgattacaaattagtgtggttgtataattctgatgcctcgaatccaaacctgggagttacaaagtgcgaggtttttgattttagggcaaacgcttggaggtacttgacttgcactccaagctatcggatattccctgaccaagtaccagcagctacaaacgggtctatttattggttcacggaaccatataatggcgaaataaaagtggtagctctcgatattcacactgaaacgtttcgtgtgctacctaagattaatccggccattgctagttcagatcctgaccatatcgacatgtgcactttggataatggtttgtgcatgtcgaaaagagaatcggatacgttggtccaagagatatggaggttaaaatcatcagaagactcatgggagaaggtttataccatagatttgctttcttgttcttcttcttctttatctgagttccgcgatggatttaattggacacgaaaagatttggttgagccatccacaccagtggcgatatgcaaggacaagaagattctgctctcacatcgctatgcccgcaatatgatcaaatacgatccccaaataaaatctatcagtttaatttaccaacctcctttgtgtagaagatatgcttcttattttcagagtttgatctctcatatataaaatgctttgatgtatttggaagcatgtaatgtaagaaacaaagcattaattgtttggattgttatattatccgatagcatgctgttattcataaatcataataaaccatacttatttcgccaaatgacactatacttaccaaaaatcatactactttatgaaatgatacagatttttcaaaaaaatgaggacgagtattttcgttaatccacacaaaaatcagtttcattctgtgtgtggatgtaaaaggaagatgaaatatagattttatcttaaagggaccattgcctcgttgttaaaaaaaagggaccattgcatccgacatcttttatccgtattaatcttgaaatgtttattcaatatactttgttgcaagatttttttttattcaatatacttttgttattcatgtcaaaaaaaatttgattaatagccaatctatgtaacaatctaaacacaagtttgccgctacaattaatatgagtctatgacacacatcacaaagttttgagagattaaaattctttagtcccaaatacttcaaatatagaaaaaaactacaatttttcttttcaaaatttgtttattttacggtgacaatttttatgattgccaaccaaatcccacattattaagtttttcaaccaaactgaactgtatacttattttgattattaacggtcggatttagctttaactaaatcatcttcctaagctctatcactgaaataattctgcagacaaaaaaaaatgagagagaggtggcaaagatgaagtggaggtgagagacggaaagcaaaaacaatagtcacgagaatcaacaccaactcttaaaccaagatagaccaagaaaccaaacagagtaaataaatggtggccttgacaacattgaaatccccaaaaatctcaactttttagggttttcgagctctgaaatctctctatctttcttcttcagatttctcacttttttcttcttcataagatcctcgtgattccactttataacgtacgcctcctttcaagaaaaatctctctctatattatctacgtttctctcgccttgtctccttttgaggttccatttctacttctctccaaaattcgaaacttttcccactctctctctctctctactagtttgacatgaacagcgacggtgtttggcttgacggctccggtgaatctccggaagttaataacggtgaagctgcgtcttgggtcagaaacccagatgaagactggttcaataacccaccaccaccacaacacactaatcaaaacgacttcagattcaatggtggctttcctttaaacccctcagagaatctgcttcttcttcttcagcaatcgattgattcttcttcttcttcttctccgttattacatcctttcacactcgacgctgcttcacagcaacaacaacaacaacaacaacaacaggaacagtctttcttagctacgaaagcttgtatagtttctcttctcaacgtcccaaccatcaataacaacactttcgatgacttcggctttgactctggtttcttaggacaacaattccatggaaatcatcaatctccgaactcgatgaatttcactggcttaaaccactcagtaccggattttcttccagctccggaaaacagctcaggatcatgtggattgagtcctctgttctcaaacagagcaaaggttttaaaaccgttacaggtaatggcttcatctggctcgcagccaactctgtttcagaaacgagctgcaatgcgtcagagctcgagtagcaaaatgtgcaattctgagagttcttctgaaatgaggaaatcgagctacgagagagagattgacgatactagtaccggaatcatcgatatctctggattgaattacgaatctgatgaccataatactaataacaacaaaggtaagaagaaaggaatgcctgcaaagaatcttatggctgagagaagaagaaggaagaagcttaatgataggctttacatgcttagatcagttgttcccaagatcagcaaagtaaccaaaaagattcttccttttttctctttgttctccttaataacttcttgtgtcactaattttgggttgcaaatgtagatggatagagcatcaatacttggagatgctattgattacctcaaagagcttttacaaagaatcaacgatcttcacaccgaacttgaatctactccaccgagttcttcaagcttgcatccgttaacaccgactccacaaacgctgtcttaccgtgttaaggaagagttgtgtccatcttcctccttgccaagtcctaaaggccaacaaccaagagtaagaataagctcaattgctttctagtggacaaagctgtattctttaattttcttagtaacgcttctttgttttgatataggttgaggttagattaagagaaggaaaggcagtgaacatacacatgttctgtggacgtagaccaggtcttttactttccaccatgagagctttggataacttaggattggatgttcaacaagcggtgattagctgtttcaatggttttgctttggatgttttccgcgctgaggtaatatagttgttaagatgctatgctgatcactgattagtaaaactagcagtcaaagaatagttatttgagagaatgattagtatacaagtaacaacatgttttgtgtttctaatcagcaatgtcaagaagaccatgacgtgttacctgaacaaatcaaagcagtgcttttagatacagcaggttacgctggtttggtttgattgcgaagcagaaggaagcatctgtgtggaacagagctagatctaagtccttgttctgttttagtcagcaattttcttacttagtttcatcaatttcaatcatgtatggaagatgataactgttttattttagctatgagaacatgtgtttggggaacaatagttgcaacctttgagcaaaatgccattgtttctcaataattctactttgcttttcatttatatgttgtttgcaagaagagagcaatgttgattttcattgataaaacacacatgagtctgtcatgagaaaaggctaaacaaaatattaagaaatgcacaattcataggcaaacgctctgatatatcaatttttcagaacagagatgaatctctatgtaaaattcatattctttataaatgtctgagcttggttcagtttagtaagatttggtttgtgccgtgggcgactgaagatgttaaagacaaaaacataatggaaccagataaacttggctaattggtaagaattaaaagaaaatctatggtataaatcttctcccatgtgtcttctgatgatttcttcagcctccaaatattttggatcagcttatctccttctcttttcgacatgcacaaagcattatccagagtgtatatatggctaggatctaaactagcaatagcgggaactatctttggcagcaaccggaatttttctgtaatgatatcgaaaactattactttgatttcagcattatatagctctgtgaaccaataaagcgtcccgtttacagatgctggcttttgggcatggtatattcgataacttggcgtgcaattcaagtacctccaagcgtttaccctaaaatcaaaaacctcacacttggtaagtccttcgtttggactcgtggcatcagaatgagacgcattagaattataaaaccacacttatttgtataatttgcatccatctctattgttttgagagagactttagtcgaattagtgatttcacaggaagtctcaagaagatttcctctacaacgtcgtttactagatagggaagtgagaaatcataattcatgagcaaagcttttcttgatgcatttgcaacaccttaagaatatctgatggttaatgattttaatcatgttcattgttggataatcaacatgtccaaaaacatgaggtgataatatgatccaacaaaagagagatttcaaatatgtaatcaacttaatgtcattgactttctgcaatgagctcaagaagagcaattgctaggcaaattttgaatctttggatatgatgagtaggctttttgaactttgtcttgattttgatgtctaaaagatatataagtgtagcctcgttcattctaaataacaacaaacgtataatggaagcaaaaataaaaacacacataatcggtaaaaaatacaatgagttctttctttcatgcttcaaaacgcatcaaaataattagtagtattttatttaaatatgagaaatcaaacttggaaaataaggaacagatcttaaacacaaaaattgtctgaaaaatgagcaaagagatcctgtttgggaatttaccagattgcaggtatagcgatgtgagagtatgatcttcttgtccttgtatatcgccaccggtgtggatgactcaaccaaatccttttgggtccaataacataatctggtcaaattatatccatcgagaacatggaaatggcaataagaagaagaaagcagatttatggtataaatcttctcccatgcgtcttccgatgatttcaacctccaaatctcttggatgatcttcttatccccttctgtttcgtacatgcacaaactattatctataatgcacatgtcaatatggctaggctctgaactagcaataaggctaggcttaggcagcaaccgaaatatttcggtgtgaatatccaaagctattactttgatttctgcattatatgtttccgtgaaccaataaagcgtcccgtttgcagatgctggcttttggtcatgatatattcgataacttggtatgcaagtcaagtatctccaagcgtttgccttaaaatcaaaaacctcgcacttagtaactctcgaggcatcagagttatacaaccacactaatttgtaatcagtggccttcacgaatgctagatgattgactggtatcatgtctctcaaagtatctagagtggggtttaacttgtgcataaagatctgaaacctagccggaggaagttgtcggaaccaacgtgttgctggattaactacatatatgtcttgtgtttttggggaatgaatgcagaaaattccgtcacagctttcagaagcgtagatgggatgatggaatccgcgagggaaattgaaaagagcagaggataaaaaactaactgattccaaagagatagtcctaaaactaatctctatgtctggattccatttttcagtgatgatcatgacttttggatgatccacatgtgatcgctcggctattttcaagtgcctctgtgagaaatagcaagactcgagcgtcgatctccattgttttgagagagacttaaatctcattagggctttgaccggaagtttcaagaagatttcttctacgacatcgtctggtaatgatgatgatgcaatcattagcttcttgtatcttctctttctttgtgatgatgatgatgatgatacaatcgcttgcttttcttcatccatgaccattgtttttcttcttcttattgatacgagtgaattggttttgtctttttatacacacacttatctccaaattctactctgttaaggattgataaggattagccggttatgaaaaaggaagtttatcatcccacaaaatttatgtttaaattaaaataatagaaaaggaaataaaagccaatttcgactaaggaaatggaaatacatttttttcagaaacaatttatttattctctaatttgagtgattttagcaaaaacgaaaaaaatacaagatttgctaacaaacaattctgattggctaaaactaaaaccaagacccaacaaaaaaaaaaaaaaaagacactagaaacgaattgaaagtttgaacctatatgaattcggttttcagcagtcttgtttaaaacacgtctcaagataagttttatagaatcaattatcgaatagttcttctctatagtggagaatactcgtgagataaaacagtaataagtcaaatacagaatcagatccttttagtgacttgcttcgaatttgcgttcttaaggttcttcttgtttttgagctctaacaaaaataatttatttattttcatgtataaatattaaaactgattatatagagagacaggtgatagttagcagtgaatgctcgttggtacaactcctcattcttctccgcaaaaatagcaagttatttaacaaacaaaaaaattcatataaacgattttatttttttgtgacttttgagattcgttaattctggaaaatttgtttattttcaaaacaagaatatggattcgtcataaaagctaggctatgatcaacatgtttcatacaaacaagaacagggcttttcaagaaagtagcattctctgtttctgttgtctcaatcccttttgattttttttgtgttggcagattcatcaaatgtcggttctttcttctcggacaggacgagatcgtcaacgttacgacaacaacttccgtctcgtttctgggtaccaacaacttacacaacaaaaaatcattttgttttgtttttttgtttcttgcaaatcttgaaaattttcaagaaaccccaaaaatcagaaaacaaaattgttgattttcttgttgtttgtttctctatacattatgaacagatgcattccttataggctgatgaaagctgacgaaactgaagaagactcaggtgttgactttgtaaacaaacttgaagttcttatggtttcatctcctaatcgtcatgatcttgtcttcccaaaggtctttttttgaattgaaaaatcatcctctgtactatcatttgtaattgctcatgttaatttgttgtgtatattattatcagggaggatgggaagatgatgagactgttcttgaagctgcttctcgtgaagccattgaagaagcaggagttaaaggaatacttagagtaagtttacacctttattaaacaaaacactaagaaagctattttaaagttttttgaattagatgtgttttggtcatgtttttgtttataggaacttcctttaggagtttgggaatttagaagcaaaagtagcacagtggaggatgaatgtttaggtggatgtaaaggatatatgtttgcattaaaagttaccgaagaactcgaggattggccagagcgaaagaatcgtgaacgaagatgggtaaagcttaagattcaaatgtgtagttattcatataagtaagtacaatgttttaactctgagattactcgaaaatgtgcagttgactgttaaagaagcgttggagctttgtcggtatgagtggatgcagagagcacttgaagagtttttgagagtaatggaagatgaaagaagattgagaacagaggaagagacagtgcatgattcttcaaagctagaggaggagagtcaaatagatccttggtactgttttgtagttaactagtttttcatattctttagctaacgtaaacaaattgaaaaaatgagaagtaaagtgactgcaacacatgtgacatgatataatctcaaatcatctgtcttgaatcttgatatctgtctgtttgaagtgataaagatagagttgtctttatatgcaattgggacaccaaatgcaaaaagacaaaggacatagaagaaattacctaatcacacacaaatcaatgcttaaggcttgacttcaaaatcaactgaatacacttaagaatccaaatccctaagcttatgtcacatgtttagttaggtttcttgacatttgtacagtttttgtctgagtctataatgacaatgtccttgtcacaacttggctttgctccatacattccttaatatgaatcacctcacagactaaagtgtggaaaatattaagcaaaaggacaaaaatagagaaaatatgaaacacttccttgtttctgctgacacagtttacgaaggagaaataagtctttggagttaaatttttgaactcccaacagtttccttaaatttaatgccaaatccaaaaaggcatcaatcaagttcacacactcttttgctcttcttactcaatatagagtttatatagcagcataaggaacctcaaagctcaagagacttaaagagagagaaacattgatctctgaatattgtgaacatgttgaaatcaagtaacaagagaaaaagcaaagaagagaagaagttacaagaagggaagtaccttggagtgaggagacgtccatggggaagatatgcagctgaaatcagaaacccttttactaaagaaagacattggcttggaacgtttgatacagccgaagaagctgcttttgcatatgacgttgctgctcgatccatcagcggctctctagctacaacaaacttcttctacactgaaaacacctctttagaaagacatccacaacagtctttggagcctcatatgacttggggatcttctagtctctgtcttcttcaagatcagccttttgaaaacaaccattttgttgctgatcctatctcttcttctttttctcaaaaacaagagtcttctaccaatctcactaacactttctcacattgttataatgatggtgatcatgttggccaaagcaaagagatttctttacctaatgatatgtcaaacagtttattcggtcatcaggacaaagtcggtgaacatgacaatgcagaccatatgaagtttggctcagttctcagcgacgaacctctctgctttgagtatgactacattgggaattatcttcagagttttctcaaagatgtcaacgacgatgctccacagtttcttatgtgagcttgtattaccgatccttcaatttatgtaatataaaaagtattgtatctttctttagtgtcaaatgcattcccaaaccagagttgtgtattaagcagaggatgtaatatgtttgaatcaagtttattactataaattatagagcacaaatacataataaactcaggaactacaattatacattccgaatcatgtaacagtaaaaaataatggagcagacatcaagaggttgttgagtcttcacttccagttattggcaacaatgtcagccaaatcaacgactctctgtgagtaaccccattcattgtcataccaagcaatcactttaaccatatcatctcccataaccattgtgagggaagaatcaatagtggaggatacatcagagcacctgaagtcaacagagacaagaggctcatcacagacgtcaaggatacctttaagctctttctcagctgcatctctgaaagcagcattgacttcttcagcaaaagttttcttggagacttgcacgactaagtcaaccactgaaacgtttggagttggcacacgcaatgcaattccgttaagttttcctttgaggttaggaagcacaagagccacagctttggctgctcctgtagatgttggaacaatgttcaaagctgctgctcttgctctccttagatcacggtggctcgcatctaacaacctttggtcaccagtgtatgagtgagtagttgtcattgtaccctttatgatccctaacaagtttaacacacaacacaatattactcagatttttacaagattgcaacatagcaacatttgactttcaatgagacgcttaccaaatttctggtcaagaaccttgacgaatggagcgagacagttagtagtacaagacgcattgctgatgatcgtatcttcatggctgtaaagttcagcattgacaccaacgacataagttgggatgtcaccttttccaggtgcagtgataagaaccttcttggctccagcctgaaggtgcttcccagcaccgtctctgtcaacaaacactccggttccttcgataactaagtcaatgcctagttccctaaacatcatcaccaggtttagatctaactgggttgattcaattcaaatgatatgagaagtgttgttttaacttacccccaggggagattagatgggttacgatcagatacaatcttgatgatctttccatcaacagagagagctgagtctcctgaaggtttgacatcagcgtcaaagattccaagagttgagtcgtatttgaggagatgtgatgcttgtttaacaccaccagtgtcgttaatgacaacgacatcaagaggagagtccttacgaccatgccaacacctcaagaagttcctaccaatcctaccgaacccattgatggctacctttatcttggcctcggtcacccctttcctgtatccaccattgcttctcatctacaacacagagacagaaaaaaaaaacgtatatggttaatcatggctgatcatgccatgcagccttgttcatcatggatagatctacaatggtggcattagacacaagaaacagctcttgagtttacaagattgcaccataagatatataacacaggagcaatagagaggagtgggtgaaaaaggaactcactgcagaagtttggaaactgacgaaggaaacaaactcatcggaagaagatctcttggcaaagggaagagcagaggagtttcgaagtcctgagaactcagaaaaaccctgaaaaagtaaaacatgagagtatttatgagatgatgataaaacttgtgtgaagggcaatcagataatgtggttaggaagatgaaacaaaacctgaagagatggtttggccacagagaaagtagccgaagccatggctaccagagagagaagcttgttgtatgatgtaagcagaagaggcagagagttgtaatataggaaaatatgaattgctgagttggaggcaaagaagatgagattctggatagctttgtcattcatttgtatggttgtggttttatctctcttccctcttcacgttttctatgattcacacatatttttgattttctcacttgggcttcacaagtggatgggcttctccatcatgtggtcacatttgatctagtgactcgacgacatagcttttctgacatctctatgctgcagatgaaaatcactgacacattaagaagtgtgacccttcttgctccttcttagccatttaaaagattacacattttgtctttgtaatctcaaagaaagatgtgtcattatgtctctgtacctttttgttttgcgcattgactttatagaaagctattccaagaaatacaataggtactgagaggtgtaactaactctagcagtccatagctctaatcaaatacaaaactaaacctaatcatccacaattgaggtacacacttcccatggatcatactgcaaagattgtgctacgagagaaaaagcaatgaagcaaaaatctagatcaaaggattatcctttcttatcaatcatacatcaataagagtcagtgctaagctttgcatcttgagtatagcaacaagatcaaacagattcattaattcgattgagaacagtctttacatcttgaggatagtaacaagggtaacgagacccctaatacgatagaaaatgagtaaaatctaatctgacaagagatgagaaattctttgaaaagatcaaaccctgagaatttgcagcttagtagagaaagcaattgcgacccaatcaggctgagaagaggaccactgaagctgctcaatctcagcaccagcagtgtaagctagaatagggtcaagaccaccttcaacatgctgtcccatggatgaaatatcccaaatcaaagcttgagaatcatctccagcagtacaaatgtgacaagagctatgaggagcccaagcaatggcattgacactagcttgatgtcgttgaagctcaaccacaggaagagccggaaaacgaatgtcaagcaccacaactttagcactgtccatgataatagtagccatgtacctaggatcctgtttgttccaaccaagacgcactaaaggagtatcaggctcggagctctcatagataatcgtcgaatgttccttatcacgaagatcaaacaccctaacggagccatcagctgaaacagatgcaaaaacaccaacaccaccccaagcaatatcaaaaacttccttatcatgagcaataagctgagtatcaacagcttcacgctcaatgtcccagatagtacaagtcgtatcagtactagatgttccaattcgacgtggctcagcttcattccaatcaaaagaagtaagaggaccacaaaactcactgttcttattgctattgagacaagatttgagctcaacacgggaatgatcatcagcgattctccataaacgaaggaaatcacttgaagtagcgagaagatcaggtctttggcattccttgtcaggtatgaaaatggtcttcgttggtggataaggatgctcaaaggagaggttaggatcggaacggatctcaccattggattcatcgagctgcacaatctcgacacggttcgggtattgctcgaggaggctagtgatggcgagacgatacttcttatcgcgacgaacgctccaattcattgcgtagatgtgccatggcgcttcgtatgtatagatctctgatcgcttctgctgctcatcggaaccatcttgaatcggatcgctgctcgttcccatcgtgaaatcgattccgagcaaaaaccctagaaaatcgcctccgcttctatcactcgctcaaaagcaaatggatattccagtcatccagtttattttaataattgacgaaaacgacaccgtttaaggaaaacagagtaacatggctaacatcgttatctccgtctcttcttcaccaatgattttctcggaaaatataaaaccagaagaacaacaaaaagatgtttaaaatcctcaaaaattacaacacaaattgtctaacagaaagaaagagtcaagctttttaatgttctatagaaaacaagaaacttaaatctctcttctttgttgataaaagaccatctttatgccacattttccctcactgtatcgatctgaaaccatcaccaaaagttttcccactttaatcagaatcttcgtaaacttcagtatctgataactcatcaaatgtcctcatgtcaagctggtaacgtaacataccaccaatcccaccaaaacctctgcaaaactgtgacccttcttgggatttgttagtcacaaactcaagagtgcagccgaaacgtttgtactcatttgcaaaccattcgagtagaggcatcttctcctgtacttctagctccgcgttagtctctgaatcatggaagttgcttgtatcagactcttgatctttcccaaagtgtttcaccaccatttctcctgtcgtactgttctttagctcatacctgtttatgtccagattctcccacacgataagggtttcgatagcacccatttctagagcctttagagtatcctccacaccgaaaacgtatttcccggtatcttgacttatctcctcaaagtacttcccaatcagtttcttctcctgtatgaacttcacattggatagaatctcagcagacagctcaatcgcttggttgaaaccgttttcacctccgtaagaaacatcaacaacattcaatatcttagcttgaagacgaggatcaaacaactctgattgactgagctcagttttgaaatcagctgaaccagcaaggatcagaccagagacattaggctgactcgtagctggattgatgtaaaactgtgtagcaagctcagcggttttcctaacataattgtgtctcttctccatcctaagacgggcaaaacgaagtgcagactgtcctcctcttccgtgcttcttcgggagatcaacagtaaacttatgaagaacctctctagtattcccactcaaagttccaaacagtgtcccattaccatccataacaatgaaaccaaacttgtcatcagactcaagaagctcgttcaatgcctcagtatggaacttgttgtcacaaaggtacaaggaagcattaatcggcctaaagggctcgaaatcaaacgtcaccttcttctctttaccgtcatcattaacaatggtgccggtatagagaacaagaccattagtaggaaccttgttgtaaagcttcaacctttgttgagcagaagtaatggcagacaaaacagattgacgattgactcgactcttaatgtttgaagcagttccatattcatcaccaagcatctttgtgacacgagatacttgatcacgaggaggcataataagagagatcatactcgttccattacctctagctgattcaagtcccttgattagtttcttaatcttccagatctcgatgttcgtatccgcttcttctgccatttttagcttctctcgaggtcgaagatggagaaggagaaatcaaaaagcaatcccccaactacacaagaagaacaaaatcaagtttcaaaaatgagtactttgaacagcgtgaatttcggacacaacactacgaattttggtttcaagtgaagtaaagatcgaaacttttgaataaacgattacgatgaacagattgaatccattatgcagagagattgaaatcgagcaagcaaaacgtaagctcgtacctctttttctctctcctccggcggcctctctcctcccagaattgactggcctagggttttccccaaattctaactcccaacccaatcacgtgatactcacgtggcaaaccacatggaaagcgagctaatgggctttatcttaactcaaaaggcccaattacgtgaaaagtggaactggctgtagtctacattaccaagacgccttcaaactgcgtgccgtttattggtttgcctcatagattcaaaataaataaatgagagttaaatgttaacaatgggatgtatattattatccttctcatcagatgaatctaaaagaaatggctcaagattcttcatgaggtttcttttcctctcctactgtacattagaaacagagcatcgacagaaatgaagaagatgatggatcattgccctcattattaaggcaacaaaataaaataaacattacaaaaaaaaaaagtttatcgattgatttattcatatgatgtttggatttggatcgtttcgatgagaatccgcaaaatctctcactaatcgcttcaatgttcgaccgtgtttcccttgcatatgtcctcctgaactgttattgcttccaaaattgcagcttttgttctcaagataatcgatccctgcacctcctagagcttctgaccattccctcactatgctttctgcttctccttgctttagatactcgctcggaagtgcccaaacctgaatacaaacaaacaaaaaaaagccattagaataaacaacacagaggcggagtttggtgttgatgtgatcacaagagaaagagagaaaccgctgagtttagccatccttggagagatttccaacacaacattcctttccatgaagtcctctcacataaactgcagattgcagctaattgttgcagtatcgttgaacacttatggacctaaaacaaaaacagaatcaaatatcataatccatcaactactttttgagagatcttactcaaaaatcttacccttgacatagctgcaactccaagtagagcatagaccagattagacaaaagtccctctccacagtgagatacgacctggacagagaccacgctgaatgatccatctgatatgctattcacggtttcgatcatggaagaaagtgaaacctccaagaaacctataaagttcgaaaacattgtgttaagtatgcttataaccaaaaattaatgctgttttcgtttgtaaaccactgcaaccttacctgataagtatgacattgcagctaaagcagcgcctctgtgcatagctgtacaacatatagccgctttgtggaaagaaatttcaagaagtgttccagaagtacccaacaactcctgtttgatcaatataaattcaccccaagactccttaagaaattatgaactgaaagttatactttaacaagcaaagagtggttgcaaaccttatgacaactacggataagtgctgatgcgaaattcacatacgcttccaccaaatcgggttcttggtcgcatatatatgaagaatttatgcccatcagtgatgatgcttgagtaaatctttcaaacgtagtgataaataaggacccatattcctccttatgacaaaattcttcggcgattacacaggctgtgataacaagttcgtgaaaaggtgaagttcagacaactggctggtcaataaactaagtttgggaaataatttatccaagctcgccaataaaaactgtgacaaatgaatcaacgctagcatctcaaaagatttttctccaaaagtggagcctgtacctgaattaagaaaccctcacctgttcttatgtaacattcttggctttggaatgacagaaagtttctcgatagacaatccagtacactaggtagtaacagcataaagtgctcacctgtgaataatgcaaattttcacatgttagtgaaacctgcctactgtgcgaaaacaagaaattttcacaggtgtaaaggacgctttggaataaagaaatgttccaggctaataaaggcacaacgagtcgaatgtagcggaataaaatagggagatgagaagtttgaaacctgacgactgaactgccactgaaagagcacggcatgctgctgcagctaaactaccactctccatgtgttcagacctaaatagcttctccaaaatgggccagaaaacagtcaacaaagaaaggattggaccatctgccacaggaacagatggcagagacgttgcaaggtgactgaatacagttcctatcctgattcatgaaacgagtgaagagcaaagtcatcaatatgatattcttcccaaatttgagtacacctcaaaagaaaactaccagagagtgcaagctactaaagaccatggattgatcagagtcattaaatctattttgcgcccggttaccagaaaaatatatataacacaaaattatgacaatgttatttatagatgtcttgaagtccggacgcagcaaaaagttcaccaaaaagctcctagattacatcgcaattaagcaggatagaaaatagatcagtcacagaagcagacctgtaaagacctcttgtaacagagctcagcattcgtgtataagtggctggactttgtctaccagaagactcagcgtcttcatctacctaaaaccacaaaggtattagtccaaatctatctcagaagtgcatcaaggcacggaaacattagaaaataatcccagaaagaaaaagatcatcttccaggtatcatttctgtactatctatttatttttctagttactagctgagatattgatgaatactggcctcagagaagtatgtggacaattagctgattattttttcattaatgcagagcaaaagcaaagagctacttgtacaagaaaaagaatgagaaggagaaccttgaagaataactctttctaactgaacaatataaacacttacaagtttcgaaagaactccataacttgacgaaagcaattgagttaataatttattttgtagctctttattagcaacagagccaaggatcacagtgatagcggtaatgacttcttcttcatcttccaaggtcaaatcccactgctccaaacactaagaaaagtaaaaaatatatataaatataatgattcaggatataatttcagcgtaatttgaagtttgctttgacagttaaaaaaagggtctgattaagctgatacctctcctatccacattaagatatctaaattcgatgtttcctggattacagcaggagcatcctcacaaattttacgcagagcagaagcacaagcatgtgaacaaataggttcggaaatccctcctgcgagaaataatctgaaaccagaaagaccatgcagcacttatgttatcagagaaattgatgttgaacatccttacacaagattgaaaaatagcatcagaaaaaagaaataaatatgaacagtttcaagctaatatgctaaaaaaattattgcattattgtgaacggtcattgaagaaactagacttacagcaacggtctggcgttacttggaaaaacagagatccatcttgaataggagccaacaacatctgccagtgatctgtatacctaatagttgattattgtcaaatattgactgcatttacagtacaagaaaattgttggtgaggcaaaggtatgaactgacatacaacagatataaaccccttgagctcgctggacggcctaacggaaaatgcagaaaccaattgcatgatcaatgcaaaatcaaaggcctctccctcttgcaaaataatttcagaaacctgaaatggtagaatccattaataaagacagggatgaacaatagaaactaaaactcctgaaaactgtcaaacttaagctatgatttccaaatctccaaaaaaaaaagtgataatggatggatcactaaaagagacaaaacaactaacagtagaaaacccatacaatgtgatcgtacccctctgggttgttctgaaatcagaaacttaagatgaaataacttgattggaagaaaagagctcaaaagtgctcaccgcagtaagagcaaacaacttcgcctcaatctccctcaagggcatcgaaacacttgaagaaggcacaccaccaaaaaataactacaggtatatcggcaagaaaaggttaaatataacacaagaaggaaaaaatcatacttcatcacagaacaagaaagagcaaaatctacttatcaagcaattttctaacaaaagtactcaagacaccagatgaatgctgttctgttcacgataactaacgtattagacagttacagagtgaaatcatctcatgagaactgataagatataggagaaagaagctgatttcaaggtgacatagtccaatatgttaaaatttagggtaaatcctgcctgtgaagtgagagcacaccttactcacaaatgttgtaggatgaagtagctgacaaatatctaccaagagctcaagaagattatttctaaaatgcaacaggccatcaggaaggtcaagccccggactctcatcactggaggtaaactcatcaacctgaagataaattgctaaggaattttagaagcacaaagaaagaccattagtacaataaacaaagcacttgttcaacaattcgtgggcttatgaatatttaagaaatgacaagctaggaatccaagattatttgatacagtgagtggaatgaagtaaaaagaagaaaggtaagatgcatgaaactgtgaatgacaaacctaagagtttcaagaatgtgacactgaacatattaaaaattaatccaccagaaccttaatagttaaccaatcttaacaataagaactatataaatatgaagatttccaggttaagagaaaaaatatattgaaatttgttttcttttatttctagttctccaactgatatgataacttctagatatataaaactgaaagagacataatacataagaaagtttccaagatgtaacctgagcacgcagcacaagggcatcaactaaagctgagaaaactggtagaaatgtatctttcacacgagttctgtcattctgtctgtttccacctaggctaagtatatatgtcgcaaaagttgacctaagataagaaaagataagatcaagtctgagctcaaagaacagccagaaaaaatccctctgataggaggatggcaagaaagatatgaaagtccatatgggttgtatgagagcttaataaaataccaaaactgtacagtagagtctgcaatctcccagtcttcacttggaaatgtcacacagctgaaaaagtaaatgatagaaataaacaagagtaatgtgtaaaagatattaatgcccacctaacgaaaagtcgtgtttggagaaaaaaataaacgcattgaggaaaaagaaattgagcgaatcagcttaatattgcaccaacgtgtgaatacttagactgtgtcatatgattaaggccctaattatttcaaacgccaagttttgagttttgcgttttcatgtgaaaagaaaattgaaaaacaacattttttaagtgcaaatataaaccgagaagaatctactgtttgcaaaaaggaatttaggttagtatgctatatgttgcaaatttatatgaaaaaatacacactaaatataaacgcacacaagcaatcaaggcccagtattcacctcaaaatcgcatcagtcaaaataagcgcttcagaactagcttcaactatcaagcatggtgcctgcaacatattgcaaaccgacatgagcctcacaaagagcaacaaataacgtaagtaaagagtaataacgtcacagcattggatgtacatccatgaggggataaagtggaacaagtagtctagtactcacagcttgtccgatttcagacatcaagcatgccaggccagagataatttttagatcagcatttataagagctggttttagaagtgtatctctgagaaactgtactttgtacaataaaacctgaggaagatcctgcaagaagaaaaaaaagtcaaagccaaaaaatccaagcacatacatttttcttattgacttaataaatattatgtaaccttctgctattaaactataagataatacgctgacattaaaccctatgcaacatatccaaccagaatatacaaagaaaatgatgccaatacaatgtagttcaaacatacctcatgccgagtcacaagttcaacaagcacctcaatggcaagatcaaaagtagtaccctatggaacgcaaagaaatcaaaacccaagaaacaaattgaaaggcactttacaaaaaagtgacagtaatttaaactacaagactaaggagattcacctgcagggcattaaatacatagttaagaagggggtgagaaggcactgcgccttgtggaatctcggagaaacatccagcacggacctaacaatatgaggacagacatcaaagtggaatccagtgaaatgccacaacaataaggctctactcaaaatactaagcaacatacccaactcagtaagcaacgaagtattttgcgattgttatcatgcgggtaaagaggagagacaaattggttctcagactgctggagtaagaaatcaagaaccatggaagtatgcgagagaagctattacagagcgaaaagcgaggttaagtaaaacgaggataaaaaaaaaaacagacttcgagaaagaaaggggaaagagaaggaagaaacctcctgacgaagatcagagtgatgagaaaaatggcgagtatcagatatttcttcaggaagcacagtgagaagctcaagcaagacgacattaccatcatcatgagcctgaagattctggagtgcgaacattaacttatcaaagggctttgaataaggatccgagtgaagaagaagcgcagagagagctaaacatatctgcgtcaatagctgcaaaattccacaaacacacataaacacacaatcgtttcgttcatatcaccggagaaacacaaaaagggtacaacaatacctgaggaacaccggagctatatctcttagcagcaagaagaagggcattgagaagagcatctttagctgtagattgaagattcgatgcttcgttctgaatctgaaaacacaacacagaaaaagagggttaaaaaagggtttttgaggagtcgaaaatagagaatctgagatgatgaaagacgaaacctttcggcggagaatttgagcggcgaagaattggaggtcgaaaagagaaacaatcggagaagtgaggagagaagtggagacgtcccaagcagcaggagtaagctggaattgaacaagccattggttagcagcaactctattggaagattcaggatcgtgattcaagacatggattgcttctgctacttttctctgtaactccattctcactcaatttcttttgttgcattccactctcttctctttctctcttcttccactctattttttttcttcttcttcttcttcgactcttcggaattttttttatttttcttaatgttttttgagaaagtaaaataaatttaatatttttttaagaatccaatcagtttctgctctttttcttcctttttggattcgatttcgataattcattatattaaaaaaaaaaacttatgtacgttttttagataaaggatctctaaaagtgtctttaaaacttatgttaaaattttgaaaattataaactaatatgagaaattatagattttcttattttaaaattataacacttttagctggttgtttttggttcataaaaactataagttggttttgatgttataatagtccacagtgaagcatatatgattcacagtcgtttcataaaaataatggtttagttgatattatgtttacgttaaaacataaatagactacaatgctaattaatgttataaccaaagaaagagatagaagaaatgagtgtgttattccattgagataaagtgttatttatatagaagtataaggaaagggtaaaaccctaaaaacatgtagatgatgggcttagatgatgggcctcataatgggcatccatctttattcataacactctccctgatgaccattatagtatcataactcgtaaactatttgaaatgttgcctcattaaaaaccttactaggaaaacccaatgggaaaaaccatggttaagggaaaaagagtgcaacatacaattactcccccttatgagtatattcgtcgagatctttgagacggcgtaatccgatacgatagactaacttcttgaaagtagcagtaggtagcgccttggtgaataagtcagccagattatcattcgaacggatctgtagaactcgtacatcgccgctcttttgtagatcgtgtgtgtagaagaattttggtaggatgtgctttgttctatcgcctttgatgtatccgtctttgagttgtgcgatgcatgctgcattggcttcgtacataattttggagtctttttccctgcatatataccacagtcttcttgtatatggtgaactatggatcttagccatacacacttgcggctagcttcatgaattggtaaaatctctgcataattagaagatgtggcagagaataaacagtatttgagaataagtctgccaaatcttctcttgaacaaatttttagataaagtacaacgccattcttctgctcatgaatcttttagatgattcatcttgaccatcttatttatttctctaaataccattagtgtataatattcatttggatgattgatagaatttcttaatattcatcaagtgtattatttgcgtgttctttaatgtctcgttaaaaaccttgtcatagaaaaatcatgtgggataaaaactatgataacgaaaaagggtacatctacgcatatcattcaatctccccctcggaaacatcttcttcaggagatgattttcaatcaaatacagtatctcgttggaattaataaccataatcttaatgatcaaaattatatggttttcatatagacttataaatatcattatctaatgatattttatcatagattattgtcatcgtattacttatgataactctgtaggagttttaatgattttcaaaacaaatattagtttgatcaatatattttgacaaactcaacgtaaatatacatttatatgattatatgtcatgttacatatttctttttattcgatcgagtagagttctagagaacataattctcatataattaatccttcagagattatatctttcaagaattttatataaatgtcatatccagtgttccgtctcttattgccagactttagatacttaaaaaaaatattacatccaccacaagagaatatatctcttcataatacatttcttatctttgtgaaaatctcattaatttcactattctttcacataaagactcatttattttccactggttttacacatcatgtgcatagattactagtccaaatatctctactagagattataattatatgtctatttcttcttttccattttttttgctaatcattactttgtgtacacttttcaatagactttctttcatgatcctcctttttgtctataatatcaactgctcatagcatgcaaatatattacgatgtcgatttgcttttgattccattatattttgacatgacatagctagctagatctcttcattgtcaagtacttgaatgtttcatttgtcatgtttatgtctcttttagagatcattcactctcttcaagagatcatcaaaatatttatttcctcaatttggtcatttttaattttgtgctccttcacttttacgaggatatttatatttggaaccaaggtctattacgcttcatgcgatcttaagactcaaaagcagtttgaaattggtccttacaggacattcattatattctggagcatttaatttacaactgatataagtgacttcatcactttatttgggtcagcaaatgcgtctggcaattacaacgctaaattctgtaattgaattatcttttggactcttaatatacattctttactccgaggatcattgataattcatttctatttatctttttcaccagctgtatacattctcccccttatgttggaatagctgactatataatatgatagtcttcaaaacgagcggtatataaatccttctaagatggcttagttatcattcatatccaacatgtattcttatcctcctttgagggttcatctctgcgtgctgtggtggagcacttttcacattcaaagcttttagatgaaaactatttggtttctgacccaaaaccaataataatggggaaaactattaattattcattggcttgatgcgtatcgatgttactaaaccattttgtgtatgaacatgaatttcaaaatgttaaacacttatcccaacggatatctaataatggttattataaataaacactgaaatactcttgtactttaatcaagaaagtaatctcgcaaactctatgttgcgggtttataacaaggataaatatgaccttcttgtcgattcaacaatcgagtcaatgcgtccattgaatcgatgcatcttttacaaccattaggtatctaaatgtcatatactgggtgatcaacccataattatcttcttgtatatacttacgaatagataaagtccaaattacttacactggtaaaaatcacattatcatattgctttctgagcaagtaacatttgataaatcattagagagaatcttctggtttttcacctaatgtccacataattctcaatactttcacatcatcattaaaccaggatgaccaatccggttaagccaaatatactcttgaaacttttaattcttttgaaacttctagttctttcaaaacttctaatttacttttcattgcttatcacttactcccttaatgagatcttataatcaaaattacttccatgtattttaataatcaatcatatgttaataaaacaataacgagataataattaaaattttatattctagtataaacgatattaaatttgactagctatgtaagatcttatattcacttgagttacttatcagtgataactcttatgttttcttagcctttgaaaaacactcgatttaagtttataatagttctcaaaatttctttcaaaatattgtatctacaggacaacaatacttgcgtaaaagtttaagcgtctgttttaccatctctgcatcatagatattctcttaacaatgtgagttatattcacaaagagacttcaagtcttgaagtttcagtaataactaattataacttattttatctaataacacatccatataagaattattttgtacaacttttagatctttagtagtcaaagattgaacataatcttctggatatgtcacttattatccatgtgagattcattacttctcctcctcgaaatgatgaaacttcaagttcatccatctcgtttttaattccactctagaatcataatgtattttatatctgatcatattaactttaagatttggagaattatatggcatcaatgattttaattttgtattcccataaaaaacaatgtatatgctcttctagagtcttttaataagattttatactacttgatatactagattatttcatcgttagaaattttttttttttttttaccatatttattttctcaacttctcgtgataatttaaattcttgaaaaaactttgaccatcaaaaatatgatatcttcttaagatacattaaaatagtcattcatgaaaatttctataagtgattatacctttaaattaagttatttatcaatcaatttattttataaaataatcaagtattatatactaatacaattttaatgcaatattgtaaaaccaatcagaataaaactattttgtgcaaaatctggattttacatatatcttgacaaaacttttatttaggataatatgaatttgtgcaaaatttgggtaaaatgatttcgtgcaaaattagggcaaaaccatgaacagtttttttttttatttatttatttagataccacaaagatttagagaaaagaatcttataaaaaaaaaattatcttgcaacgttttagtaaaaataataataacacaatcaaatatatggaaatcttataaaaagatttaaataataataacacaaagatttagatatatggaatcttataaaaagaaaaattatcttgcaacgtttttagtaaaaataataataacacaatcaaatatatggaaatcaaatatttaatatagaaaagtcaatatctaaaagtgataagatatgtataacgttttaatcaaaggagttaaataagggatatcatatcaatcataaatggattttagacaatataatatttataaaatgatattgaatatagatgcaactattcaaaactggaatgctaaaacattaatacatgcttgcatcacccaccaccgggttatgaatagttacaaaattagttatataattataaaattggtaatttatatattcaatattataatagtaaatcacaaaaattaacaattaacaagcatgattctcttctttaacgattttctttgtagaatcattgaatcatgcgatagtaatcatagaaacaaatgataagcatgattctcttctttattgaatcattgaaaacatgcttttaccgatctatactataatcatcgatcggctcatattgttttgtttcaataatagaaaataagtactatgaaccatgagtcgataagtaaacatggttcttaaaaaaaaatgtaagaatctctatatctaccttttagagcgtgctgataacgtgttataaccagagaaagagatagaagaaatgagtgtgttattccattgagataaagtgttatttatatagaagtacaaggaaagggtaaaaccctaaaaacatctagatgatgggcttagatgatgggccttataatgggcattcatctttattcataacaattaataatttatccacataatgcatttagaatcgaaatgttgaatggatcaaattgctcattctgtttagaaacactatagcaggcttttaaaagccaattaatgaccattgtattcttctaatgacccattcagtacccataccaagaacatatactagtaagtcaataacaagcccaatgcaacaagagagagtatgagacaagcaagagtaaaaaagtacacatgccatcattttacaccgagcctattgtgttactaaataatcttatcgacatggttgacctttaacaaaaaaaaagtatcgacatggttgattctaaatactacattcaatgacattaaacgaagctataaaggagagggagaagggtcgagacaaggacaactagctagacgactacaactttttggagcttttcttggtgtagttcagtccgtgtaagcttaagtcaacaagaacaatatatctttcaacatctctctcaatctctttctttgtccattctggtttgattaattttgtgttaatcaatgaaaatttgatcctggttttttcatgatttatccatcacaacaggattgtaacatccacatagatatatagttactctatttacttcattaaaaactttattaactgaatcataattaatctcttgaacatccaactaataagaaaagtttgcatttatttgtaaaaatgtttactttttcttttaaattttaatataatttaacataagatttaaaaaaaaaatatatatatatatatataatatatgtacgttgtgcagtaattttattaccaaagttgacatttaaattcttcgtacatggccaaccagaccggccttgagggctccatcagtagaacatggcgtggagaaagtatctaacaccagtggtaaagaattaatttcatctcgaataagaatagtccacattcagttttgaccaatgagattccatggcttgattcatgtctatatcacttgattgtcaatcttattaagtgtgtaatacgagattatatcatttttctttattcatctttctagtttagtcgtgcagccaggttttatttatgattttaattattcaaattgcatttttctttcggataacttgtttttctactctatcgagagattcagatagttgatttaaaaaataatttagacgacttttggaatatgcagctgagcaataataataatataattgatccaagcatcattaatcatgcaagatgtaatactcaaaactattttgaaagaagtaaactcttttcaccatcaccaaagtaccgtccgtacattcaggttaggagttttttttaataaagaatccatgattgtataagaataatgaaatagtaataaacataaacaaaaaatcactctgatttcaacaatagttaatcactgtaaaatatccgatattcagttttatcatcatatatgcattttgaggactagtatgcgattctgctttgtgttttccgtaacaaataaattcaataagtagatacttcagcttatataaagattaccaaatatcgaaagcttttgaagaacattcttgtcaataccctaaaaacaaaggtaagatcaataataacatgtctttaaaatttattgtctatattctcaactgtttttgaggggaaaaatagagttcatcgtaatcttgatgaggtttcactgatgtcatatttggtatgcaagagtaaattgtttttttttttttttcaaatgtacaaatgtcaaaagaaagagagaatctatctcccaagttaattaagaagtgtactttcataggattccaacgaggtccaggggagaaggagatgcgaaaagtcttcgctcacaagattccacacattaacaaaagtccgcattctagggacctacagaatattcctcaattttaatcaacacttgaattgttgcttagtccaaataaacggcttaactatttaaatattctggtggtttgtgtttaatgaacggtggttataaatcttatcaacaagtttttgaacttaagcaaataaaaccactaatatagaaatatatatatatatatatatatatatatatatgtgtgttaagaactatataggaaaatattatacgtttttttcagggactatacaacacacttatcagatttccatttcactcatttgatctataactttgacattaacatctcacattctattataaagtattaacactgtaatcttcttttttttgctgatttattttaggaggtggtcatatatctcaacctttagaaaatgtactttatatgtcaaatataaaaatgagtgtgtatctatcaaaacgaatacaattatattataatagaaatagttacataaatcatgggttttaataatataaccgaaagtatataaatcatcattatgattaaattttagtaggtctgccattataaaatcgaaatttatcttaaatttagaactctttcattataatttttaaaacttcacacagttaattgaatgtaaaaaaagaaaatctaagactaaatcacatctaaaagttttcatttttcaaggaacatttaacataaaacgactattaattgatatcataaattttgtcttttctattttgaaaatgttactttatgcaatagataaacttaatgtgtaagccatcgaaatcgatgaaaaaaaaattcaaaaacaggatttttttgttttgaaaatcttccaaatctctataaacattataaatagcaaaaaaaaaaagagaaatatatatatatatatatatatatatatatatatatatgattcaaaagattttcaaaacagaaaatatatctttttcgagtttatctctttcatcgagttcgatgactatcaacttaaacattaagtttttatctagtgcatatagtgatatttacataagagaaaaacaaattttgtggtattaataaatagtcggtttatgttaaatgttccttaaaaaataagtttttaaatataatttcatcttagattgtcttttttacattcaattaaatgtgtgagttttcaaagattacagaaaaataatcataaaatccaagatgcgttttgaattttataaccatgaaatacatataaacctatgaaaatttaatcataatgatactcatacactttcagttatatcttcaaaaatcatgattagtgtgtataattgtattcattttgatggattcacaattatttgtatgtttgacatacataatataaaatatataaattccaaaaggttgatatcaccgtttccaaaaaataaacaagcaaaaagacagatttacgtgataatacttcataataggatgcgagatgttagtttcaaagttatagatcaaatcagtgaaatgagattttggtaagtgtgttatatagttcttaaaaatctggaatcccgtatcatcttttcttatatagttcttacatcttaacatatatatttgttatttctatattggtggttttatatttgcttgagttcataaacttcttgataagattcataaaccgtctttgaaaacaaaccatcaaaatggtccctcttcttgtttctttgaaaagatcatttcatacaagcgatatagacaaagcatttaagaaacaacaagttgagaagttttgtaacacgtacgttgttgtaacaaaaaaaaaaaaaaaaaagagtaaagactttgccaaagttttcgaagactttacctttgccatggttaaggagcccaaaacgaagcaagcaactgatccccgagtctcaagtattgacttcgaaaacaaatattaatatatataatacacatatatatatatatatatatatatatgtaaagcatattaattgatatgtaaataactattataagattttaagagtaaataaatagtatgccaaaacaataatttgaatacttatactactattttgagtttttgattttcaattaaacattcaatgacaaaaacaaaaagggaactaattgaattattgcatcttatgcatatactatatttcatagatccaacattaaaataaactaactgttattttagaccattgttttctttaaaataattgttgctttttgcccacagaaattaataatgtgttgttttaggattttagtgtaaattctgataaataatgtctaaactttctctatataaattaatgaaaatatgaaataaattttttcttcttaattcgcttgaaaataaaaaaaaatgacatgaatatggaaaacatcattgtgaatttttttgttagttagtcagttaaagtaaagattatggaagttttgttttggtaaacttacaaaaacaaatattaattgtaacaaaaattgatttcaaactctctctctttctcatttatataactttatttttcacaaatcacaatgcacaactcaaaaaaattagaatgtttaaagtagataatgcaaacaaaaaactctcaaatcgatttgatattaattaaatgaatctcttgatcttcaaattgagttacaatctaaccttttctatttagataaaatgtgaaaatttattttagaacttatactgaacacagagacgtaacgaagagaaacagaaaactaaaaaatatgttgtaaatacgacaaaagactataaaagttaatgacattcacgaaatttacacgttctaatggtcgatgacacaaggaaactttcaatgttgccacaagtgaattgagatctcaagtcagcctccaatacttctgaaagagcggtgctaaccctcttaatacaaaatttatatatctaaacaaaacaccgtactaaaccaaacaatcttagattcaatcgcggtgcttacaatctaacttagttataacaaaatttatatatctaaacgaaaactaaacaccacattaaactcaaccatcttagattcaatcaaaaccaagatttaatatattttatttttcatctagaaagaaaaaccagaaaacctttatgtaatgattcaagtttttttttataccatcacactaaaaataaaaagatagcattcaaaatccaaaaataaataaatattaaaatgattacatcaacgcttcacaagaacataaatccatgaaaatgtcacagctttaacactctccttctctataaatactcataacctcaaacctgagattcctcattccttaaacccctaaacctccaaaattctctgaaccttcacaaagatcacaaaaatggaggtcgaaggcaaaggaggagaagctggaaccaccaccacaaccgcacctcggaggttcgcacttccggtggacgcggagaacaaagcaacaactttccgactattctcagtcgctaaacctcacatgagagctttccatctctcatggtttcaattcttttgctgcttcgtctccactttcgcagctccgcctctcctccctgttatccgtgaaaatcttaacctcaccgccaccgacatcggaaacgccggaatagcctctgtctccggcgctgttttcgctcgtatcgtcatgggcacggcatgtgatcttttcggtccacgtctagcctccgccgctttgacgctctccaccgctcccgccgtctatttcaccgccgggataaagtctccgatcgggtttatcatggtgagattcttcgccggattctctctcgccactttcgtctcgactcagttctggatgagctccatgttctctggacccgtcgtgggttcggctaacggaatcgccgccgggtggggtaacctcggaggaggcgcgacgcagctgatcatgcccatcgtgttctcgttgattcgtaatatgggagccaccaagttcaccgcgtggaggatcgcttttttcatccccggtctctttcagactctctctgctttcgccgttctcttgttcggtcaggtaacaaaccaatcacactcaccggttcagttattttggttttttcaactaatccggttttgagaatttatcaccaagttattttttgttttggttaaatttactttctttgtatagtcagtttatcctgttctatataaatgattaaaccgattcgtttaggtgcaaacccggtttattgataccggtttgggtcgtctagtagagtctttagtcggttaatcatggtcgagtttcagtggatatggacaataactgtttaatcatctaagttgtgtctattacaaggaatagtaaaaggatacatttgttttgtcttatgtttgctatatgtttttggaaatgagtaggatcttcctgatggagattattgggcgatgcataaatctggagagagggagaaagatgatgtggggaaagtgatatctaatggaatcaaaaactataggggatggataacagcattagcatatggctattgttttggagtagagcttaccattgacaacatcatcgcagaatatttcttcgatagattccatttaaagctccagacagcagggattatagcagcgagttttggactagccaattttttcgctagacctggaggaggaattttctctgattttatgtcgagacggtttgggatgagaggaaggttgtgggcttggtggattgtgcaaacatcaggaggtgtattatgcgcatgtcttggccagatttcttccttgacagtgtctataattgttatgcttgtcttctctgtattcgtccaagccgcttgtggacttacctttggcgttgttccctttatttctagaaggtaacatacattttggtattgagttgcttgattggttattcaacatttttgcttacaaaagtttgtttatgcagatctcttggggtggtatcgggaatgactggtgcgggaggcaatgtaggcgcggtcttaacacagttgatattcttcaaaggatcgacatacacgagagagacgggtataactctaatgggggtaatgtcaatcgcatgttcattaccaatatgcttgatttactttccgcaatggggaggtatgttttgtggaccctcttccaaaaaagtaactgaagaagactattatctcgccgaatggaacgatgaagagaaagaaaagaacttacatatcggaagccaaaaatttgcggaaaccagcattagcgaaagaggtcgagccacaacgactcatccccaaacttgataaattcatggtgttttttttgtttatatgtatcgactgttgactatgtttttgtcttcttctcttttgtttttcttaagagttttcaagaactcaatttcttgattttatttataattgtgtgataagttgtgtatgttatgtaaaacctactactggttactgctttctttgtaatggaaggcttttgtaaatgtttgttcatcatggaatgaacaaacgtattttcatttagtatacatattttgttttttagttatcttttgttgatcgtgataataatgatttgaccacaagaatacaaaccagtagattcataatttattatacactgttagtctgttaaccttgtaaaccaaaaacgtttcgatattcatatgctcttttacatcaaacactcggttatttgttttatccaaataactatgacaattacatagttactaattggtactttatttcattatcagatattaactgagttgaaaacaaaattagatagcagttgaattaaactttctattagtattacatcattaagtgtttttaggtgaccaaaaaaaacaacaattacattcttcccactttacaaatacttttaaaacaaaacagcttgtcttttatgtcaaagttcattgaaagatgaacttactttggtatattacagataccatgaaaccttaaaatcttcaatagatcacatctttttagcccaacatctttattttatttacttttgggcatatttagcccaacatctttggcagggaagaaaaactttgtaatcttctcgctatgccattgggctagaaaggccattatgggcctattcttatttcattatgtctctagtgggcctactactgtctttactatcttggccaattagaataaaatctttattgtatgtttcccaatctaccacattgtcacaaacactcacaataattgctccgcacgtagcaagaagtaggccatatggagtccacgacacaaagatttgaatggtcaaagatatataacaaaacaaaagaaataaaagagttgtcgcatgttcttatataaacgatttatatattataactgcattttacattattgtattgtttagccgagtcgtgcgaatggaatatcaaatcgtcatccttttgattttgaatgacaattatacagtaatggagacacacacacaaacatataaactattaaattctactgtgaaacgctaagtcaataagattaactggtgtaaagctgtctgattaacaaaaacttaagtgtgaaagctgtcttttaccactcttccaaacactcgtaagtcgtaccaaatctagttctttatttattttttaatcgttctctatattatataaaagagaaaataaaactattaacttctatataattcataaaccattgattcctaaagattacaaaatcattgatctccttcttcttctttaactttaagcactctctttctctctttctctttctcttgtcgtcggagaatggagaaagataatgacttcaaggatccgtttctggcgtcaactgaggaggaggagctcgacccggcgacccaaaaagcattgatggagtatcttggagtcggaagcagagcatcttctcttgtctccttctcctctaccgccgtcgatatccctccaatctccggtgtcggagactttgtcagagagtttagaatcgagtctagaaagctatggaaactagctggccctgccatttttacaacgatgagccaatactctctcggagccgtcactcaagttttcgccggacatattagcactcttgctcttgccgccgtctccattgagaactccgtcatcgccggcttttcatttggtatcatggtacgttttacattgatatgtctcccctgatcacatttttccctttctgttatggaacgtatacatttaacaaatcttttgcatctctttatagactaaaataaatgatttattatactttcaaatcatttttcacaccaaattcaaagtattaagaatctacaatcgatcaactttaatctttttatataacaacctatatatatcattttgttgtatatttgccatactataaaactagtttaatatgattttggtagtttgtatgcaaatttcttacggctattatttgtatgtatggtgcctttagcttggaatgggaagtgcgttggaaacgctatgcggacaagcgtttggagcagggaaagtatcaatgcttggcgtttacttacaacgctcgtgggttattctaagcgtaaccgctctcttcctttctctaatctatatcttcgcggctccaatcctgacctttataggccaaaccgctgcaatctcggccatggcagggattttctccatttacatgatcccacaaatctttgcctacgctatcaacttcccaacggcgaagtttttgcaatcacaaagcaagatcatggtcatggctggaatatccggtgtggttcttgtgatccatagtttcttcacgtggctagtcatgtctaggttacactggggacttcctggtttagctttagtgcttaacacgtcgtggtgggtcatcgttgttgcacaacttgtgtatatctttaattgtacgtgtggagaggcttggtctggatttacgtgggaggcttttcacaatttgtgggggtttgttaaattgtctttggcttctgctgccatgctctggtgagtgcaaaccttttttctcttccaattattttggtccgatttgatccaaccccattaatgaattcatattttaaatacaatttatttacttttgtagtttggagatttggtattttatggcactcgtattatttgctggatatttgaagaatgctgaagtctccgtagctgcactctccatatggtaaaatttgttatatctcttaaactaattaacatctttacaacatttaaggtttacatgatttgttatttgattcatttatttattatcagagagattctctgaataaagactagacccaacgtgcgtagtagtctcttgttttgtttaataatcaatgtccttaatgtattaagaattcaaaattttgaatacttccactgcaaagaaatttctaatgatttgttttccttaattaatggtgtgtggaatatgaagcatgaacattttgggatgggcagctatggttgcgtttgggacaaacgcagcagtaaggtaaattctagcgtgtgaaataaaactaactctttacaaattctacacatctaacaagtgccaagctaataatacatttttgttggcagtgtgagagtgtcaaatgagctaggagctagccacccaagaacggccaagttttctctagttgtggctgtgatattgtcgacagcaattgggatgtttatagcagccggcctactcttcttccgcaatgagtacccggttttgtttgtggaagatgaagaagttagaaatgtggttagagaactcacgccaatgcttgccttttgcattgtcatcaacaatgttcaacctgtattgtctggtaatatttgtttagtggactccaatagtccaatataatatggttgtacataacgtaaaccgaatgtatatgagattatgataaatttgataacgcaggagtggctgtgggagcgggatggcaagcagttgtagcgtatgtgaacatagcatgctactacttgttcggagtcccatttggtctattattgggatttaagcttgaatatggagtaatggtaatgaaattcacatccttttatctaaaagtaaaacctttatcaaggaaagacgaaagaccggggtttttgatgttttggaaacctattttgatcagggaatttggtgggggatggtgacgggaacttttgttcaatcgatagtcctgacttggatgatctgcaaaaccaattgggagaaagaggtaagaaaccaaaacactttaagaccgaatagtcacgacctcgctcaccgagtttattgttctaatcttttgaatgatatatatatttgtaggcttcaatggcagaggaaaggataaaagaatggggaggagtacctgcagagaaagagactcttttgaactagaaagagttattacttcaagacatattgatgagtctttcagatcacatttttgtatacgaaccttaaaagcaaaatttggttctctctttctaaaaaatctgtaacttgttatgtcatcaaacgctgacaagatatgttataacgctgataattatctataaacaatttgacttttgagaattggggtcttaatgaaaagttaccaaatcatttagaataatactactcgcttgtcagaagttgcttagtatagtagaaacgtgaggacaacagcactaccagcttccttaatcttcttttcatctgtattcgacacaagcttagccttgacaacaacaggtttattctccggcaagaaacctttccctaaaaccttaaaatatccaaattgagtaacatcaatcatagacacatagtgtttcgttgcttagtccataacgtcctgaggaaccatcgaccaaagcttgtcaagattgacgatctggcagtaaaacttgttcctgagcttgtggaaatacctcataccaactttaacaaaatatccaggatgatacttgtcgaagaggatacggtgtgatgcataccaccggcgttaccacgacttccgggaagcttacggtgctttccaaaacgaccatgtccaacagatacgtgttctctaagatttcttgtcttcttcctgctagtcgtcatttctcaccgattgaaattagggtttcacaagaaaaaatgggtattaaggtttatatgtttttacgcggcaagtaataatgggcttatcattgggccttaagagcgagaagagccagaagaatccggttccgattttttagtcaaaccaaataaagccgaaattaaattctgctggatttggtttgaaaattcgttattttaacaggaaataaaaacggtctaataagaataaaaatctattcgaaaaataagaacaatttttataaaataaaataaaaaaatatatttagaaagtgttatcttaggaaaactattcgaaaaaaatatttaatcaatcattatctctgcctgattttatatgattttcacttttctataaatatttgacatttcattgtaattatccaattgttcatcacattaattgtttacaaaatatttcttaccctttttatagataatgagaatgatctagttttgttgtaatttcgtttctttccttcttcactcgttaaattttcgtttaatcagacatcgatctcaaaagctctcatcttcaatctcattgagaatggatcatgatctcgagatcttccctttactctcctacgtcctccaccattccgatcccgcttctcacgcgccaccgtctctagcgattcagcaatctcttgcgaatcgttatccccttctcaccaatccttatgtaatctcctcgttgattgaatcaattcccagtacaatcacgcagacccttttcgtatttggctctcttgggccacgacctgatcctttagctgtctcttctgctcggtctaagatccgagagatcaaagagaatgattctttatcgccggaagatgcggctaaggaagagcaggtttacgctgcggttgtgagtttagaggaagttcatgaaggatatgagaagcagttaagagatttggaggaggagattggtagggtttatgcttcggcggttgaatcattgagcggtggtgatgaagtgaatgaggaggttttagcggtgattaaagacgctgaagatggtggagtcgttgaaaggattgatctttctgatcatgagcttaagcttcttcctgatgctttagggaaaatcgtcggtttggtttcactgaatgtctctcgtaacaatctcagggtaaattcactttagaatttgaatcagctccacatgaatgttcgtgttacagttttaaaatttgaatcagctccacatgaatgttcgtgttaaagaatactctcgattatagtttcacagacctcataaatctcaacgagttctctgattagtagaggttgtgaaaaagcacgaaactaagttatggaatttggaatgtgtgagtattatgtagactggctttagactatggaatcgatgatcatctttagagttgcatgatgactcatgattttggtgatccatttgtttgtctttcaagactttagaaatctgtgaatgttttttcttttagtgattagtaatcagctgttgtgaacattgagttaaacatgaggagatcttgatcggattcattgagttaagctgtttttttgttcttttgcagtttctacctgatacaatctcaggacttgagaaactggaggagctagatttatcttcaaaccgtctcgtgtttcttcccgactctattggactgttacttaatttgaggatcttaaatgtgacggggaacaagctaactttactcccagaaagcattgcgcaatgcaggttttgtgcttttacgtttgttcatctttcgtttcagcttagcctattacctaattctgaagagagatatgttcttgtgattaggtcactggtagagttagatgccagcttcaacaacttgacttctttgcctgcaaacttcggatacggattactcaatctcgaaaggctatcgatccagctgaacaaaatccgtttcttccccaattccatatgtgagatgcgttctctaaggtatctcgacgcacacatgaacgaaatccacggccttccaatcgctatagggagactcacaaaccttgaagtcatgaacttgagcagcaacttcagcgacttgattgaacttcctgacacaatctctgatttagctaacttgagggagctagatctcagcaacaaccagatcagagtcttgcctgactcgtttttcaggctggagaagctggagaaactgaacttggaccagaaccctttggagtatcccccacaagagatggttaaccaaagcgctgaagcagttcgagagttcatgaggaagaggtgggaagagatggtggaggaagagcaattgaggagtgtgattgaagctgagaagcaacaaggaggagcaacaggttggctctcatgggggagctccattgttactagccttttctctggaggtactcatggtggtgcagctaagaagcctaaaaactcatttttggatgaacagctctgatttttttttttttggctttactatatctagctagctttgacgttttttagaaaaagaaaaaaatccggagtttggacgtttgacttgactgtatttcaatgggcctttaataacccttctgaggcccatcttggggttatgtttgggtaacattattaatgagcctcttatgtgccttactgccttagccttacgtaaggtttttttagctgatttatgaatattttacaaagaaaaagatgtaacatgagaggaaaggcctttgtgaaaaacttttttccatcaactttatgtgtatagcccaatcaaatttcgggtaattatataactacaaggaaaaaaatgaaaaaagtcacaaaataactaataaaatatcttatctgtatacattttgacaaaatagtgtaactaagtcattgaatgttctcattacaccaaatccatatccatccatgttgttaaaccatggtggttttggtctttacaagtttgtcaaattgaactttaattttttccaaccaaacaaatttgaatacatatataacatttaaaaaattatagagcatataagtttaagaaaataattaaatttattccaacgacacttgtgggacaaaagctgttgaagaacatctagttacagaaaaaaggaatgatggatcttgggactagggtttctacattaatgcaccaataatatataataatattaagagtaatagtaataaaagagtagtcatttattatctgccagtttcttgtttgctaatggtttaatgggcgtacaatgtatatgcatacatatgaatctgaccctaaggtattagaggtagagagattaggagacaatttgatcagagccaaaaagtactactgatcttactctagtttggcagatcattttgctcctcttctctttctattatttttcctaatctgaattattgtacacttttaatagatgtttcttttattattattgttagttagtacttcaaaaaaatgaaatagttacagcagatcatttttttgtttgttttactgatcatattcatacgtaatttggtgttgaaaagtaagcttataatttggtgttgaaaagttagcttatcataagaacaataatcaatgtgttaattagttatatagattaggacccaactctagtgtaattactcttcaaacagtaagtttggtctatcttctcaatagtctaaacaagacgtgagcttatattataataaagagcattacaccagattttccaataatccagaagtttcagtttcaatccgaaatctagataatttattcaagagtgtggatgcatttaatgttatttggcccaaatttctcagtatatttgagagaagtaaaaatatttatattaagcaatgaattataagttcttaaaatataaagatagtcaaatcacaaagtaatattatgtaacgcatgggtgctcagggtccacatcatagggggcaaaatgatgagaatgatcttttcttatgtcccaaaaggtcattcactttcaacgggatttgtttttttaacctattttgtatcacacttttatctcgaaagattttattttattttttactacttgacggttttttttcctgtttttattaaagcaagaaggttgattgattgaactcagaatttggagttagaattctttttgatgttgatgaaagatcattattaaagaaatacattttataatttagtcctttttagcagaatttgagttagaattctttttgatgttgatgaaggattattgttcttggaagaatgaataattcgaagaagtgaaatccgtttttcaagggataaaattgattgattgagttttggagtcttggtatt
